United States Patent Application Publication US 2015/0376612 A1 - sequence listing, part 22

SEQ ID NO: 55217 - DNA, 1059 bp, Homo sapiens
tttgtaaaatctcaaaattgcaaataatttgacgttattctcagtaatgaaggctgttaaatctcctctcttaacggcaggtatgaaatcatttgaggaagaaaaaagttcataaatacaaacttaaaaaaaaatggaaagacttttccatgcaaaaagatgcattgcaggaaggaggaagagtgtccttcatagcacaccacaagtcagtattagaggcttgcttttctacttgagtagacccaagattccccacctatcgtcttccaaagttacttgtgatccactgcaatcacaagttttacagtgtgtatactctaggtgtatggaaggatttgaattcacaaatagtcaaacatcagaagaataagctgataataatacatttgaaaagaggtcaagtatatttttgaaaactaggagagttaaagtgtttttgtgaactaaggaacaaataaggcattgacaatattttacttgattaggaattttgttcaggtgagtaaaactttaagcatcacttaagttttgtttttgtttcttacttttagaatatctgatctggacttctgtggatttatggaagagctggctttatttctctatcctgtgggaggggcaaactttgattttgtatgtggagtaacttgaccttcagtttttttggtctgagaacaaaggccaaaaaatatgtaacagttaataacgtaattcacttacttagtcaataaatatgtggggacattgtacttggttgacacttgggaatattgtagtgagcactactgatgtgagccaggcactttgcctggtaatcactgttcgtgtataatttaatcctaagggctgtgatgtagatgttatccctgttttacaaataaagaacttcaggcttagaatgattaagtactgttacctaactgataagtggaagctgagctccagagcaccctttcttaatacagtattttctacttgtcatgaaaacatgaagaaagctaggaaacattttctgtgttgataatgagccaataatgtgtatcagtggttcttaaactt

SEQ ID NO: 55218 - DNA, 1066 bp, Homo sapiens
cattatgagtttaaatacaaattagcgtaaagcttatggttaatttggattttttggactttctgaaatgctttgataattcattgcctcctttgcacatttttttcattttgatggttgcatttaacttctttgtactgattttttaaatcagccagtattaatttaacctattttcaatactaatatccatgtatgtaaatatccataactaaggcaaaacagttgattttagctagtttaaatattagtccattcatatttttgtaagtacataacattttcaaaatagctaaaatgtcactggctggtttgaacaactgtgcagttaccgaagagatgaatgtataaccttttctgtaaagaattttaagacatgaccttatttttttgcagaaagaaatctcttcattccaaagattttgcctttgctttcggtgttctagccactgaagtatatacctgtttaattttaataatgatgaagatattgatatctaactcaccagaatgaagttctaattttctaaagacctgaattatctggatgaataaaggaccattgggatggaggatttatagaacgtttctgagaaagtctagctgttgtggctttggtttgtttgtaaacaattgagatagctttccaaagcttttgcttatagaatctaatcactttttctatttattgtcttttgggcttagagtaaagaagggaagggaacactgttgcctttgtgagaatgggagagggatagatgggagagtagagggatgaagttaattttttattatagggattaacatttttaactattcccaatagtgtaacatttgacatttaagtgaaaggcttttagattaatatttttaaatttaaagatgtcttatgctaatttgtttttgttttcatagagaggatctgacgaactactctcaggcagtgttctcagtagtccgaactctaatatgagcagcatggtagttacaggtaagtgttactctcttagcagtctgtcatttgccattttagggggcagaatgttaaaactcaaatttaaccctg

SEQ ID NO: 55219 - DNA, 1132 bp, Homo sapiens
ccacaaaccctaaaacccaaattttaagtaaaaaccgaagaattcagctacatagttgtttaaaaccattgcaaccatagttgctatggttttaactaattttttgctgaaacagtattttaattctgagttgatccttttatgttgtctacctgcatatttaagatgatttgttttaatcttcaaagttagagttaaaaaaaattgtatatgtctgaaataatgttgtttgtagcatctgtcagtaaaacaatatagaccaaattttagaccttagttttatggctgatgggccaaatttttttttgtattttgtttagttttgcttgaattgacgtgttctcatctgaatgggccaaattttgaatttgattattattattatcaaatgaatttacctcacaactccacattttacattatttacctgaaaccaaagttcctttttctgtattttaactttgaattatttgcttgaagaacaaattatatttggcaataaaaggatcatgaaagactagaagacattttgatttcccttaggtagctgtgcttaatgtatacatacatcttgacacacacaaacacaaacacacatctctgacaattcagttaactaaaaattataaggacttaacagataatagtcatgatgtgaagataaatttgtcaacaggtcattatcattgattttgctatgtaatgattacaaagcaaaatcactgggccttgattttgatagtcaaagtaccatgtacacataattgaacaaataggcagaagtgtgtaactctggtttgtcggtttctctttttgtttttacaatgcatactgtgatcgataatgggaaattaatttggaattaatttccaaatatttagggctagtgacagagtaactagtagcagccttggcccctttttcagtctccccccaaaaccaaaaagtatgtaactgaataaaatacgtggaacaactgttgtttggaagtgatgagcagacggtataagatcatccttgagagaaggggtacacgtgaggtaagtatcatgaacactctggctttctgtcttggactattttactgctctaaaccacagagaagtggagagcccagagtatacaggtctca

SEQ ID NO: 55220 - DNA, 1097 bp, Homo sapiens
gtggcacgagaatcacttaaacctgggaagtggaggttgtagtcaaccaagatcatgccactgcactccagcctggcaatacagcaagactctgtcttagatagatagatagatagatagatagatagatagatagatactgtgaaacccagtgctagagtgtttatatttaataagtaaagataggtagagtatcggaacaaaaacagcatgggaaactaacaattttggggaatgaatgagtaatcaggattcaaagcaagtatcaaatgagtcgggaaattagaaaagtagaaattgaagtttttaggggtgctattagagaaattcagtgaggaagagagggttcacagttccttgttgactgatggatgtggtgatttaacaaattacccatgatccttgccgacacccatttatgtaaaaattgcaggtaaaagctagtggagaacaaaggtcagtcagcaggagaaaagtgatgtactgatcagaggtgaagatgctggctttagaattgaggtgaaaaactggttttgagtttggaagagaagtattcaagtagaaaccattttaaaattttatttgctttgaatccgtgattacatgaacatcttccctaagcaagaggctttgaaagagttgaataatgtatggaaaatggtgtgcttaaagattttttacattcatatacaatgaataaaatttatatgcataaataaaagcattacctcatgccttcttaactgaacataaacatttgaattattactggttttacacgcccaaacaaaagttctgggtttactggaggaatggaagggaaagatctctttcattcccccagtaaacctttcccattcaggatcatgggaagatgctgaagaattgtagaactgtaacacaggcagacctaatgcttcataagctaatgtttccatttttggaccctttttcggtgttgctggagtgtgtttatatttgaaaataggctttgttatattattaaaggagcccccattcccagtttcacattctcatagtatcatttatttaaaatgaagacttttataatatttggcactaagatatgaatactt

SEQ ID NO: 55221 - DNA, 1039 bp, Homo sapiens
ttataatcttcctaattttggtcaaaccagttttttcactttttaaaaatgttcatattagttcattataagatgattaaattacaagatacagtcataaatcttggggatagtgatgaggatactctcggagaaatgcattgttaggtaattttgtcactgcataaatgtcatagagtacatttgcacaaacctgctacacatgtaggctatatggtatatgtagccttttgctcctaggcaacaaatttgacagcatgttactgttctgaatactggaggcagttgcaacacagtaataagtattgatgtatctaaacagaaaaggtacaataaaaatatggtattataatcttatgggaccaccattgtatatgtggcctgtcaatgaccaaaatgtagttatgtggcacatgactgtgattgtattctttagtcattggacagtttctttatgagattacattttaatgttgttgcttattaataattactctttataatactgttaagaaacattaacagcaatcttaaatagttgataatttcatttaataataataggtggatatgattttattcctttgaaagcctggcatttgaattttcaagaattatttaagtattctcagctatgtttttaagttctttttggaaatttgtagtttttttacacaaataggaaaattcatacattcttttattgttgatatataaggactgttttttaatgtctttcagccaatggtaatgatagtaaaaaatttaaaggagaagataaaatggatggtgctccttctcgtgtacttcatattcgaaaattacctggggaagtaacagaaactgaagttattgctttaggcttaccttttggtaaggtgaccaacatccttatgctgaaaggaaaaaatcaggtacacttctttcagggtttatgaaatgttaaaccccaaactatccagcaggtgtgaattaattgtaaaagggagaaaatagtaggttatttttcttaaagaacagaagtcttattctcactttt

SEQ ID NO: 55222 - DNA, 1113 bp, Homo sapiens
ctgctgtgacacctcatcttcgtaaccaaccaatatatatccagtactcgaatcacaaagaactaaagacagataatacattaaaccaagtaagtatgtgtaggtacataaataaaatggcctagaacatattatgaatctcataaacattaataggaaggaaatgtttacctgttcagatgttccttataggcattttcttgttatttttaaggtattttcatgcagaatgtttctaagtattaaatactatgtcattttgaattcctttaatcccctggtcaaatgttctttttcttgttgcaagttaaaatttttgtgtagaaacttatcaggtaggatttattattagcataaactgtttatacaactctcctgcttagaatttaaggtaagaagttcagtgcctttggttatttgattttttttataggtcttaatttcttacggaaaatttttttttgaagatgtgttaatggttttcctggaaaagaaatcttaaggatgaagaatatgtgaatgtattgatgttttaaaaatgtaatatagaagatattgtttaaaattaatgtattcaaaaatagcattagaatgttttccgacctacattataagactgctgtaatgatctaaaactttagctgttttaatatagttttaaaactaatgatatctttctctgtcagtaaaatacaaactttttcttaataaaaatgtaatggaaaactgttcctcatagatttttgtcactttacaaagtgacaaaatcattttgttagtttatggaaaataagcttgtaaaactttttacctaaaagataggactgaaatttcagcttttttaatttgatgatgagtttttaatttcttttgaaaaagaatgtatgcttctaataatttatcaagaggaagaataccaaaagaaaatatctgctcttctttctttttacttagatttttttgcatttttaacttatttttaacaaataattgtttatacttatggtgtacaatgtgatgttttaatacatatatattatggaatgatcaaatctggctggttaacatattcatctcttcagtacttacaatttctttatggtaagaacattt

SEQ ID NO: 55223 - DNA, 1068 bp, Homo sapiens
atggtgcatcctgtaacctggcatgttttctcttgatgtcagtcgtttgctgccattatgtcactgctctcatgcatggaatattgtgggttggcctgccttttgcaccacccttcctccacctcacacttcacatggccagtgttaaatatcttgaggtctccctttagctatttcttctcctaaaagctatcccctgataagcaaagagtagattaggtttggattgagagtgttaactccgaatgagatactgctatgcacataaccagagtggctaaaattaaaaggataggtaataaaatactggtgacaaccatttttgaaaactcgaaatatctactaaagttgagcatatagctattctttgatgtagtaaactcgctcctagttaacatacctgagaacatgtacataggtatgttaaaagatatgtacaagaaagttcatggaacactgtatgtaatagcccaaaaaactataaatcatccaaatgttcaacagcagcagaatatgttgtgttgtattcatttagtggaatattgtatagtaataaaaatgaacaagctactgctgcctgcaaaacatgggtagtgtacatcataattattggaagaagccaaaccaaagtagaatacatctgatatgattccatttatgtaacttggaggaagcgtgagtatggcttctagagtgttgataatatactgttttttatctgggtaattatttcacagagatgtccaatttgtggtattttatggagctttatacttaggttttgtgtccttttgtgtgtgtgtgtaatattttgataagaagttttattaaaatctaggtttgcaagccaacactgctccatgaattataagaaaaaatatatgaagtcattaaaaatgaaatcataaagaaatgtatgaagtaatttgttactgatgtgagagaacatgattgttaagccataaaaggaagatagagaacaatgaatagtattaaataaaagtatgaatagtattgaataaaaatatgaatagtattgaaaaaaatacagactaagtataatattta

SEQ ID NO: 55224 - DNA, 1766 bp, Homo sapiens
ttgcatgttcaacattgatcccaaagcctggataatttttttgaatgaaatactagtagaatatttgatttattaaacaggtagtacctggctcatggcaggtgcttaaaaatatctgttgaggggccatttaattttgtttaatctgtgtaagttctaggaacaaagtgaactagtagtgtaacaggttgcaaagtatgtgacaataatgggtatgtttctaaactacataatcttaatttccagcgtgctcaggcagttcttcaagctgtgacagctgtccagacagcaaatactcctcttagtggcaccacagttagcgagagtgcagtgactccagcccagagtccagtacttagaataattattgacaacatgtactaccctgtaacacttgatgttcttcaccaagtaagtttaatctgcataattacctataaattagagaaataataatatagtaaataagtaatgttttgattttaatgttttaacagatattttctaagtttggtgctgtattgaagataatcacatttacaaaaaataaccagtttcaagctttgctccagtatggtgatccagtaaatgctcaacaagcaaaactagtaagtctttcttttgagatggtgatttttttttattgaaatgtatatgtagaaaaatatatatatatgtatgtatacttaatgatatcttgtagcattacagatagtagaaattgatggcattaatattaagaaaccttaatatttgtcataaaagaaatatttatttttaggaaaatcatagttgtagttaaccatgatgtgggtttctattattttactttttttttttttttttaatttaaggacaaaagtttgtactcttaagaaaaaagcaggactatattgtgaatgtgcaccagcataagatttgaagtggcttttgctgggaatttcaaagtaattagttttcaaaagagtttggctgaaatatacagatgtggctcaaatgctatgataggctctcagtttatttaaaactatatattctctttaatgtcttttttttaaaggttttatgaataggtttctagtcactttttattcatatcatttatcttttttgtcattgttacatatggaggatgtaaggtcattgagagatgtaaaatttcccatcaaggctgccactgaaaactgcgcaccacatctttgcttccaagtaccttaatcttctgtttgtatatcttaaatctacttttgctctgtctctttaactttttgtgccatagtatctcattattattactattccattattaagccattaaaaattcattattaagccattattatgaaaccatttaataagcttacatttatcttaactggttttcttcctttcattcattcttttactttcagattaattattgtctctaatacttaaatgcttcctccagatcaagattacttctgtggagcccagaccattttttacaattgtttcattgcatttccatccacacaacctcattttgggagcaaaattagttgtaggtagcagaaaggctatacaagtaataatagcataattgtaatagtttaccaagtgccgtagtctcattttttctgaccactactctatattgtcaacaaaacagggttttcccctgcgttacaagaggatgctaagatttaaagaggtgaattacttacagtgaacaccacctataaggtagacattttttcagtcttagcctttctctccagtatgct

SEQ ID NO: 55225 - DNA, 2978 bp, Homo sapiens
tggaatattttccttgctcttctgaccccaaagaaaagtatttgttagaggaccaattaaatgaaatttgagtggggattatactgtgtttgagctataattcttaaggggaaaattgtttatatgtgtatcttgtctgaagtaatacatagttacattaaatctcataaaagtacctcaattgtgtcaactgtttgacatttttgtttaatcttctgtgaacagatactaagcatccaactatgatattgatgtttgtgcacaggtatgcactcaggtcttcttgacaaagatctaaagttataattctaagagagtagataattgttttactaagtacttattctggtatcagaactcacacttcacttattacagaaggaaaaagaaatttgtttcctaaacttgctttgccccattaccttgtaatctagaccctttggtaaaatttgcatttttgataactacagtaatgttcattttacttgcctgcatctgggctctacttagagaatatcacataatattacataatctgacaattggtaccagtttaaatccatcaacgtcaactacaagtaagccctctactctactttaaaaatctcttcccatttcttcagtcaacagtttttctgtttttcacaatgcctatgtcagatagaaattttcccttctaccatatctctcctcactctcacttgcttgaagaggaaaatcacatggaagcttcatcagcttttcttgcaaaatctgctaatactcacacttgtctttctcttttaataaaaggcatagatgtttagttatctaagaccaataaacaccaaagcctatcgtcttctgcctgtcaagagactgcactatctgtcatcccctttctcatttatttctctctatattggccacttttcaccagtttcaagcattctcagcttctttcattttaaatgaatttaccttcaactttcaatccatccatctataactctacgtactttctatcaccctgcctcccctctcccttttcactcataaccagacttcttaaatagtctatctttgttgtttattatctcatttctctacttactattatttggttttagcactgttgacccaaattgctcttcctcagcgtcaccagcgattagtagagtagctaaatgctagtgatatgatttagtccttgtcttacttaatacctagataatatttggcactgtgcaccattgtcttaaaattctctttcttcctggtctctgatacttctcacctggatttatcctacctctctatttcttccttgtcttgtaactccccttctacctgggaggcctcacctgctgtcacagctccattaaacctcttatgattcagacagagttcacatcacattttctagctcagacctctcctaagagacccacactaagaacctggcggactaatgaatatcttcaaacagtgtgttcaatctagctcctgtttttggtgtccgctgtgttaggaaagtgcaagataccaacttcagtctcattaacaagccagtaaacatggtatttttccctttccttccaacctgtcatcagatattattgattatacctcctaaatttttgttgaatctggccttttttctccaactcttgctaccattgcagtctaagccagtgttattcaagatgctggtctctcaaggtagtagtgtgtgtcaaactgaaatcagcatacttctagcaacagtatgcttaatgtcaatattggcataaattttgacacagacttcttatattcatgcagagtagcctgggcttctggaccgtcaatcataatttaagtagcattgatgtagtaataattctctttcatatctccacttccttggccttctgactgaactcaccattttgacatcttcccctacctccattatttttccacagagtactaggaatcatctcaacgtcaagtcatattgcttctaatcacaataccctttagtgacttttttgtccttgcaataaagtccacagtccttatcatggcttataagactctaaatcagtcctcagcttgcctctccattctcctctcatgcctttttagctatattggacttctttaaatagcttgcatatactgtattttctctgatgtctcgatcttacagattgctgttccatttgctaatactattttttctcttcatctctttatgcccaacttctgcttctctttgtctttcaagtatcagtttagaagcctcttcctgagataagtcttctgtaacatttcaactagattagatcccttcctttcttagttctcagtatcacacataaaatttataatttgttaaatgtgtatattttctgtcggactgtaagttctgagtaccatgtctgctttgctttctgctgtatttattaaacattgacattcagggtgaaaatcagaagtcatagtaacaatcttaattatcaataaaaagtattttatgcgatcctcatatttattaaagaaaacaccttaatacctttcagaaaatcttgtttatttattggaaagtagtgtattaggcaaagatgcgtcttctcttggctttctaattcagcttttataatgttgaggaatataattacttgatgcataaaaatatcaatctttttaatagtataataagacatataatgtaatctccttttcacctgggatttaaaaattgtttttacatagtccttacattataacacacataagtaggaaatggttctttttggtttttgttattagaaacagcttttcagaaacatgtctttattaggaatatctttagttgacactggacagtatattgtgtcttctggaagtcctgtttatatgatcattttattttaacatataagtgggttgtttcttattctttatttcttccaggagattccatttcatcactaactgataataaaaataaa

SEQ ID NO: 55226 - DNA, 2708 bp, Homo sapiens
attatcttgagcttttaatgtcagaaatctttgctccaacaagatcaccacattcctgattgctgaaccacaggactggtttgtgtgctactgctatttcttgggattttgcaaatacatgagcttgaagtgagcttgcatatattttttaaatttgattttactccctttcttatttgtggtcacctcctttaaccaactatttaaaatacctggatttttgctctcatacaccctcagctcctatttctttcctcttttgccaacagatgattaatttacatcttgtttgcttatttctctagctcttgtaccttaggtatacttctgcatcttccacctacataaagtttttgtttttgtttttaatgttcagagggaaaatttcaaagggtcctggagggctttctaacaattggcatattcattgttagataatttggcagtcggacctcagtattgctgggaaagaattcaactcctaaaaaacttagtgtgtgtttagtaattttgtatcagcacttttagcattaacctagatactgtgactcaaacccagctcttttctcataaggtatcattttctctttgataacattgaagtagtcacctaagagtgaattttgctacttatcttttgatatttatctattgtgtagaaacatcagttctattacttatctcacattttccctataggaatgctacattagtaaatgaatacctatcttcagtgctttcttcacctttacaccagggtattcaattaatagttatgttattctggctgataaagttgattgatacatggcttccacttttatgtgatgataggtaccttgcctaacccaaatgtaattcaaatcctgatgtgtatgaactctctttcagtttttaccagtgctgtattgaagtggatgaatctgtgttgaattattttctaggttagtttttaggtaggtagattagtccataaaaaaattcgtatattaagagaaaaggttttatattcccagaggtgagaatatttgaattaaaagctttatatacttaagcaactgtagaggtttactttttccataacacgacatgtttattcttctaatgaaaagttaacagtatgttcacctgttctctagtttgtttccagcttatatccagctgaactagaaatggtgattatataggagcagaaaaagtacaagataatcatagcggtaacatagtcctttataattcatgatgtattttcacatatgttgtctttaatttactcctcttaataacccttgaagaagcatgacagccattgtcatcattcctgttttcccgattaagaaattgagattcagagaggtcaaataacttgcttaagatgaccgaaaagagtctaggcttttaattaatcctagacctggcactcgtcagtttcagaacttttcgggaatgacattggatttgctaatttcatcaagataatctgattgggggtgaacatttcaggttaaggaaaatactagtttttttcttttttgcctcattttatgggaattgctattatgtgttaggataatttggtttgaagcaactttgtacaatgtggcatcaaatagcagttaccttctaaaactgtactgaatcatataagtactgccatccagcaataaatatatgtataataaaattaaccttattgagcagagtagtgtggtactactttggtaggacttcctgtttgtgatccttattagtttttttaaaactaacctatttgcaatttttaaaaattaaaagtattagcatggatgcttagctggttgtattttaggttgaagtagcattttctatttaaggaagataatatttgggggaaagtaatacatggacagctggaacagcaaaatttgatatatgaaatttgaatccttttcctggtagcttttaagttcgagtttttgttgttgagttttattactaaaattatactttcactaatttttattttttgtttaagattgctgatatgctttattcacttttacaggccctagatggtcagaatatttataatgcctgctgtaccctaaggattgatttttccaaacttgtgaatttgaatgtaaaatacaacaatgataaaagtagggattatactcgacctgatcttccatctggggatggacaacctgcattggacccagctattgctgcagcatttgccaaggagacatccctcttaggtatgatttttattgtcttaaccacttttctcccattttgccaaatggaaaagtaccagtaagtataatgaatccccccattttggaccttaccaaattgtgttaggtttcgtgagttttctttttctcaagtgagaaggcatatgaatactgttaagaaaaacccaaagtattctttataagtctaattaaaattatatgttagttttgttccttttaataccttcagcttctcttccatgccactctcccagaacaaaagaagaaaagctctaatgaagaaatactgttgaattcttaatgccatatttacactttaaacttgatgtcactatgcctgagtctaggcctaaagttcttgtgtgtgtttttcagtgctgatctgattgttttaatttagcattgcatggaaacagtgaaatgttaagagacaaaacatacataatgggtggaggcatatgggatttt

SEQ ID NO: 55227 - DNA, 1063 bp, Homo sapiens
tttttatattagatctagctacttgactgaatttaattactttagaatcagtactataaattttaattgatttattttacacagtaattttttaagactaacatttatgtctggcttttctgtttcctttaatgctaggtatcacagtgtctcagaaaatgtaatttgttcaaagaaaggagactgagtgctttgtaatgagtttaaaatctgacatctaaaatacataatcacaaatgtggccgactattagtcattcacatattctgtttcaaagaacacagtgatcaaaaatccttcagattataaattgagacatcattataatggatcattttatcatgttaagaggtgtagttaatttattaaggggtagatcacttttagaaaaattgctggaagtaatttttcatgatcatgttatctacattctaaaaattaggagagagactgtgtacaaagagtgtttattttagagctttccttgtatttcaaattgaataacaggcattctcatcataaagtttttaaaagaaaggcaaagcagactttctgtaggaaatcattgacgttaaaatagttataattgtgaacagatacaacatttattcatgaaggtaaacatgtaggtcttatagaatattgtttctcaaaattttgctgcacgttgaagtcaccagattctaccccaggctgagaatagttaaagagtgggtcacaggcattcctatgtttttaggatctcaagatggttttactatgtagcaagagttgagaattactgctacagaaaagagcttgtaacttaatgtcatttaaatctattttggtacagttctcctggcacaattttaattagctgttaaactgaatttataattttctatatgtttgtgatacataaaattaactggaaaactttgattttctttctttgttacatttgtatgggttattcatttggtaatatttattaatttattattagagatttcagctatttgctaatataatgaatcccatacacctgtcatcttggttcaatagcgctgacacttagttt

SEQ ID NO: 55228 - DNA, 1485 bp, Homo sapiens
cattataaataatatttgaatgaatgtgttttacatctggaatgatttttatcatctgagtaaaggaaatatgtttgatggtagttgggaactttgaaggtattacgggctacagatgagaaaaaaatgttactacgtcatttcatgtttacatactgaccagcattttcaatgaaataagcttattactataggactataaaatgtttttcaaaggtttaactgtccagggcagatacttaagactatctgatcatccattaaaaacttttcacatagtcttgcttaaatggatccattatgtttacccattatattgttctcagctgtagttttaagaaatttatttcatttgttaatacttactttccattaccttccccttttctgtgacaatccgttgatacttgaagacctctcttgtattcatcttagggttaatatttttaaggccaaacagcctaaattctatggtaatcaactccagccttgtgtaatgaaatcttctgcataaagataggtttaaatcaaatcagattgcagattttattgaagaaattgtgtttttaagagttgacaaatatatgttgtatggctaaaacaaagaaaatacttctgttgcttctgcatttagtagaagaaaaactatatatgtttgtgaccaaagtataaaatatgattctttccagggaggtaaaggttatgcagaagattttcactagcagctctaaaaggctaccctcaattaattgccatgaacatttcatagccctagaaggatgttggctcatttcagtgtcatcctggtttattctttattgtattattcagcagtcattttaacactatgctagacactttagagattcagaagagtaacagggtttctgttctcatgaagcttatcagagacagaaaacatatgagttagatctaattggaggcaaactgaaatatatagtggagttagtgtggttatcagcacataaatgagtgatccatcaacaaaaggagaaattgggagggttttatgggccaaaaacagcatgattaaatgtgatagagtatatgtcatgttttaggtgtgatgaacattcagttatgtgtgacgaataggataattgaaaaaatatgaaaggctatgatgccagaaagtattatgggacaagatcttaaaaccagtgttacccagggagtatgaatttaatatgggaattcttaaactcctttatgactggaagatgagcatcagagtgtctgcgaccatttgatgatattatgtaccaagttttagatgtttggcttttttcaggttatgaaagcgggggatgagttaagaaccactgctgtgaaggattcatcaactatttttaggcagttgggtaaaaatgaccaatttagttttaagaaactgactgtggctccagagtatgttggagaagtgaaaatggagactaggaataacaggtgggagactattagtct

SEQ ID NO: 55229 - DNA, 1050 bp, Homo sapiens
ttgaaaacaattatgtcttaaatatttaaaattcttttaaacatgtttttaaccatctttaaatttttttggtaagtaattttcattagattgttaaaatgtatagtggcacggtagggttgtatctcaagatatgaagcagtttttcataaaaataaagtattaaccttaggctggtatgtttagatcaatactgtatttaaatagattgataattttttatatattttatgaatttatactttttcctgagatttcaggagggaaaaatgagtaggagatgactgagagcttaaagtttgggagtgtcaattaactcagcattcttttaaaaaacatgtgtcatatattacagcattttcttttatttgaagtgagtaaatgtatctttttaaattccttagtaatttttgagcactccatatgtataaagcatgtgaatatttggtagcattttacaaatgtccagagatttgtgagagttcctgagatcttcatagggggcccacaaagtttagtattacttttcacggtaatactaaagtgtattttgcctctttttactttttctcttaatagcatacagtggtaactgaaggctaatagtatgtgtgtttatgtgctttaaaaagttcgtggttttggccaggcgcagtggctcagacctgtaatcccagcactttgggaggctgaggcaggtggatcacctgaggtcaggagttcaagaccaaaaccagcctggccaacatggtgaaaccccatctctactaaaaatacaaaaattagccaggcatggtagtgggtgcctgtagtctcagctactcgagatgctgaggcaggagaatcacttgaagctgggaggtggaggttgcagtgagccaaaatctcgccattacactccagcctgggggacaagagcaagactccatctcaaaaaaaaaaaaaaaaaagttattggttttaattttggaaatgacaaccattaatagaacccacattaggccgggcgcggtggctcatgcctgtaatcctagcactttgggaggccga

SEQ ID NO: 55230 - DNA, 1046 bp, Homo sapiens
caaaaaattagccgggcgtgttggcgggcgcctgtagtcccagctacttgggaggctgaggcaggagaatggcatgaacctgggaggcggagcttgcagtgagccgagatcacgccactgcactccaacctgagagacacagcgagactccgtctcgaaaaaaaaaaaaaaaaaaaaaagaacccacattaacaaaaactccttgtgattctccatagttttaagactataaaggggagctgagaccaaaaagtttgagaactttttcactgtgggatacaaagttgaagacaattatagttaaataagcaggagatacagagtattttaatgaacagtagatggttataagagtcaagagatgtacagagaaaatgctagtgattagagtttttagattattttaattttggtaactaattataattcctcagttaagattttttggcttagtgggcccttagaattacttcttcctgttagaattaaaagtgaaaccagaaattaaagtgatttaatttttttattgtggcaaagatctagtccaaatatctttgatggactttttgaaaacagactttattgttaaaaagggaatttgaggcttggtactgaacttcttctgcatgccatattgaagttggtggttttttgtttgtttgccatcagtgggatctcatacagactatggaatttaatagaatttttaagatactgtttttcctaaaaggtagctaactaaaggcaggaaaatagaatgatgtaacaatataatgactacatctggagtttctgctactaataaataattgtattgtcaactttagtcaaatattctgtgcattcagtcagagctatctgaaaatactgacgaatagtattacaatatggggaggtcacttctcaagactgcaagaaaaaaaattgttgtgtgtaggaatgtttgcctaggaattaggaatgtatacttgacaacaagtgaacgtatccattgaatgttaaatgagaacaacttatggggaggatagtgagaggtatagtattta

SEQ ID NO: 55231 - DNA, 1534 bp, Homo sapiens
tggccatgagttgatcattgttaaagttgggtgatggctacttagagttgcattattttagtcacttttacttttgtatatgttggaaatcttccaaaacaaaatgtatagccataaaaaaaagggagcaaagtaagaaaaaaaggagagcctaaaaaaaaaggtacaggcaaaaaggtgtgaaaagaaactcatcaagagcaagagtattaaatgagaaacatatgccactgacagagttctcagaagagataaaggctgaattaaaaagagatggaggggaaagttttataagtcaaaaacttaggttaaggtttgtgaatattaaagagcgcttcagattgccaatgaaaggtcatagtagtttctataaagtcaaaagatcaaaaacttgacttaaaagagtaagatctctaaaaccaaaggtaacagcagattcttatgaaatgcaccagaaagctggaaagaaagaagaaataaaatgtgaacttatggaacaagagtgctaagggcctgttctacccaggtatgttatgaaatcaaattcatttagtttgggtgtttgttcctttatgttgggaagataaaaaagaacatataattcgtttcttgagtgaaccagtatttatgagaaataagctgggtgtgtaagaatttaagggatgaaaatattccaagttgattggtaattgaaaagtagatgaacggtgctaacacaaaagggaattctgtctagaataaatgaaaatatggtgacttaaagatagtaggacagcaataagactggaaattagaacaataaaataagaaggaaatgataacatagattgggaaaggataggaaaatactgaaacaaaatctgtgttgtatagtgatggtttcttgttctttcaaccgggagagtgttgtgttgaaggaacttgtattcattttaattacttgagtgtataattaagaaggcaagcacattttgctaagattttctttatttgcatgaattaaataatgatgttcagagtgatttgtctctaggagctgaaagactactacctttgtttcataagctgtaattatttgatttcaagtgtgagtttatgaagaagatagcacttgcggaaaaaagtgaattaccattatgtcgaaagtgatacttttttacatttggccttttactgtaaatcgtggaagtgaattttccaagcctgtgacttggaattatatttttcatgctttgtttgcttttccagaggaaatagagtattatatatttgatattttaacataatacaggtatgtactttagttcaaataattaatggttttgttgaaatcaattatttttctttactacacatcagcaaacaatttttctaaacactataaaaattaactttcaggaaccatttggaatggtcagccgtaagccatgcagccatcgtgcttaaattggtttttgtaaacgacttgtgtgtgtttcgtaaaatatgctttattttaaaattagggcttcctgttgcagctgttccaggagct

SEQ ID NO: 55232 - DNA, 1848 bp, Homo sapiens
atattttattttgaatgctatgaaagctggtatgaaatgtgggaagctcagtgtatcagtttatgatgtctaatttgaatatttgtttcatttttaattggcctctgttaatatgaacattagcttattttatccatttaatactattatcattcacagttctgcatgctaaaatgtttgaatcagagtgcctttgtttttattttaagacttttgcctgcatttcataaccagccatgcttatgcagttaaagttcaaagtttaaaattcctatgcatgctttccttccctatgttgagatgaaatgctgtaatttactctttgatatagatgtactttacccatatttgtcttggatgactacattttactcagtttttcttgtacagtacataaaccaaccattttctgaccaaattcctgcatttcctatgtactgacctatattttattttgtttttgttccccaattccttatttttttcttctgcattgctgtttcccttccccatttcatccttttccctgtgtgttcaccttccctttccttgtcttttcccaaatgcccattcccttccctgtcttatcctttattttccttgtccttgtcttcattccctgtctccattccctatgttcatgcttctgtgcttgaacaaatgttcctcggaccaacttgccccaattaaccgccttgaaccatgatccatgaccacctcaccattctgcgggaaccacccttcgttatggatgatctgttcatctccgctcttcctcgactcttctctcttcttgtcttacgctgcttgctcttctctccttctaaagatggttacgccccaaagtctgtttaccctcttcggtatgttattgttagcactatacttttattattgatttgatttttgtttcaccttaattcttatttgtagctagcactttggcttaaagttgaatagtaaatcttttgctatttttctttgctatttaaaactctccatagacacaaaatttgttttaatgcatgctaatttattttgcatggtctttaatttaatatcattcacatagctttgagggtttatcaaaaattattcttttcaaaattcactgttcaaaatcttgatcttctttattcatttgtgagaatgatgagattgagtgatcatgttgatgtctgaatgtttcattgatatgtcagaaagataatctttaggtgacttccacataaaattaattccatttttggattacctctctgtggctccaaaaaaggtgtttatggagatgtgcagcgtgtgaagattttatacaataagaaagacagcgctctaatacagatggctgatggaaaccaatcacaacttggtaagattaaactatgttttatctatacatcttcacttctgctttcaaatgcataatgtgaatgtgcgaataaaaataaactcctttacatcagtaagaaattattttaatggccagggctcaaaatgtcattttaatgtgaatagttgtatgtgacgaacatatttgtatttttctgctatcctcctactgtttttcaaatgcactcataataggaagagattttagcttcaaaattgtaataatagtttcacatgagaattatatcatttatattgaagattcatagtgatttttattctaggtactccttgttaatagaggctaactgttcatacagtccatagaatccttcttaatgccatgttattttaattcttctaaagtcttgcgataccaggttcttagaaaatgaaaagcttgtgctaaaaacactgttgttaatccctttgggaatcttaaaaggcactttagtcagg

SEQ ID NO: 55233 - DNA, 2556 bp, Homo sapiens
atgagactgagttatccagataaaaaataatgtcagcgagaagtagagaaacagatcatgaatttgagggacaattaggaggaaggctatcacaatatttagcaattaggatgtgtaacagaagggagaaaaagagctagggatgcttattaagtttctttcttgtgtagctcactatacgatttgttagcaggattgttgaggaagatagatattcataatctggattttcattctatgaaagtagctggcttttttgccagaatgccttgtctagttcaaatgaaaatgtacttaagtcttatcaccagtggctatggtaaattggtgatttattttaaaatcataagaaaattcaaatttttaaactgttacgttaaaagaattatgtttgttttgagctttgatattgtttgttaatagacatgctttctttttatagccatgaatcatcttaatggacagaaaatgtatggaaaaattattcgtgttactctgtctaaacatcagactgtacagctacctcgagagggacttgatgatcaagggctaacaaaagattttggtaattccccattgcatcgttttaagaaacctggatccaaaaattttcaaaacatttttcctccttctgccacccttcacctatctaatatcccgtaagtatataagctagagtgtattgagatacattctattttgataaaatatgaaatttattcttaatcttcactttttcttcccattcaattttcctagtccatcagtagcagaagaggatctacgaacactgttcgctaacactgggggcactgtgaaagcatttaagttttttcagtaagcaagcttccttatctttaaattagtgacctgataaaatttttaagtagtttttgttcttttcgtttatagaaatttttgattccggaatggccaaaattcaagtatttaataagccctttctaatttgtatgaagtgtctaattttataattttgtttcagaagagatcacaaaatggctcttcttcagatggcaacagtggaagaagctattcaggccttgattgatcttcataattataaccttggagaaaaccatcatctgagagtgtctttctccaagtcaacaatttaaaaatgggaagatgaagattgggggtgaatcacattgttcaatgtcatcacctatttgactgttcagaaaagtggggaccagagtttgattttttttgtttttgtttttttggggtttcttttttttttccatgctgttatcattccttggttataaaatgaaatggcatatgtaaaggcagagttgttaactgctatatttcatctgttctatagggaagccattttgtctgtttaaaatttcagtttaattttgctttttttttttttttttttttcctttcaacttagttgacatacgtgccttaaaaaggaaaactagtgttgctattgtgcatttactagaaaaaaggaattggttgtttagggcacactgttatatgggaattaaaatatgtttaggcaggggtgtgtaaaaaggttaagtttttgtttctcctgcttggaacttattttgaattactggcttgtcacctttttttctatttaatcaaataagatacatgatattgaaagaataaagcagcatttttagtttttactaccttaggctttattgctttgaaaacaacattggccttttgtatctcacaattctggtctagattcagttatgaatgtaggcattagttaaaattaacaagatgcagagtattaatttcttaagacaacaaagtgatttctgtaagtttgagccctatgtggaaagcattgtggaatcttaaccttttcgtacacactcttgtgggacgtatcatataaatgtcagcactaagtaatgtcttgtttgtggctgaatatttttcgtagatgtttttgaagttgacatgacttacgtgcatttaaatatatattgccatccttagtttgtaattaagatttggaatatggttgtggatttctgagcatgtgcagactggtctagctagttcaggaactggtgcatgtatttttcaaagataaagaaagtgtactgcgaaaatatgcaggaagattaattttgtggcagttttctaaaactgacaaccaggtgggaccaaagtttatgtgcctttagtcttaatttaccttgcattgtaatattcagttttaataaatcttcaaaatattttgtatttaggaatagatctgactttaataaaaacatggctcagaatctacaggtcaaattaatttgaacagttcttgtcaatccgaattgttgattctgtttaaatgaccaatactttttgaaattgatgtacttagtttcaagattcatagattctgttatctatgtagacagaatggtcatgtatattttctattagttgagtttttacatctttagaaatgtaaaattcagtatagtttgaaagcggcacaattaaaaattaattttctaacaaagttgggaggtttgatggttgtttaatttcatt

SEQ ID NO: 55234 - DNA, 1057 bp, Homo sapiens
tctcttggctagtacatagaagtataatttctcagtcataaggtggatgcataagttttacaagaaacttccaaacagagttccaaagtggctttactctttcacagtcctaccagctgtgggtgggtgtttggttcttctatgttccagccaccttttgatattctcagtctttttagtttcagctattctagtacatatgtgttgatatctcattgtgattttaattttcttctccctaataagaagatgttaactcttctttatgttcttattggccttccatgtatcttactctgtgaactgtctattcaaatattttgtccattttttaattttttaattgatttcttggagttcttaatcattctagttataagtccttagatcagcaaaagcatttgacaaaatccaacatccaatcataataatggccttcagcaattcattaatagaaggaaacgtctacaaaaatcctatacctagtatcatacttaatgttgaaaggataaattattttctcttaagatcaagagctgggcaagaatgtccattctttctacttctattcaatattgtactggaagtcctaaccagcgcaataaggtcataaaaataaataaatgatatttacattggaaaaaaatgggcttgcactgtctttatttgcagatggtaagattgtgtgcatagaaaatcctaaagaacctataaatacactattaaaataataagtgaatttaacaaagtttcataatacaaaaacaatgtacaataatagttctgtttctacatgaacaattggaacaatgaactggaaattaaaattttaaaatgtcatttacaatggcatgtaaaaactataaaatacttaggaacaaattaaaatatatgtagtatctgcactgaaagaattgctttcacagcgacgtggatacatgcagccaacaagcgtatgaaaaaaagctcagtgtcactgatcattagagaaatgcaaataaaagcacactaaaataccatctctcaccaatcagaatggttattaataaaaactcaa

SEQ ID NO: 55235 - DNA, 1040 bp, Homo sapiens
tctttaaagtgtaagttaattataaatagaactagtttacttcttttcacataaaatatgggaactgaaaattggacaattaactttgtgtaaagtgataaagttaaaagtttatttttttgcttagaactgaaagacaaatgctaaaaagtattcattattattaacttgaacatgtagtgcagatgtaatgtcacctttgtactaaaccagaatagatagttaaaatctaaatacagatctccttttaagtgttttggaattatacaagaatttctgagtagggaatgggaaaatattaaaaatctctgtgttgggaagacagtcattttaccttatactatattttaatttcctagtgctagaattttatggatctaactatgcatttataatttgtttccttctttattctccaattttctcttttcttgtttttctctctttactttatgtaatcttccctccttttttcactttttgttttatatttaccccttcatcggttttatttcctattcagtttgctttgacccttgtttcctctttatcaactttgtctttcctcccgtctcatgccatccttctcaccacaaaaggttctgtcagcagtgttattattttttgaatacagtgatgacatcctacttttatgttcattctgaattaataaaatatgtagtaactgttagtgcaaacaattgtgacctgactggaagaaaacgaaaatccttgaggatgttttcacacacaataaatgcatactaattaagctagtatgaagctttacattcagagaaaaataagattcataataaatgtttggatgaatattgagaattttgatgccttttttattttaaaatattcttttcaaataccctaacataaatcaaaaataatcaaattaataaatcacaataatttaaaagatgcattacctttttatatggtgcattttacccctatgcaagaactattttaatcaataggcaagattattcaggtgagttcaacaaatttgaattcctactgtgtat

SEQ ID NO: 55236 - DNA, 1007 bp, Homo sapiens
tcccctttccctaaggcctacatcctgatcttgtcttagtgggccttaccattttgatgattaggaaaaaaaaaacaaaaaaaacaaaacaaacaaacaaaaaaaacaataaaacaaaatagggctgatccaggactacttatatttctcttgcaaaaaatttcactctgtgccattatagctctcttataggttaagtattcttttatatttctccttggggaggaagtctaggtaggtgaaatagaaagaaggtgaaaagctctaagtttctctttttgaggtagcatatatgatcaacaataaaaccaaaacaaggaaacttcagaataagtttggggagaccttgtataggaccattttatgtgcaaacattcctagtggttttcagtgactgaaaaaccagtatacacaaatgacatgatattgaatttaaacaccatattttcaaggtcatatagggtattaattttaatgtaaatttgaactctccatgccacttcagaagatccattccactctcagcattttaaaaggagaattaacagttgatgtcaaaaaatggcagaggaataaggcctcatcttcagatgccagtgccttgttatggattctttggaatactgtgttaagatggagctgaaatctggtctgagcttagaaagagggcttagatccattaacactgtcttcctttggcacaggaagtagcaacagttttgacacacgtatttgctatccatgaaagagagtccactaagggatttcactgatgatatgttctgttaaccatggcctgtgaagaaagtctggtgaagaacaaaaagtgatttagcttggaagagatgggttaattcttttaataactccttatgaacacttactatgatctaggtggattaaatgtttacagttttgaagggcaaaactaggaccactgggtcaaaaaatagaagtttcaggttaattcagaaaatagatttctaattaaagtttccaaaatgaaa

SEQ ID NO: 55237 - DNA, 1037 bp, Homo sapiens
ccttcgatgtttcactgttgatgattctctttcctctctctatccatttccttggctacatcctttggtttcacttcattattggggtcacccccttgtgtcaatcttcaagaagatcagatttgtatgttctgttccattaattagtgttttctcctatattatatcaagatggaaattatgtaattgaagtattacattattaagggtatggaaaaataagaattattttataggtcctcgtttgattgaattaatttttagatgcctagggtataataagtagtacttatattgcatttcttgttctgtttgatattggaacattctcttcaatttcagctaaagtaatgaaaaataatccttccataaaaatgattaatttcatgtaattttcaccagttgtcctctgaagcaaccttttactcaaaatgtatttgtgcatatgaaaaccagtgcttcatcttttttgaaacaaaccttaaataaataggactgaattagagagtgagtcattttggtcaaagaaaggaagggctttcttgacattaatggtatttaaacattgaggtaaatataaaggaatttgagatatcagttgaattttctatggacttctttgcaactaggaaaaatgttagcttcctttgattttttttttttttaagagacatggtctcactctgttgcacaggctggagtgtagaggcataatcatagctcactacagcctcgaactcctgggctcaagtggtcctcccacctctttcttccaaagtgctgagatgtgatataggtgtgaactactgtgcctggcctgctttgaatgtcttaagagtcattccaccaggtgcaaaactgtactaagtgattcttaatccttaatgctttttggttatcatttaaatagtgtagagccatcttgtttgacctccatgtaactgatttgtgtctagtttctttccttcttctttaaaacaccagaaggcccttctcttttatgtcctgtacttctctagctggttgaattgtttgct

SEQ ID NO: 55238 - DNA, 1050 bp, Homo sapiens
tgggctcagtcgcagcctcccaagccccatcaataaagcccctattaatgcaccaccagtatatgaaggtaggtcaggtggcagccactcctcccacaaataagaattcacatggagattttttgactgcttcctggcatcttcccacagtttaaaatcctgtgcctgatatttgcaaaatatgcaggagcacacagcttcttagggctctccagagccctttttggggaatccggcaggtcagcccgaaggaccaaagttgtcaagcccgatggcacaaggacaactgagccacaaaatgaggccatgagcccaataatcttgagccaagatactttgaagactagcttggcttgcaggtaaacccaggcattcctgctagctggtgtcacttcagattccagagctaaaagggattttacagctctcctcctgatatgaatctgctccacaaaattcttgccagatggtcatctggtgtctgctcttttgctgtaatgggtgctcccctcccctcaaaggagccagtatgtaaattcttcctaatgctaagtcaatctctatgctccatacagctcctcctgctgttcttcgtttgttcccctgcaggaacacttggacatccctgtggagatgtgaaggcagcagctgtcatgggttaaattgtgtccctcccaaaattcatatgttgcagtcctaacccccagtacctcagaatgtgaccttatttgaaaacttggtggttgcagatgtaactagttaaaatgaggtcatactacagtggagtgagtccctaatccaatatgactcatggccttatgaaaaggagatatttggaaacacatacacagggagaatgccatgtgaagatgaaggcagagatgggtgacgcttctacaagctgaagaatgccaaaggttaccagcaaaccaccagaagctagattcttcctcagccctcagaaggaatcaacttgccaacaccctgaccttacatttctagccccctaaagcatgagacaataaatttctgttgtttaagccacccagt

SEQ ID NO: 55239 - DNA, 1056 bp, Homo sapiens
acatattagtgacccaaatacactcacaagcagcaccataccatgatagaagatgaaattcaagttattaaagttcctcaatacaatatcaaataaggcaatgatttatttttactttctttatcttttgaagtgacttaatcactttactgtggtgataataatctctatcagcattaataaaaaaatctcagtgcgtattagtttatgaggtggtcagagaagcctgaaagcaagactgcattagcacaagagaagctggtcacatgactgaacagcagtggcatgccttgtcatttttattacctgttaaggatggatcctcagtcccatctccagttgtctgagcatcaaatggggaatggtggacagggctgcctaagctttcttcttgctctttcagagatatggaatttttgtggggggatttatgatttgtgttttcatgaggactagcttctgatctttttctaggaagtggtgttggtttggctggctggtacacctgactatggggagctatggggtggtaggacggtttctctgcttctccttcatcctcctcctcctcatcatcaatcacaaccagctcagcatggatgatcccatcatatcctgtcagaaacttcttatcttcttcactgtcttctgcctgctgataccccatgaaaatcattgtcaccggttctgtatcatttatgtctggaggcagggaatgaacgatattatatctgacatcttcctcgtcctcctgacaagtgggtgaagaattctggtgttcagatttcccaaatattgtctctctggggctcagccttggctttggagagggtgcatctttgtcctgcatgacattcgattcttcccaaggagtcattagccttttttgcggggtgtgaagcttctcttctgcttgttgaatcactgatcggggatgaggcactggcggaatgggactgatgtgattgaagttgtttcccctttcctctgaaagaccattgcccatattgtgtatggattcatttacaccaatacccagtccattagttttaatct

SEQ ID NO: 55240 - DNA, 1074 bp, Homo sapiens
attaatatgatttcacttatatgaggtacctaaactagtcagatttacagagacagaaagtacaatggcgagtaccaggagctggtgggagaaaggaaatgggaagttagcgtttttttttttttttttttttccttttttgagatggagtctcgctctgtcgcccaggctggagtgcagtggcatgactggattctaggctaagtggagctgcagacaactttgacccgtttgacaaacttactgtgggctcagctcactgcaacttctgcctcccgggttcgagtgatcctcctgcctcttcctcctgagtagctgggattacaggcatgtgccaccactcctggctaaattttgtatttttagtgaagacgggctttcaccatgttggccaggctggcctcgaactcctgacctcaagcaatccgcctgcctcagcctcccaaagtgctggattacaggcgtgaaccaccacacctggccaaggttagggtttaatgggcacaaagtttgttaaggaagataaaaagtttcagagatggatagtagtgatggttgtacaacactgtggatatgcgtaatgtactgaactgtactttaatagcatttatcattattatgtattttttgccacaataaaaaaagtggaaaaaagctaatgttcatagcagtgctattcacagtaaccaaatgatggaaacagcccacatatccatcaactgatgaacagataaattgtggtatataaatacaatggaatattattcagctataaaaaggaatagagtgctgatacatgctataatgtggatgaacctccaaacattgtgttaagtaaaagaagtcagacacaaaatttacattttatgattacatttatataaaatatccagaataggtaagtcaatagagagaagagagattgatggttaccaggcactgggtgtggggcaagaagggaatagaaagtaattgcttaattagtataaggttttattttggggtgaaatgtcttgggactaaatagaggtggtagttgacaaattgtgaatataagaaatgtcactgagcgtc

SEQ ID NO: 55241 - DNA, 1005 bp, Homo sapiens
ttatgggtggttggtatccacaaattgcaaatgcctagtcttcactcctctcagtttttctttttgtttctgtaataaacactctgggaagtttttcaaaagttatttcttttgatagtaattattgttaaattaaatgcttttatatctttagcaatgttgccaaaaacaatgagcaaaatcatgttttcttctaaagaagtgatgcaatatgaaataaagatgtgtgtgcttttcagaaagaaatgaaagaaattctagaaaattgtggttgggctggcattaatagctgaggcaataaaaaaattctctggtctgcagaaatcaatcttaagggcaaaggtagtctatagtatgggttatcaagtaaatgaatcaaattcactttagtactttatttttgtcaaggattttgtctctaatgtgtgttaagcaatacctcatcccttccacatcctgcaccagtccaggctgcagtgggaaaagacaaatgcagcagatgccaactaggaagctctcagggcacatgtagtgtttggctgaaattctatttatctgtatattctcatgaggcagggaaaaaaagaacaaaggtccttgtttaagataatccattataggttggaatgaaaggaaagattcttctaagagtcctttttaaatcagattaggatattcacagttcctatccacatcctgcttctttcttccttgtgcagcccctaccaagctcatctctgcacccaggtcacagatggttaccagcctggaatgcccttctcagtgaaacgggaaatgttcccttgtcccccttgcagggtgtggaatggggatgtggctggcttcttcagtgccccactgctcaaatctaggggagcatacagatgggcaggctgtggggctccgaccccacagcaatgtctaggggtgaatgtttgcagctgaagccccagtgggcatgtgttaccacgtgctcttttagtttagctgtccatagttagcttg

SEQ ID NO: 55242 - DNA, 2534 bp, Homo sapiens
ttaattgttcaggaagtctgcaataattagtagtttggagtgggagaatttctaccctggaaattggggtgaacagtacaaatcaggtttttttaaaaaatttaatttacctgcataacgctgcccttaaaaacttatgttattattcttgacagttgaaatattggatgatgacagaattcagatccttcagtcatttactgcagtggaaacagaggtaagtccttttcttgttcattgacacaaaccttaatggtaatacttttttttttcatatctcaatttttctttcagggtcatgcttttaaaaaggcagtgttggcaatttatgtctgtgggaatgttacttttctcatcatatttttatctgcaatcaaccatctatgagcaagcaaagaccttggcttttgcaggccaagtgataattatcatcaaaccaaagaaacttgaagcctgtcctgactgcctggagcatatttgtgaattctcacttggaagactggggtcatgtctgtagaggaattctgaagtccagcctttagagaacaacattcaagagggtcatatagactataaattaatgtcatgccctatatgtaattctgggtcttaaaggaaagattgtacttcaggagaagtaactctcaaatatttcatgccaagattttaagaatgttggtatttaagaaaataaatagtgatttggaaaatcacaacagatgtcactaggataataaagagatatattacgatatatatatatatatatatatatatatatatatatatttttttttttttttttttttttttttttgagacagagtcttgctctgtcgcccaggctggagtgcagtggtgcaatctcggctcactgcaagctctgcctcctgggttcacaccattctcctgcctcagcctcctgagtagctgggactacaggtgcccgccaccatgccgggctaattttttttatatttttagtagagacagggtttcaccattcacaggatggtctcgatctcctgaccttgtgatctgcctgcctcagcttcccaaagtgctgggattacaggcgtgagccaccacgcccagcctatggtaaatatattttgaactacaaaggtgctgtggtactttaaagaaaaactatttttactagtttatctgaatggtctgtggactttatttagaaactgtttttcagtttagttttttggacatatcctttgctcagtgtattttgttacttctctagtaaaggtagaagtgaagcagatgccattgtaggttttaccagcatttaaatatattatgaattgcttagcaatgaaatgcaagtatgcatcttttacttaaagatactatttatgtattcagctacagagatgaaatagcattttatgtgttaattgttttggctataaaatttaagtccttacagcatttggggattatacacttggatttcaaaattgataaaacccttgtgaacatatctaatagatattctgtttacttgtagaaataatataatgtgtctggttctgttttgttagacattttttatgttctactgaatcagaatagtcagtgttatattccttatttcaagaattcatctattttatggctacatctcatatgtgctatgaggacttctagccagtgggtggcgctgtaataccgaagtactgcactgctttgttcctgtttccttgtgctgattcctttctagtatttaggtaacattaccggatggcatttcccttaaattccaccaactcttaatctttattttaaaaatggctactttttttgggtggttggggtaagggttaaaaccttaaattagtaaccgctgtttattttccagtttatttgttttctgtgattatttataataattgatatttgtttttacaagtcccctgaccctgtaataatgaatgcagctatcttaggcaaagcaaataaataaactgggcatttttaaaataaaaaatttaggaagtcatactttatttctttaggtattctttctgattatgttatagtttctgcttggcccgagaacctaatttctatatggtgtgaataatagcctcagctatgtagcctacatctttattttattaatatttttcaaaaattttctcattatttcttttttatatttttattttttgaatttacttaaccaactttctactaatagcctacatcttttactgggtaaaataatgtggaagtttagtttttgttccttttataggtgtttatcataagtggcttagggcttagatatgaactttctgtgttcatattctatatgtgccatgctacttataatctaaattttccttttgaaggtctttattaaaaaaatttagtatagcaaattaagtgtgtactaaagttattttcctccagttttctatactaaggagcttaaatgttaataaatttctcttaagttatattctacatctgacaaagaaaaattctctcttttttttttttgtgacaaagtc

SEQ ID NO: 55243 - DNA, 1049 bp, Homo sapiens
atgttctcacttataaatgtgagctaaacaatgagtacacacggacataaagatagaaacaatagaccctggggactccaaaagaggagagggcggaatgggggaaagagttgaaacactaccctttgggtactatgttcaccacttgggtgatgggttcactagaaggccaaactccagcattattacgcaatatgccctaaaccgccccccacaattggtaattcataatcagttgcccatcttgccctatctagccttataattttaaaagtctgaattaactatttggtcttagatattaatcttcttttatctcaaactcttttagtatgttttacttgataatacacatacacaaacacacaattgtctctcttggtgggactacatttgaatgtaacttttttcttttgtatgtagtggcagcgatgttcctgggaatggatttaccaggactgaatcttcctgattcatggaaaacctatgcaatgaccggattcgtagcctggcatgttgggactgaggttgttctggaggtacatgcttatcggctctctcgcaaaggtaacctggtaaaaaagccatgttatgtagaagcacttctatacaaaccattggaaaagaatgcgcttcccgatagtaatggctgactgctacattgttagctcactaaaaacttgtgatcactcagccagtgctagaaattgtgattttctgcctttgtttttttacatttgttactattagaagttgtgaataagatataaaggaaaggttttaggttttaggcagggagtcttccttgtaagtactttcactttgctggtctgacttagagccagtatggactgggaactctgaatgcctagagctgaggaaaccctgagatggaggaagaagagactcaaagtcaacactggatggaggtgcagacaactttgacctatttgacaaatttactgggtgctatcatttaggttgtcatgtgcataattatgtagctaggagcaagccagataggaaggactgattttgcttttgctctt

SEQ ID NO: 55244 - DNA, 1054 bp, Homo sapiens
aaaaatccaacttattccagtcactttatagccaagattcatgctatagtatacggatacatttccttttactggttacgtaaaacctgtaagcaagagggaaagactgttactgcattcagtatggtaatgagtagcccacaggtaggtcagttattctgttctaaattgtaggcattgatggcacaaaagcatttctctctaattcaagatatatttatcttacttagaaatcttatctgtttccagtatagtactcctcaaaaatgtttacaaaaaaggcttaattacgcaggtgcagttgatttacagagaaatcctgtttaatgattaaaataatctgtacacctgtttgactaacttgggggaaatgaatcatcctcaaaatatatttttaagtggttatttctatttttggttattacttttaaaactttcaggtatttttgtgacctgctatttctttggagtgtataatgtaaatttaaatactgaaggtatctgatgtcacgaatactcattcgataacctaaattatacccctttttcaatttggcttgtaaattaatgttagcaattattttggtatgttagacctcatcactaaaatcaaaatgtgtaatttaccctatttctgataataatgacttgctaatgtgtgaattttaactgaatttccaagtacaataagtcctcacttcatgtcgtcaataggttcttggagcctctgactttaagtgaggctacatacagcagttccttgaataatatcatttccttcaatatcgttttgttatgacattgatgaggaaagaatattggccatgttgtatgttgttttgcttaaagtcacaattttcaagaacttacctatgagtttaagtgaagatgtactgtacatacctctttcctatttgagatattttgttaaataatgtaaagtctatcaagtatgcgcattagcttccttccttctccttccactgcgctgtatcatcttattccatacatgatctctccatgccccaattccaggatgtccccaatcctgaac

SEQ ID NO: 55245 - DNA, 1033 bp, Homo sapiens
atgttttttcctctaatgaggtcaagtaaacattttttttttaaacttttattttgggttcaggggtacatgtgtaggtttgtttataggtaaattccatgtcacgagggtttggtgtacagattatttcatcactcaggtgataagcatagtacccaattggtatcatctagcattttccaaactaacttagccttatggactgcccctggaccatcacctatttttcttttctctttgcggaatggctattaatatctcacagattgaatatcttatggaacactggaaaaaattttatggaaaaagtttagagcttctttgcctataagatgactgttttctctccaggagtacttttgcatatgtagacctcattgtaattgtaatgtacaacctctaaacatttttttttgatattactaagctttttaaccaacccttttgtctttttctcagttactttgtcagggcatccatttaaaggctttctcctagaagcgcgtaatgctgaggatctgaatggccctcctattggctccttcacattgattgacagtgaagtgtcacaacttttgacctgtgaagatatacaggtttgtgtttagagttgatccttgaacaatgtggaggttacaggtgcagaccccacccctggggaaattggaaatctgtgtataacttttgactccccccagacttaactacaaatagcctattggtgaccagaagccttactgataacaaatagttgattaacacatattttgtatttatatgtgttatatactgtattcttacaataaagtaagctagacaagagaaaaatcttattaagaaaataagagaaaatatatttactattcattaaatagaagtggattatcataaaggtctttattctcattgccttcatgttgaatgggctgaagaggagaaggaagaggagtggctggtcttgctgtcttggggtgggtggaggaggtggaaggggaggcaggagaggcaccacactggtgtaactttatagaaa

SEQ ID NO: 55246 - DNA, 1006 bp, Homo sapiens
tggtggcgcatgcctgtattctcagctactggggaagctgaggcaagagaatcacttgaacccgggaggcggaggttgcagtgagccgagattgtgccactgcactccagctcgggcaacagagcgagatctatgtctcgagaaaaaaaaaacagcattgaaaagagatctttgtttccttatttttcaggtaaggaagtggaggattaaatgatttgcccaaagtctcacagtaatttgtagagctgagattgaaattcgggtgaaacttcacatatcacattctttttatcaggtatgttgagaatatggtttgctgaacacagaaagcaagtagttatctagaattatggtccagttgtgtaaaagcttttatattttaattatatatgacaataatgggcttttacccttctttttgagatggcagtttctggatttactcttggtacctgcatacttctgttgcacattagttatgtggctaattatcccaatggaaaagtaacacagtcatgccatggaatgattcctgaacatggtcatagtccacagtctgttcctgttcatgacatttacgtgagtcagatgacattcaggccaggagatcagattgaaggtaccgtgctgggattaactgtttacattttggatttcactcttttactgtttattgaatctttattattacttgatttagaagatttcacttaaatctgttttcttttgtaagatactatcatacttcttatttttggttccagatgactgtattacttaagtagtctgtgtattccccatccagaacaggctttaaaataagtttttatcgttatttactatttttattaattgtgctatcacttcaagagaagagaaaaatgaagtttattttatcttgtttaaaatataataaacccttgtccttcttgatatcatataattttaagaacaattctctaatttctctggtaaaatgtaggctgattattaaagataaatctat

SEQ ID NO: 55247 - DNA, 1072 bp, Homo sapiens
aattagcacatattgaggagatggaaagttaatagtgatattataaatagtggcaattaccacttactgacaacttgctgttttcaggcatctatggatttttacattcattctttctggagttttagttctatgaaataaatctctacattgctattcagtctcttataaagcagatttaacattctgaattaggtaggcgaacttagatttcaacctttgtcccaatagctccccactcactttgtttgtccctgtgaaatgttgatccttgctggacctgtttacttttcaccttctctctaaacagggaacagtgatgaacagtgaaaagaacatggctattgcagttagattttggttcaaatcctaaaagtatgtgtgatttagggtatattccttaacctcagtttcctcatctctaataagaagataaatctgctgcttataaggattccatcagacgtggtttctaactgccgggtcatcactgagtgttcatttcttttcgtctttctctatgtctcctttcctttgactctacagtaaaactacaatccttttctttccctttgtccacaaaattttattgctgtctttatatatcttgtgcttagtcttaacttgctgactctgtcaatctccttatccttctgtggttttacctatttttctaaaagtcttcctacctaactctgctactcagcaggtgaacacctatttccacctctatccccagtctaggtttttggtgacaatgctaagcccaccaggtttgccccaaatcctagatgaaatgctgagctaagaaatgtacactgtccccagattactggaggaacccgcccccaatatttcaacataggttctttctattttcagtaagtgtcagctggctgagaaataaagagagacagtttaaagacaggaattttacagctgggctgctgggggtgacatcacatatctgtaggaccctgatgccccctgagcctcaaaaccagcaagtttttattaagggtttcaaaaggggagggggtgtaagaacagggagtaggcacaaagatcacac

SEQ ID NO: 55248 - DNA, 1134 bp, Homo sapiens
cactccatgtattcccaccctggaccttggcttcaacctgatattatgcaatagaatagtattaggatagctcaacttggatatgcttaaatctagcatgtccaaaaatatcccctgcccattctcgatcctttatttctcagcttccctgtttatttcgtggcatctccatttttatagttcccagggtagaaaccttatattctttgatgatttcttctcttttcctgcagtctctttttaagcttgcagtttctttccaaatatctctgattgcctgtctattctgtatggctgaatatagatgccagaataatcttatgcagtctcttccctttgttattaagtggtatgtataaaatcaaatttaaatacctctgtctgacttctaagacattctgtaatgagactacaccttccttagccaagattgtatctcattctccatcattaatgtcatagatctttacagttgcccaagtcattcctgttaattcccttctcagcaggttttctcatgcctgtccttatacccgtactcccatcagattcctttatatctgttaaatctcatttactgtcagtctatgtgttgcctaagtttcaactttcagctagaatatcacctcctttgtgaagtctttccctaatttttcactgtctgcttcctttgatttccaattacacaatgagcacagaactattaagtgctgaataatgaagcagtgtctaaaggcttgttagtcttacagtgtcagactagggtttaaaatctgtgagaattgatgagggcaggtgactcacacttgtaatctcagtgctttgggaggctgaggctggaggaccacttgaggccaggagttcatggtcagcctggacaacatagtaagactttatctccacaaaaaagaaacaaaattagctgggcatgatggtgcttgcctgtggtccccagctacctaggaggttgaggctggaggatctcttgagcccaggagttaaaggctgtagtgagctatgatcccaccattgcactccagcctgggtgacagagtgagaccctgtctttaaaaaacaaaaataaagggccgggcgcagtggctcacacctataatcccagcactttgggaggcc

SEQ ID NO: 55249 - DNA, 1071 bp, Homo sapiens
ggcaacattgagcactgagtgaatgagactccgtctgcaatcccggcacctcaggaggccgaggctggtggatcactcgcggttaggagctggagaccagcccggccaacacagcgaaaccccgtctccaccaaaaaaatacgaaaaccagtcaggcgtggcggcgcgcgcctgcaatcgcaggcactcggcaggctgaggcaggagaatcaggcagggaggttgcagtgagccgagatggcggcagtacagtccagccttggctcggcatcagagggagaccgtggggagggggaggggggagagggagaccgtggggagggggagggggaggggggaagagggagagggctcttttcttttctctctacctgttttagttttttaagtctgttatatgttagcaacattgaattacgttaatatatgaattatgctctcagtttgtatgtcagataagttacaaacaaaaaaggcatactcagaagaaaacgtagaggttgtaggtctggaaggggttgacaatcacaccctcatttgtttgcagtatgttgccatgcattgcacttttacttaagctaggttaagtagctttacgggttatattatcttaaataacagtctctatattactttgtaaggagaggtagagtaaccaagaatagttcttttacctcacaggagtgatcgaacttaaaagatgagttagaaagtgtttgagattcgtccttttcagaaataacaagtagcattagatagtatgatacttagaaaatattttcagaaaaaataaaaacttaagtctttgatgtaaacatgagtgagaaagttaagtgcttttttgaaggaaattgatgcttggagcagagtttggcacatattttcctgcaaaagttcagatcgcaaatctttgcagcttttcaggcaatgcactccctattggagcgactcaactcccattgtagcaggaaagcagccataggcaaacatacatgaatggatgtggctgtgttccagtaaaacttcatttacagaaatggggattaggctggatatactttgccaaccctt

SEQ ID NO: 55250 - DNA, 1035 bp, Homo sapiens
cctcagatgcctgccattgggtacttaattcaggggtgaggatgggggatcatggtaaatggggttgtataagaatttgcacatcccaagttgctatgtgaataggaatgcgtttccaggggaaggagaaagagacattacagagcagacagctctatgatgtttactatacttgctaaaatgtgaaattcagctaaattggaatacaaagtagtgccaaaacagcattaggtttgcggagttattttaaacataattgaaaaatcaaggttttttaatactttaaataaaacatctgtttttcaatgtggtaatttaagtcctacgatgagtttattaacatgtgctttttatttagggtatgagctacagttccgattaggcccaactttacagggaaaagcagttaccgtgtatacaaattacccatttcctggagaaacatttaatagagaaaaattccgttctctggattgggaaaatccaacagaaagagaagatgattctgataaatactgtaaacttaatctgcaacaatctggttcatttcagtattatttccttcaagggtaagtcaggtgttttgtttgtgagaaaaaaagttaatttgttctgtaatttgaagtcacctaacttgtaaatgttactgtatgaaccatggcagtgcaatttttatagtgcttccttgagatgcaaatagaatattctttgatttctaggaggtaattttatggtccattgcagagctaaagtatcaagtaaatgtattttaagtaacatcttaaaatgtagtaatttcatgcaacctgattataggttgctgtttatttgcgtgcccttgttattactgataggttttagtatacttatatttcattaaaccaacattcttggatattttgtgtattatacatgtaattatgtagattgtgaaagggtaaaagtagcttttccattaagttttgttgcaacttttaaaatgattttatgtgcttagaaataaatacattttatttgggacaattaaccttttag

SEQ ID NO: 55251 - DNA, 1022 bp, Homo sapiens
aaaaaaaaggtacatgtatacatgtataacaaacctgcaagttgtgcacatgtaccctagaacttaaagtataataaaatatatatataaaaaaataaaaaaagaatagaataagtgaatgctgatgtaggcagaaaagtgggggctgagattgaattgataggaatccttgtgtctttcttttatgttatttttgtctctgtttctttctcccccacacccctcgtgtgtgtttgcgcgtgcacgcacgtgcacacacgtgcacacagcaggatgagaaggggaggaggtaggaggatacctgtgaaataaatatttgttttattttcagtgaaaaaattataggccaaaaattagaaaatagtgacagttataatctctttgtagatatttgcatttaaggtatcgtcttttctttcttttagaaaataggcgagtaaccaagtctgatccaaaccaacaccttacgattattcaagatcctgaatacagacggtttggctgtactgtagatatgaacattgcactaacgactttcataccacatgagtatgtaatgtgtttttttctgtgaaataataatattacttacaaacctttatggctagtatgattttcatactacttattaaaaacgcttaatagaaaatgaaataaagtaattcactgtaattctactatttcagcacatgacattttcccactttttctgtgtgtgggccatgtttctatatgtgtatataaacatttttacaattggaaaacatcatcagccataattgaaatcccgatgaatatatttaaggtttctgtgacctttgttagaaagtttttaaatgtagaatctgtaaagccattaaatattatatctgcatttctccatctgctctagcaaggggccagcagcaattgaagaatgctgtaattggtttcataaaagaatggaggaattaaattcagagaagcatcgactcattaactatcatcaggaacaggttttacttatttttgaactgctgctt

SEQ ID NO: 55252 - DNA, 1006 bp, Homo sapiens
gttgtcttctagcatagatcagcgtatgatgctcttccaagtactacaattgtttctatggcatgttgtgctagtggaagtacaagaggctatgatgaattagtgcctcatcaggtttgtttatatgttgtttcttaaaacctacatggccaacaactttgggcatttttattaaaaaaaattcattgtaattaagatgtatccatgctaaattttacctttgtccagatttcagtggtttctgaagaacggttttacactaagtggaatcctgaagcattgccttcaaacacaggtgaagttaatttccaaagcggcattattgcagccaggtgtgctatcagtaaacttcatcaggagcttggagccaagggttttattcaggcaagaaataattaaatttgtttcttcaggttcaatttcagagtaagtctttccagtttgagagctaatctagttgttctttctgcttctcaggtgtatgtggatcaagttgatgaagacatagtggcagtaacaagacactcacctagcatccatcagtctgttgtggctgtatctagaactgctttcaggaatcccaagacttcattttacagcaaggaagtgcctcaaatgtgcatccctggtaatgcaatctaaaaattgttactgtatttgtattatattattatattaaattatactgtaatgttatggttatatatcatgtatatatcatatatattataacacagtgctactgtggacgtacttgagaaaaagaatttaaactttttggtaacttggccaggtatgatggctcacaccagtaatcccaacacctcaggaggctgaggcaggcagatcacttgagctcaggagttcaagaccagtctcagcattatggtaacaccctgtctctatcaaaaaaaaagtacaaaaaattagatgggcatggtggcacatgcctgtagtcttggctactcctgaagctgaggtgggaggatcgcttgagcccagcagg

SEQ ID NO: 55253 - DNA, 1045 bp, Homo sapiens
ggggatggtggtagtaagtgtgcattaatgaaacatatgcattatataatgtatattttttaaatatttagacctgtaaagtaactcgtagttggctgataaaactttgtaaagcaaggatctttgggagctgctttaataaaaatgaaggtaactagtatatcacatatatttaactatagattttagtgtgtttgaaaatctttttctcttaagaatattaaataattactgaaaatatctttgaacatgaaataagctaatattttttgtataaaatgcaaaagtaaattctaaccaagccatcatccaaactcattaaatccaaatgaatggagtttagatgaatgaaattttcttgtatattttcccccaagaggtgagaagagatttaaaaataataaaactgaactttataaatatcaaacatccaaaaatttagaggagaattagtgattagaaagcaagttcaagatcgattagggtgacaaacaaaaccctgaaatattttttgtgcacaggactgtaaaggatttatagaagtactagcaatgtgattgctgtatcaaatcagtgtgattgtaatgtctacattcatacccaaagattataattatggatcattataataattatacaatagttgattattatattttactatatagatatactcaacgtttacaatttacaaatttatgtggaacttttagaaaaagttgaaattagattaatagaattgtgtgtgtgtgggtgtgtgtgtgtgtttcagaactggaggggagtggaatgaagagaagttgggtaatggctacaaaaatacggttgggggccaggcgcggtggctcatgcctgtaatcccagcactttgggaggcccaggcgggcggatcacaaggtgaggagatgatatcaacctgaccaacatggtgaaaccccgtctctactaaaaatacaaaaaattagccgggcgtggtggcgggcgcctgtaatcccagctactcaggaggccgaggcaggagaatctcttgaaaccgggaggcaga

SEQ ID NO: 55254 - DNA, 1446 bp, Homo sapiens
gttgcagtgagctgagatcataccactgcactccagcctggtgacagcgagactccgtctcaaaaaataaataaataaataaaaatacatagatctcattattccagtccagaactatttgttgaaaagactgtccccttttttctgtacctttgtcaaatattgtttgacaatatttatatatggtttaatagactgaatatttgtgctcttctcctctctgtcccctgcctccccaaattcacatgttgaaatcctaactctcaatatgatggtattaagaagtagggcctttgggaggtaattaggtcatgaaagtgcagccctcatgaatgagattagtgcctttataaaaagagaccccagagaactctctgttttctgccatgtgaggatacaatgagaagacagacatctgtgaactcagaagaagggcctcactagaacccaacgatgccagcactctcatcttggacttccagcctgcagaactgtgagaaataaattgctgtgtttataagccacccagtctatgatactttgttacagcagcctaagctcataagacatatggatctaaatctggactatattctgttccattgatctatgcttctgtcctcatgccaataccaggttttgtttttttgttttgagatgatgtctcgctctgtcgtccaggctggagtgcagtggcgcaatctcagctcactgcaaccttcgcctctgggttcaatcaattctcctgcctcagcttcctgagtagctgggattacaggtgcccgccaccatgcccggctaattttttgtatttttagtagagacgggctttcactatgttggccaggctggtcttgaactcctgacctcgtgatctgcctgccttggcctcccaaagtgctgggattacaggcgtgagccaccgcgcccagccaccagttttgattactgtagttttatagtaagtctggaagtttggtagcttaagcctttcaattttgtttttctttttcaaaatcgttttgatggtctaggtcctttgtatttccatatgattttaaaataagcttgcttggtttttgtttgtttgtttaccaaaaaagcctacagcgattttgttcagaattgaattgcatcttcagttaaatctatgacaaaggatgtgatcatcactaggaaagcagtcaggtattagacactgcattaagtccttccttgaatccttgaattcaagtaagatctgatagatctttttttggagacgtagtcttgctctgccgccaggctagagtgcagtggcatgatctcggctcactgcaaccttcacctcccgagttcaagctattctcctgcctcagcctcacgagcagatgggactacaggtgcgtgccaccacacccagctaatttttgtatttttagtagagacgaggtttcaccatgttgg

SEQ ID NO: 55255 - DNA, 1812 bp, Homo sapiens
tgttctatgcctttgagcagtttcaggttttgggctgctgtagcacccaaagtagattacatctgtagcaaaaaaaatctctagggaactcactgctgagtcatccgtcaagatctgatgtctctatccaatttaccttattttcttcacctttcagagtcttctggtagttgctttttgtttccaattcaaggtttttggttgtaattagcagaaagaataaggtggagtgtgcttatttcatcttgagtctcttggtttctgtttttttttcttttttctttttggtggcaggtggaggagagacctgcaggccctctcccttctccctctcggtgtttttaaatatactagttttcatatgttgtaatcttatttatttgccctgtttattttgtttttcaggcaaatgaagataaaacaatgttcgccaacctaaaatacgtttccctgggaattttggtctttcagactaccagtttggttctaacaatgcgttattccagaactttaaaagaagaaggacctcgttatctatcttctacagcagtggttgttgctgaacttttgaagataatggcctgcattttattggtctacaaagacagcagtaggtatctaggttttttgtttttaatcaatgcaatttatttagtttgcatatatatattggtaactacacatttgcactcttgcattgtcgaatggcctagtatgaagaatatttcaatattttaaaaattttcttaagacattttaagtctagtaataaagccattttaatctgtatcatgattcatatcttctggttaattctgtaaatataaaatagtttcttgcatttataataatttgagagtaagagtaaattttataaatctgttactgttagaactctagaagaatcataataatttttttactaatgtaaacaccttctgttttatttgctttattgattagtccagcagtgactaattttatatagttttaaaaaatagttctattgagataattcatgagccatacaatttatgtgtttaaagtatattatttaatggtttttggtatatttcaattataatgttttaaacctgtggtaaagtatatacacataacataaaatttgccatcttaactatttgtagtgtacacttcattgtcattattttacagtgttgtacaacagtgtaaatttttaaatcacttttatctaaaattttttatctaaattttatctaaaatttttaatctaaattttatctaaaattttgtatcactttaaacaacaactttgtaactgttaagtaataacccccattctcccttacccacagcccctagtaacctctaattcactttctggctctatgaatttgcctattctaaatatttcatataagtagaatcatgtatttgtccttttaggtctggcacttagcaaaatgttttcaagatttgttcacgttgtaacatgcatcagaactttattcctttttatggctgaataacattctattgtatggacgtaacacattttgtttattcatccatgtgttgatggacacttgggttgtttccaccttttggctattgtgaataatgctggaaagaacaatgagtaatgcttcagtagatgtacaagtatctgttcgagtccctgttttcattccttttgggtatatatttaggagtagaattgctaggtcatatggtaattctatgtttaactttttaaggaaccatcaaactgtttttcacagcaactggatcattttatatctccatcaacaaagtatgaaggttcctgtt

SEQ ID NO: 55256 - DNA, 1027 bp, Homo sapiens
cttcacaattactaattggcatgaatggctgatgataaacaaaatgcacaaaatacaagtttttataacattgctataataaactaagaatacttggttaacaaattaaaactttgagattttggctgtcataaatatgtgtttgtatgtgtttgtatatatacatatatgtagatatacataagatacatttgattatatatcagaataaaagaatatgatttcttaatacattataatatttaacattttaaaaatcagcatcataaagatatattttagtcctaaaagtatcttgacatgtagctcaattttgtttttctataggttagaaaattgagatcttgagagcagatatgtaacttattcagagttacttaattactgatttttctcatattattttctagaatgtagtctaagagcactgaatcgagtactacatgatgaaattcttaataaacctatggaaacacttaaacttgctattccatcagggatctatactcttcagaataatttactgtatgtggcactatcaaatctagatgcagctacttatcaggtacttaaaatacatttctttcttttttaaaaaaacttttttcttatacataataattgtatatatttatggggtacatgtggtattttgatacatgcatccaatgtgtaatgatcaaatcagggtatttaggatattcatctccacaaacatttatcatttctttgtgttggggacatttcagatcttctcttctagttattttgaaattttgagtaaattattgttaaccatagtcaccttactatgctaacactagaacttattccttctctctaactcaatttttgtacccattaaccaatctttctttattcctccccctgcccttgtatctttcccatcctctggtagctatcattctgctctctacctccatgagatccccccgctccctttttttttttagcttccacatgtgagtgaaaatacgatatttgtctttctgtgtgtgcctgggtt

SEQ ID NO: 55257 - DNA, 1664 bp, Homo sapiens
tcacacctgtaatcccaggactttgtgaggccaaggcaggtggatcatgaggtcaggagatcgagactagcctggctaacacagtgaaaccccgtctctactaaaaatacaaaaaattagctgggcgtggtggcacgcgcctgtagtcccagctactcgggaggctgaggcaggagaattgcttgaacctgggaggtggaggttgcagtaagccaagattgtgccactgcactgcagcctgggcaacagagcaagactccgtctcaaaaaaaaaaaaaaaaaaaagaaagtaatctaattttatcaaaaagaaaaagttaagtgtaaaattatttggaatgtcagtggaaaaaatatatctcttcagacaaactaaacgatatatcatgtagactttacttttttttaggtttctttggaagtatatttggattaatgggtgtatacatttatgatggagaactggtatcaaagaatggattttttcagggatataaccgactgacctggatagtagttgttcttcaggtaaagcatttaaagtcttagatttaatgctaataaactgtattttaatataaagaatcaaagtagctcctgatatactgatgtgagggggaaaaggtccctcctgttagtgctctcgtatctagtttattcaaggaagtgaaaatagaagtgatcttaatgctgtaatgaaatcttattttgtacaggggtctttaatgaactttgtggttttaaatgtaacataatgaaaatacaagtttaagaataaaagagttgaagctaaaggcaaatataacttttgatttttacaagtcttatcattgtacaggaagtctgggtcagccattaagacccaggaagcagatctagatatttaattctgtgacagttcatagcctcatattgtagttacatattggaaaacatctgtcaaattcagtttatatatagcttggaattgttcaagggttgagtaattaattacatctttaaaaaatacatatggagaattctagaggatataaaaatgaagatacaagtcactatccttagagcctcctattcttctagagatatttgaagcctaggaagcaaggctccagaaaggaaggtgaagatggcaaaggatagttgtgttttaaaagcaggtaggatacttctattttttttttttttttttttgagacggagtctagctctgtcaccaggctggagtgcagtggtacgatctcgtctcactgtaatctccacctcccaggttcaagcaattctcctgcctcagcctcctgagtagctgggattacaggcatgtgccaccacgcccagctaatttttgtatttttagtagagacgggggtttcaccatgttagccaggatgatctcgatctcctgacctcgttatccacccaccttgacctcccaaagtgctgggattacaggtgtgagccaccgcgcccggcccggatacttctattttttttttttttttgagacggagtctcgctctgttgcccaggctggagtgcagtggcgagatcttggctcactgcaagctccgcctcctgggttcacgccattctcctgcctcagcctcccaagtagctgggactacaggcgcccgccaccaagcccagctaattttttgtatttttag

SEQ ID NO: 55258 - DNA, 1360 bp, Homo sapiens
catcttaaaattgctggcttgagaaacaggtgtttcctgacatgattaggtattcaagtagatcctgctaaagatattatagaaaggattcctgcagtggatacaaaggtagaccacagaatctttcagttgagcatgaactttcagtccatgccattccaaagttccagaaagctaagaatagttcataatgactaaggaagacagtgtctagtaattaataattaccaatattaatgtagcaatttcttcaagatacattacaggatgttttatgttatcctaataaccttatatgtataactgcattcgagtcttttgaagagttaaccatttgtatcaagtcaaatctagttattaatcataacagataattactgagctccctatatatgctaggcactgtggctaccacagtgaatgaagagcatatggttgagcaggggagtggacttgtaaataatgcatcatttaatgacagtgtggtaagtgttatgctggggtagttctgcctaggggagtgagtcttggagacattagacctgaattattatgaataagcattttctaagaagcaaggaaactgtggacagagggaatagtatctctaaagacactgtcaagaaagtgtatgttgtgttcactgattggagtggctgaattatagattgggtggcatgaagtgggaaggatgagtttggagggaccatattatgaagggccttttaataatgattagtaattatttttcgtttataggcaattaaaaacaaaaaaacaggagcatggctttggactattagtagaaactttaaatccaaaactagcttatgtctctataatagcattttaaaaaatgtacacattaaaagttaagattgcactttgggaggcggaggtgggcagatcacttgaggttaggagtttgagaccagcctggccaacatggtgaaaccccatctctactaaaaattcaaaaaattagcggggtgtggtggtgcacactggtaatcccagctagtcgggaggctgaggcaggagaattgcttgaacctgggaggcggaggttgcagtgagccgagatcacaccactgcactccagcctgggcgacagagtgagactccatctcaaaaaaataaataaataaaagttaagattcaggctggtcacagtggctcatgcctgtaatcacagcacattgggagtctgaggcagatcacttgagcccaggagttcaagatcagcttgggcaacaaagtgagacctcagctctacaaaaaatagaaaaattagccaggtgtggtggtttgcacctgtggtctcagctacttaggagactgagctgggattgcttgaacc

SEQ ID NO: 55259 - DNA, 3017 bp, Homo sapiens
ccagcatggtgaaatcccatctctactaataatacaaaaattagctgggcatggtggtgcgcgcctgtagtcccagctactcaggaggctgaggcaggagaatttcttgaacacaccaggtggaagttgcagtgagccaagatcgtgccactgcaccccagcctgggtgacagagcgagactccgtctcaaaaaaaaaaaaaagaaaacacacacacacacacacacacccacagtatgaatgaaaaaaataaaatacttctttttttttttttttgagacagagtctcactttgtcgccaggctggagtgctgtggcgcgatctcggcttactgcaacctcccactccctggttcaagggattctcctgcctcagcctctgagtagctgggattgcaggcgtgagccactgcgcccggcctatactgtatatatttttaaagactgttctaatagatataaaaactgtaaaaaataagtatttttatatagctctcatggattttattaaacagaattggctcaaaaatactatgttacagactgttgggtacccttgcctaacgtgaactggcagtgttaccttgcttttgcagtaatagtctacagattgcaggtctcatcaattccatccaaagtttaaaagcatttaaaattaccaaatctttaaaatcactttggtggtgattccaaattggtaccaagcaaactttctggatgcccaacatgattttcagtaaccaccctttagagtatttgtttactaagttcaccacattttgaacatggtagttttagactgcaataatatttagacttacattattacttactgctaagtaaaatctaaatcctgcaaatgcacagaattcaagctgaaatataatgatttatgtttagctcacattgaagtattggttggttacttatgtattaatgcagtgtgcattcacatttaatcaggtttagtctgtttctattttaataattttaaaaaattatacaagcaaattagatattagacatgttagttacaatggtaacacatttttaggtgtcgaaacacaattttcaaaattcctaatgaaagttataaaaatgtaaacaagaattgtaaaaatggacaaagtagtcaaatatattttcaaagcacaattttattagacaggcataatttacattttgcttttctagtgggtttgaaaatgtttattggagattgggctatgtagtttataatttttaattcataaaaaagtaatcatacatgagaaggtagacctgtgccctaggatcatgtcacatatacagataatgccatttccttgtgtgtgtgatgtgtgttttgatgacctccacaggccttactgtatcaagcttttataatgatgactccttcattatttaaattcctatactttttatttgttatcacgcaactactttgttcaatgtgaaaatgtgctaactcatgggagaagagtgccaattgatagttcttttagcaattaagaatatggtatttgggaagaaaagtttgaaatgcaacaaatggatatttcaacacagtagtattatattatcagttctttagtaagtgattttagagatgttgtaggctacttttacggtggaatatatagtatagagatgcaaaacttaaatgtttacatcaatttatattgaatgtcacataatttcatggaaggaaaggtagcttgatatttagattctaagatataatctgaaaggaaactaattatgttctctacacttactgtaatactgattattcttacatatcaaattattgaactttaaaaatttcattgtatagtcattaaactgagttgggttttttcttaaagggtttagcatcactcatttgatttacacattcacattataatatttaattatcatgggtgtatgctttacataaaaaaggtttataaaagttatttatgctatattgaaagtcatcttaagaatctccaggttatttaaagtagttataggagcagagaacaagcacctttatcaaaatctggtcctatgtgccttgctttaccaaatacctgatttttctggagggtgttcctgtaattcacaactgtagacacatgggcaaaattaggatttttaagaataaatacatttctatttttttggttgtttcaacattagctcttcaaattcattaacaaaattaaaataggtatattacaaaagcataaacatttgtgaacagtacttaaataaattgtgatactattgctccatcattgaactttttgaaactttaacaattgtataaaactgtcagtttgttgtttcatttgtaattacaaaataatttaaaaactttttaaaataatttggatcctgactttgtctatatctgtatttcatttgtttagaaagattcttttgggtttgataatgtaatttgtatatttaaattttttatggacataattcaaaggaatgtataaattggtcttttgttaaatggctttttaattgataaacttctcttgtcattttttggtatccagctattacctatttaatagatttattgaaatagattattttcataaagaactctatacaaatctttttctatatttccttattttcctatttacctgtgtctatgacctaacctatgaattagtcttctctctttatatatcaaaaatgaattactgatctttttctctggctctgtagtatctctatcactgtcacatgtgatctttcttccttttctctagcccatattctagcatgaaatactgggttggccaggtgcagtggctcattcctgtaatcccaacactttaggaagccaaggcagaagaatcgcttgagcccatgaatttgaggccagcctgggcaacatagccttgtttctacaaaaaatcttaaaaataaaattagccaatatgtgggcatgcacctgtggggccagctactcaggaggctgaggcagaaggattgcttgagcccag

SEQ ID NO: 55260 - DNA, 1142 bp, Homo sapiens
accaaaaggacaagactgtttctgaaacactacattatctcttaagttacccattacttacggaaaatgattttttactgttcccttcggttcctgtcttggttagaacacagctggagattgtgttaatagcttaggacgtctgtttccgtgagcaggtaacaactttttgaaacaaattccctcatctgctgaagaagggggacaaaaacggcccctatcgcccagaaccgttgcgaggatttagctagctggtgacgccggagcacgaagttgtacaggtagccagcagcacccacgcgagcccgcggttaccctggccgcgcggctactgtagagtgggctggcggcgagcgggcggggcggtatcacgcgggaggggcggggcccgctcgtcggctgatcgcacgattgtgacgcgccgccggaggcaggccgggccctcaagatggcggcgggcgcccagagcggctcggcccggcagtagtggtgggacggcactagctgctggggcctgccgccccgggagtggctgcagcagcgccaggaatcgaggatggtaaaatgacccaggggaagaagaagaaacgggccgcgaaccgcagtatcatgctggccaagaagatcatcattaaggacggaggcacggtgagctgagttccgcgccggcgagcgtccctcggggcccccatccggtctctccttcagacccccacactgccgtctctaggcgtcccggtgcctccctcccttcccccaccctgtccgagctgccggtgcctcggggtcgcggacccgcatgccgccgctccgggaatcgtcctccgctgctcgggcttgcggcctccggggcccgtcctctttctttcccgcacctgccgccctctgctctggccgcctctgcaggccctgcggcctcgaaccccacgtgcgcctccgccgcggggaggaatgtgcggggctcccccggcggcccgcccgccgcgcccctcgtcgccgcagcctcgcctcgccttcgccgccaggccccgcggagccgtcgccgcgcttgtcaaggggctgggaaccatccctgctctcccatatgttgctaacggggtggcgtctggcgcggggatcccgctgcggccccgtagtacgtt

SEQ ID NO: 55261 - DNA, 1197 bp, Homo sapiens
ataaatatcaggggaatattttgcattatttgtattttaatccatcccagctttaaatttaaaaagtataactattgcagtcatagaaatgattgtaaaatggtagttgcttatctacctctctacttacaatagttcagactactattatgaactttttttgtttgtttgtttgagatggagtctcactctgttgcccaggctggaggagtgcagtggcaggatctcggctcactgtaaccaccgcctcctgggttcaagtgattctcctgcctcagcctcccgagtagctgggactacaggcacgtgccaccatgcctggctaattttttatattttcagtagagacaaagtttcaccatattggtcaggctggtcttgaactcctgacctcatgattcacccaccttggcctcccaaagtgcagggattacaggtgtgagccaccgtgcccagactgaacattttttaagaaaggggaaaaaattgccatttgatactctgttgttgtgtgttttttaattcatcgtatcatagaatatttcagtgctattgctgttgacctcagagtttcagagtttttataaagttccgccaatgggtagattcattcagtgagatgtctgaggctctatggtcggtacatgacagtcgtgaacagtatttcacatacctggtcaatggtactgatttgatcccccttctgatttcttcttttcaacaatgttaataaaattctttcccgttgtcctgctaatgacatatatgtaagcctatttggccagtttaaatatttataaacaaaactagtaagagttgttaatgatttttctgaaaattagagcagattagagcagatttgtagttttcaacggctgaagaaataaatccttctaaatgagccagattaatcgtaagttactgatttttttattgaaattgtatttcattgaattgtatttcattcagctgaatgaaaaacaggccaggataaagctaacaagtaggctacctatgtgagtagacacaattaagataaattacattaaggtgtgtgattttatattaggtgtttttaacctgggtctgttcaccctgaagttgtttgcaaaattttcttttggctatacatgtttcttggaagagtcccaaaaggtccatacttcccaaaagtttaagagcaattgttctgtttga

SEQ ID NO: 55262 - DNA, 1016 bp, Homo sapiens
caagatgtttaacctctgcatatcagttttctgatagggctgttatgagggattaaatgagataatatatgtaaagtgcccaatgtagtgccctgtgacatattaagtaccatataaatatttggttattaatggtcatatgcatgtcatacaaatctgaatatgtaaaataaatcagattgtagtatgaatggatgttcaaaaaggtaaatgtagaaattttattaagactgaaatatagcatgtgatttttattttggtttttattctttaggtattacatgaaacctttcctaaacatacatttctgatgaacggcttaattcaaggagtaaaggtaggatcagtcatacatatatatgtgtatatatacatacatacacatacacgcacacggatgaacatacataaatacatatatataactatgcgaatatatgtttgtttactgattaataacttaatttttataattagatggagtatattttgagagataacttaatactttctagacttgagttttaaatatgatctaactacaatatagccaatcatgcataataataaaccacatcataacagattccctgtttttatgttggcattttaattccagagatctcaatgattttgtaagactacagattgaagaggaaaaaactatactaaaaaacccccatcaatataaaactgtatcagtagggtaaagagttggttattatatgaattctttgctctttctttttcgtgtttttttttttttttttttttttttttgagacagagtcttgcactgtcacccaggctggagtgcaagtggcatgatctcagctcactgctgagaacctctgcctcccaggttcaagcgattcttctgcctcagcctcctaagtagctgggaccacagacatgtgccaccacacccggctaattttttgtatttttagtagagacagggttttgccatgttggccaggctggtctcgaactcctgacctaagtgatctgccctc

SEQ ID NO: 55263 - DNA, 1612 bp, Homo sapiens
gaaaaacagtaatggatggattataatagactttagtttgttgctgtttttggcagaaaaagcaaaatcacttaacagttcaacagttggtcaaaagatttgcctgaatacatgatctaattttaagtattcctgtatagtagctgagctgctattgaagggctccttctagccctatgttttcataatatctgtggcttatatttatggaatagttaatccatgaactatcctagtaagctgttgactgaaatgagctgctcttacgcttaattaacttataaaaatgaaagaagattaaaacaatggtaattgctctaaccatttcttgttatctttcattcctaggtggtactttgctgttatctctgtttctggggtttttgcagtgactttttctgtggtatttgcatacgtagcagatataacccaagagcatgaaagaagtatggcttatggactggtatgtatgtttattctataccttttgtatctgctgagaaatgccttgtttttaagataaatattattataaggagtgcaaacctttgcattacaagatttttgcgtaaaatatattttgtaataaaatcattcattagactacatttaaaatttttttgcggtatgaggctatgtaagttttgattcttttcatttagtagatattcataagtcacatgtcagaattgaaattatagtatattttaccttgtagagttctttttaacagaatcctaaaaataagaattatttagtatgtcaagagttaaaaaaaatcactactcatttaatgtctaatctaaaatacaacaggctaacatctagctcagggatcagcaaaccttttttgtggctttgtgggccacgtacagtctctgtctcattcttttgtttttgcatgtgtatttatgtttataaactctttaaaaatgtaagaaacagccagatttgagccatagtggtaggtcgccaactcctggacactgttttggtaaactaaattatggcagtataatgtgtcatctatcaaatctaggaattaaaggaaaaaagcctagtaatagaatgactactataggcacaataatagatcactactgaatagccagaaataggacagtgatgcatttcggtaaatgtgagacaaataccttgtgataaataaggactgaatattgtgttgggctgaattagttttaaaagggactgatttctgattcaaaggacgttatagtgaagaatcataagatttttggggaggaaacacctatagagagaaagttagaaaaagaactaataatttctggcctgttcagtggctcacacctgtaatctcagcactttgggaggttgaggcaggcggatcacttgagatcaggagttcacgaccagcctggccaacatggtgaaaccttgtctctatttaaaaaaaaaaaaaaaaaaaaagtgaaaagaaaaagaactaatgatttcagttgtaaacttggaacattaaatgatacaaggctgatgatagccaggatatttaaaaaatagtctaattaagctatagtttacataccataaaatttatcctttttatgagtatagttcagtgaattttagtaaa

SEQ ID NO: 55264 - DNA, 1516 bp, Homo sapiens
gggccaggcttggtgtctcatacctgtactcccagcccttcgggaggctgaggtgggaggatcgcttgagctcaggagttcgagactagcctaggcaacatagcgtgacttccacctctataaaaaataaacaaaattagctgggcgtggtggtgtgtgcctgtagccccatcaggagatcttcaggcaggaagatctcttgagcctgagaggtcaagactacagtgagccgtgatggcaccactgcactccagcctgggcgacagagcaagacccagttcccccactctcgcccccacaagaaaaaaagataaatggcacaggtaggaagagaaaagggagggtgtgcaacagaaggcctgacataaatcaagattatgaaaggagttatgtggtgttgaggaaaaaagtagcctgactaatctctgtctatccttaatttattgcaggtttcagcaacatttgctgcaagtttagtcaccagtcctgcaattggagcttatcttggacgagtatatggggacagcttggtggtggtcttagctacagcaatagctttgctagatatttgttttatccttgttgctgtgccagagtcgttgcctgagaaaatgcggccagcatcctggggagcacccatttcctgggaacaagctgacccttttgcggtaagtttatactttttccttctccttgataaaaaagtgcatgattcagtgcagcattaatattttgttgtggatatttctttagggaaaacatcttgggtttttcttttaacattttgaaatacttttcagaatagtttggggaatatgaaataaataaaaaggacaactagttgtccatgagtacactgccaaaaggaatctctgcgtattcttaagaatagttcagtggttttgatagaaaaccttatatcaatcagtctttttcttgttctagtccttaaaaaaagtcggccaagattccatagtgctgctgatctgcattacagtgtttctctcctacctaccggaggcaggccaatattccagcttttttttatacctcagacaggtaaaatcctcttccactaaggtggacttttctttcattgtctagtgctttaataaaaatatttaatcttgagagaactgtaatagaagtggcctttaaaaatgaatatcattggacttggtatagtggctcacgcctgtaatctcagcactttggtaggccaaggtgggtggatcagctgaggtcaggagatcaagaccagcctggccaacatggcaaaatcctatgcttactaaaaatacaacaactagccaggcgtagtggcgggcacctgtaatcccagctacttgggaggctgaggcaggagaatcacttgaacccaggaggcggaggctgcagtgagccaagattgcgccattcactccagcctgggtaacaagagcgaaactccgtctcaaaattaaataaataaataaataaataaaaagaatattatttggtctactagactttacct

SEQ ID NO: 55265 - DNA, 1055 bp, Homo sapiens
atttgtaaaatgattctgagttcttgataagtatctccaatttagtatatccacattgagggacccaccatggataagtaggcatttttagtatgttaagatatgttgtatttcctctgaggaattctttgtttataaatgaattacatttatttttttctggcccattaaatgttaatatacaagtagctgcagtggttttctatctggtatacatttgtattcattaatgttaccttttctggaaacccttctagataatgaaattttcaccagaaagtgttgcagcgtttatagcagtccttggcattctttccattattgcacaggtgagtttctttttttagttagagtgatgtcagtgaccctggctggccatccaaactggggcctcatctagtgatggtatcttggtggaatcaacaaagtcaggagtctgaggttgataggttcagaaattcaatttgtttgtgtagctagtgttgatcagatttttgggactgacacatttaatataggatatataaacgtaaaagctagtttattgatgtatactaggatatatgtctggatgaagttagaagtttcatgtcttgtagtccttgtcctatttattcactcattcaacaaatatttattgaatacctaccgtgtgtcaggcactggggatacagcagtgaacttaactaaattcttgcttttgtagagtttacattctggtgggataagacagaaaataaaaacaccaatgtaaacatatcagatgtattgagaactacagagaaaaagctaagggtcatatggagagtgacttgggagaatggtcttaagggcacagggggcatggttgagaagaccttgctaatgcaaggtgacatttcagcagagacgcaaaggtatgaggaacaagctgtaggattatctggaagaagagaattttaaacagtacaaacaaaattctcaggagagactgtagctggcttgtgtaagaaacaacagggggccagtgcggctccagttgagtgaacagttgagagcatcttagaaactgaagt

SEQ ID NO: 55266 - DNA, 1468 bp, Homo sapiens
aagtatgtaatcccatagcaacaaggccctgaaagttatttacattttttgtttttctggtcaggaaaaagaaagttgtataaccagtgatcattactgatagcaaaccagaagtgaaaacaatccagttattttggtgccagcttcatgctgtgtctcagcttttctgaccagtcgggtttcctgcaggggacttgagtagtgacgcttgttgtcaggctgcccacgtagatagtattattgtgctcaggcattatggcactgaactccatggtttgcactaatatttcaaacaactgactgcctcgtctctgtttggacttggatataagcaagcatcaagagggtgatgatttgttctccaaactagcctttgcaaagaggtgctcacaattgaaattacctaaaacatttcttttaaacatcaagccaggaacatccaagttacttgttctttacaatttaaggattagatcaaatcagcgatatcttcacaaatccatccataagaactttgccaaagacttgttggcttcatgtgtttggaaatatttgatgatgtttcgtcatctatattatacattatcctcaatataacctctcaattgcctgtagaaataatacccagcacattttacagtttggaacatgatatccctattttacattacaccctcacagcactcttgtgaattaagttgctgtctttgtatacagggtcagattgttaagcgacttgcccatagtcacctagtaagcaagttcagttctccttttctctacagccatttcacagtaagaattacttaattatgtagtttgactttcaggtacagtggagaagaatttactgtttttgttttgctgctctccttataggatgatgtgggctgctggggcagtagcagccatgtctagcatcacctttcctgctgtcagtgcacttgtttcacgaactgctgatgctgatcaacagggtgagttgataggaactagcgataattatttaaaagtacagaatgttctaatcctgtgttctgtctcctatgtactgaaacataagtatatcttcagggtagagacttttaaaattgcttttgatataaacaggaaaagcagattctagggtatttatccttaggtagatacatattcccttttctctcacttagaatatgtggcttatctgttctgttcatagaaaatttactgatgaggctgggcatggtggctcacacctgtaatcccaacactttgagaggccgaggcaggcagattgcttgagttcaggagttggagaccagcctgggcaacatggggaaaccccatcactaaaatgcaaaaattagctgggcagggtggcgcatgcttgtagtcccagttacttgggaggctgaggttggaggatcacttgagtctcagaggcggaggttgcactgagccaaaatcaggccagtgaactccaacc

SEQ ID NO: 55267 - DNA, 1482 bp, Homo sapiens
cacacctgtaatcccagctactcgggaggctgaggcaggagaatcacttgaaccctggaagcggagtttgcagtgagccgagatcgtgccactgcactccagcctgggcaacaagagtgaaactccgtctcaaaaaaaaaagtgtgattttggctgggcacagtggctcaatgcctgtaatcacagcactttggtaggctgaggcaggaggatcacttgagttgagttcaacaccaccctaggcaacaaagtgagaccccatctctacaaaaagtacaaaaattagccaggtatttgagcccaggaagttgaggctgcagtgagccaagtttgcgccactgcactcccgccagttgacccccccactttatttttgactaaaaggggtcttaagtacttgcttggggacagataaattttaacatttgtagttgtgaaattgtgactgatttttaaccagccatgttttgaaggctgtaatctagggaaataaagtagttttgcccacttgtttctatgtgagacctatatatgggtacatcagagctcatgtttgcataggacagcttactacactttgtagagctgatagcttctaaatattaatagtttttaatgacattgctataaattgctagtgtctgataagaagcttgattttagattaagtgatttcatatttgtactggttctaaggtagggaaaaaaaaccaggtagtttactaagtgataatttgtttaaacaatgtaggtgtcgttcaaggaatgataacaggaattcgaggattatgcaatggtctgggaccggccctctatggattcattttctacatattccatgtggaacttaaagaactgccaataacaggaacagacttgggaacaaacacaagccctcagcaccactttgaacaggtaattctcattcaacatgatcaaattgtatggttcatttggctagattaaaggctactggtttttggtcatgaaagcttttatgtgagattctatttgagattggataaaatgcttaaaaaccagagtttaagggactgtgttcttctacataccaccttgtgaaaattggctgtgcatattttttttccacttgagaatgaaaaattttaagtacctagtttgtcaatggcatatgtaacaaaccatttctctttactactagtctcttttgaaacttttctaatatcacagttgtgtatgttaactaacttttcatacaaaaggcaggcttatggtaaataacctttgttcactgtttgctatatttccctcttttcaactgaaaattaatgccaaacaatgctgatcattttggccaatattagcagctcatcagtttcctggcttatttagcagagttctgtacttatcttccaacccactaagactacttttaaataaaagaatgtttgtgggctatacacaaaactggcagtgcaagcttctgctaagaatgaatgtaat

SEQ ID NO: 55268 - DNA, 1753 bp, Homo sapiens
tttgtgctgaaagtaatgatgtaatattttcgcataggctgttttgccagttgttattcccagaattttatagagaatgtgatagtatctcttttctcctaaaaagggaatgccttttataattatggctttaataaagagaagagcaattagcttgtaattcataagttaatactaaaaggtatgtagtttctccttatgagtaaaagtatttgtgtaaaaatcctaattactttattcttcctcagaattccatcatccctggccctcccttcctatttggagcctgttcagtactgctggctctgcttgttgccttgtttattccggaacataccaatttaagcttaaggtccagcagttggagaaagcactgtggcagtcacagccatcctcataatacacaagcgccaggagaggccaaagaacctttactccaggacacaaatgtgtgacgactgaaatcaggaagatttttctatcagcacccaggtcttagttttcacctctagttctggatgtacattccatttccatccacagtgtactttaagattgtcttaagaaatgtatctgcatgaactccgtgggaactaaaggaagtgggaacttagaaccagacagttttccaaagatgttacaatttcttttgaaaaaccttttgtttattagcaccaatttcttgccactaagctatttgttttattatacatcctttaattaaaaactatatatgtaacttcttagatattagcaaatgtctctgctaccatttccttaaggtgttgagctttaactctatgctgactcagtgagacacagtaggtagtatggttgtggacctatttgttttaacattgtaaaattttgagtcagattttaatattgtaaaatcttgggtcaaataattcaaagccttaatgcagatgcactaaaacaaagaaatggtaaatgaattgtttgcatttaaaaaaaaaaactcttaagaaaactgtactaaatctgaatcatgttttgagcttgtttgcagtacttttaaacattattcactactgtttttgaagtgagaaagtatcagccatttagcatttaagttggggtatttagagcctgtaatctaaatgctggctcaaatttattccccagctacttcttataccactattcttttaatgtttgcataatcataagcacctcaacacttgaatacataatctaaaaattatatagtaaagctggtagccttgaaaatgtcagtgtgatatctattatgtagataaatatatatagtggcctttcaggactgtcacagtaacactttatttacagagctaatgtttgtcctaaattttcaggaccctagaggagagctttatacaattaccgatgtgaatttctctaaagtgtatatttttgtgtccagttatattatttaaaaaagtgttactttgtaaaaattgtatataaagaactgtatagtttacactgttttcatcttgtgtgtggttattgcttaatgctttttaaacttggaacactcactatggttaaataaggtcttaaaagaaatgtaaatattctgttaataaagttaaatattttaatgattttttttttaaaaaagtcttgatctgtgagttcctacagggtctgttttggctttgttaccatatttttacagtaacaaatcaaagcattattcattctttctttgcatccatttcttttccctcactaaaaaatgctcttcaag

SEQ ID NO: 55269 - DNA, 1060 bp, Homo sapiens
tttacagaaataacattaaatgcaacactttttgattattaacacatgtacaattttacactgcaaaacaattgcaactaaaagtttaggaggtaaagaattagcacacttggaagtctgtatacatttaatacaaatttgcaagatatcagaatgatctctcctgaaaattcaactttccttgtgtatatatatgcaaagagatacctatattttaaaaaagagagctacctgtatgtcatgcatcccatccaaaacatgtcacaatattttatatatattacatagtatttacaacaaagccccttccatagtatttacaataaagctccttccaaaatcaccaagaggcttctttccagaatagcaagtgctttcaagttactgtaccaagtattctcactaatacagtagtgtatctaaatgggggaggtgggggagtatcaactgcctaatattagttactgaattttcagattagatccctagtttaaagacacttgcaattgccaatagtttcaagatactggcttcgtaaaaaaaaaaaaaaaattagcaaagattctttcttaccatgggactcagtaatgttattacatcaatatcttgaaatgtttcttcatctgtgtaataaagtagttgaaaataattttaaattatcacatgagcattagtactttataaaaattgatctagaagactctttagagaatgctaccaggtattgtttgtcaataagaaaacaaaatgaggccctatgattctaggtgaattttaaaaaaatttttccccaaggaacaattcttaaaactttcagttacagggaagagaagaaaattgtaccttctaacagttatttgttttgcctagtttattaacattgaaatcaacccaagttctgatactataaaaataaatgaatattcatgatatagtagatttagtagtagtaccaagttttaaaagtccactgatacagatttaactgcataataaaactacaaattgagaaaaactagatgagtataaacatttaggaagcactgaagttttaaaaact

SEQ ID NO: 55270 - DNA, 1104 bp, Homo sapiens
gacagtttttatgtgaccagattaagtgcttttgtcatttgagctgacaagtttttaaaacttcagtgcttcctaaatgtttatactcatctagtttttctcaatttgtagttttattatgcagttaaatctgtatcagtggacttttaaaacttggtactactactaaatctactatatcatgaatattcatttatttttatagtatcagaacttgggttgatttcaatgttaataaactaggcaaaacaaataactgttagaaggtacaattttcttctcttccctgtaactgaaagttttaagaattgttccttggggaaaaatttttttaaaattcacctagaatcatagggcctcattttgttttcttattgacaaacaatacctggtagcattctctaaagagtcttctagatcaatttttataaagtactaatgctcatgtgataatttaaaattattttcaactactttattacacagatgaagaaacatttcaagatattgatgtaataacattactgagtcccatggtaagaaagaatctttgctaattttttttttttttttacgaagccagtatcttgaaactattggcaattgcaagtgtctttaaactagggatctaatctgaaaattcagtaactaatattaggcagttgatactcccccacctcccccatttagatacactactgtattagtgagaatacttggtacagtaacttgaaagcacttgctattctggaaagaagcctcttggtgattttggaaggagctttattgtaaatactatggaaggggctttgttgtaaatactatgtaatatatataaaatattgtgacatgttttggatgggatgcatgacatacaggtagctctcttttttaaaatataggtatctctttgcatatatatacacaaggaaagttgaattttcaggagagatcattctgatatcttgcaaatttgtattaaatgtatacagacttccaagtgtgctaattctttacctcctaaacttttagttgcaattgttttgcagtgtaaaattgtacatgtgttaataatcaaaaagtgttgcatttaatgttatttct

SEQ ID NO: 55271 - DNA, 1045 bp, Homo sapiens
attattctataaaacgccatgttcacaaaccaaaaaatgtcatttactcacaatctttaccaatccccaagtacaaatttgttcctatattataaactgccataaaagcagtacttaaagtatccagtctttaacagctcaagtaaaatttgaaacttgctatttgaggatctggtttgtgttgacatattttttaagcacctgagtttctaaaataccaataaaaagtaaaacatgacactagaattaactgtttggtaactgcccagggaaataggctgaagacgcagaggggagcgctgtgggtttggaagatgtatgtaatgctcctaaagtgccatctctctgatggtctgcaaatgaggacaaaaaaaggttactggtattcattaagtcttcatacattaaatttaattcaactataaagtacaaaaatccagaaatccctgcttacctgaattactaaataggttctggctgagtccgcgtaaaggaatgctatcttcccttttcttcaggtatttggattccaaccctacattttcaccacttaaaaagaaaatggtaataacttatttaacaaagtctttattaactttgaaggtttatctcatatgtatacatatatataagataatgtaactaagttctatttatagcttagctttgttcagaacacattcttcactggtttcttaagcaaatggtaattttatacataaaccaaagtatcctcagtaaagagtagattataataaaattttaagagctgggataaggatggtgggaaaaatgaaaattctacaagtgctataaaaatttaaatactagcacataagtgatacatgacagaaaaatacgtgccttgagagtaacactattaatttctaactcatatttaaaataagatttctttttcctttgaccaaaagctcttcgaaattttctagtgcttcaaagtagtcatgatcaagtattaacacacattacacaataaattctgatcaaattaatacaaatgagaaaatctgggggagaaagaagg

SEQ ID NO: 55272 - DNA, 1042 bp, Homo sapiens
taatactagggaaaccgttaacactggatgtatttagaaaggatggcagtggtagaaaggggaaacacagaaatgcccttctttctcccccagattttctcatttgtattaatttgatcagaatttattgtgtaatgtgtgttaatacttgatcatgactactttgaagcactagaaaatttcgaagagcttttggtcaaaggaaaaagaaatcttattttaaatatgagttagaaattaatagtgttactctcaaggcacgtatttttctgtcatgtatcacttatgtgctagtatttaaatttttatagcacttgtagaattttcatttttcccaccatccttatcccagctcttaaaattttattataatctactctttactgaggatactttggtttatgtataaaattaccatttgcttaagaaaccagtgaagaatgtgttctgaacaaagctaagctataaatagaacttagttacattatcttatatatatgtatacatatgagataaaccttcaaagttaataaagactttgttaaataagttattaccattttctttttaagtggtgaaaatgtagggttggaatccaaatacctgaagaaaagggaagatagcattcctttacgcggactcagccagaacctatttagtaattcaggtaagcagggatttctggatttttgtactttatagttgaattaaatttaatgtatgaagacttaatgaataccagtaacctttttttgtcctcatttgcagaccatcagagagatggcactttaggagcattacatacatcttccaaacccacagcgctcccctctgcgtcttcagcctatttccctgggcagttaccaaacagttaattctagtgtcatgttttactttttattggtattttagaaactcaggtgcttaaaaaatatgtcaacacaaaccagatcctcaaatagcaagtttcaaattttacttgagctgttaaagactggatactttaagtactgcttttatggcagtttataatataggaaca

SEQ ID NO: 55273 - DNA, 1050 bp, Homo sapiens
ttccagatatatgctactataccattagaaagacatttatgcttttaaaaaaaaatctgtactaaaactttaaaattattaaagacttttttttaatatgttagacatcttaattataaataaccagatgaggcagcttccttttttcataatgcttaatttctttcttttcccattctaggagctacagcggactaagcaagaagtcctctctttgcgaagagagaattctacactagatgttgaatgccacgagaaagaaaagcacgttaatcagctacaaacaaaagtggcagttttagaacaggaaatcaaggataaggaccagcttgttttaagaacaaaagaggcatttgatacaatccaggaacaaaaggtctacttttaaatttttctcagaaattgataatcatatttataagtaaacacaaatgccctaattattcatgtttttaaaaaatatatcaggtggttttagaagaaaatggtgagaaaaatcaagtacaactaggaaagcttgaagctacaataaaatcattatctgcagaacttctgaaggtttgttttaaaaattttatagactagtatttcattaaattacatagaaatatacatatgaagctcttttataggcaaatgaaattatcaagaagttacaaggggatctgaaaactttaatgggtaagttgaaattgaagaatacagttactattcagcaagaaaaactcttggctgagaaggaggaaaaattacaaaaggaacaaaaggaattacaagatgttggacagtctcttcgaattaaagagcaagaggtagttaatattttaaatttttatgttgtaactaaattttttcctcgttttaaaaatttatgctttgttacattaacaaatggctttggtcttgtttttttttttaacaaaagaacatgactagattgagtagatggtaataacctgtttcagtttggaaagttagttatcatgattcagataccttgattgctcatgtatgtctatgtttgtatacacatgtaaatattttattaca

SEQ ID NO: 55274 - DNA, 1054 bp, Homo sapiens
ttattgttacaacagttatttaaggtaggaactattattagccctattttacagatgatgaaactaaggcacagaaaggttaaataagttgcctaaggtcacatagtcaaggagtggaagaacaaggattagaactcatctattatttgactatctttaatactaccttgttctttcaggcaacagagaaatttttattttttattttatttattttatttaagttccaggatacatgtacagaatgtgcaggtttgttgcataggtaaacatgtgccatggtggtttgctgcacctatcaactcatcacctgggtattaagccccacagaaatttttaaaatcttgctatagtgccacatttgttgttgctttggcattgattacaggcttctttgtagcattatatattattgtcatatgaattattagaaaatatatgtagattttgtctatatttaaataccaaagttaccagtgttattctagctcacaagacttcaaactctattttaccagtctcatgcttagaagctctaaagcctgaccaattttgtgttcagatcctcatattgttttgccccaataatagatgtcttctgtttttcctgcatacactcttcatactggttgtaaagcatttgaaccttcatggtacattggtagtctaaatgcttcagtataatgctctgatttcattattctcagccctggaactggtcattatataaacaacctcattgcattgatttttatatgatctaatgaaaatatttcctccaagattttcataagacttgcaaattgttagttcttggagcttttttttttaactgctgagtattcagttacctattttaagtaacaatttttaggcattagtgtcctaaaaataacaattgctaccatttattgagttttactgtgtgccagccaaaatgctaggcaatttacgtaaggatttttatgaaggttaaatgaaataatttattaagtatttgttatttctgttttacaaatgagggaactgagatttaatttagggagtttcagta

SEQ ID NO: 55275 - DNA, 1058 bp, Homo sapiens
taagataggtttgtgatacgattcagacaggcactaaatattgcacagttataaccatgttcaaattttattgttggtaaaaatgactataagattggactaatgaaccaaccttgctcgttttacaattttaggtgtttttccattataaagcatatatacgagtatttattattaaaaactgaaacactgtgatggtgtttaaagcaaaaatctgctttttttttaatacacaagtaggttcatcctgtatacagtatttgcagtttgcttttttaacttatatagcatcttcccttaacttgaagactgttgcacctaaacatatatggatttagaagaagcaaaaattatgaacaagatcatggtggtaaatttgcttttgttgaccttgctttctccgtcatgaaattcataattgaaaatagacccttttcagaatggggatctaaagaaagatgacaaaattaagacaaaaaagaaaaagaaaaaataagaaattacaatttttttttgttcaaatctttctgtatttgtatttctgatttttttctttgaattttggtactgtatttttattgtatcataggcacaggttcaatatcaacagcagcatgaacaacagaaaaaagatttagaaatcctccatcaacaaaacatccaccagctacaaaacagactgtctgagttagaagcggctaataaagacttaaccgaaagaaaatataaaggagactccactattagagaacttaaagcaaaactttctggtgttgaagaggtattgaatgttgttttttttcctcccccaatttaagagaacgttttgatttggttattttaatgtggttacttgtgtgggtggtgttcctctggatgctcttgtggtgttagggtatccattcagacaatgcaaagaaaattgagaatttgaaatttgataaaaagcataattcataacagaactgaggtaagcttgaatatttttagttagggtcttgagagcagattactggcacagctgtcagatttatcaatatgtttttaatagtaacaca

SEQ ID NO: 55276 - DNA, 1175 bp, Homo sapiens
tgaagctgggtaatttataaagaaaagagatttaattggttcattgttctgtaggctgtacaagcatggcaccaacatctgcttggcttctagtggggacctgaggaagtttacagtcatggctgaaggcaaaggggagcaggagtgtcacatggtgagggtgggaggaaggaggtaccacatgcttttaaacatccagatctcatatgaactaactgaatgagaacttgcttaacaccaagggaatggcactaaaccattcccatgatccaatcacctaccacaggccctgcctcctctgttggggattacatttgaacatgagacttggaggggacagacatcctaactatatcggtatctgataatctgcatggcctcatgcagaaaatacccctgcacaatgtggcccacagggccatgttactgggttttatatgtaagtgaactattccttataatcgacttgcttccccttacccctctttattgggtggtaaagagccagatttaattaaaagctttaattaaaagatagttaatcttgacctgtgggccgttttgggtctaagattgttcttattctaatgttgatttcctaaaattaaaaaattttgtgtaggaaaaggctttgaacatgtcctgaaaagctataattttgttttctttaatatccttgtaaatattgctatattctaatcaaaattattacatattaaggagcctatcttaatattttgtgttaaactctaatgtagacattagcagaaaaaaaacaagaattagataagttacggaatgaatgggcgtcacatacagcagccttgacaaacaagcattctcaggaactgacaaatgaaaaggaaaaagccttgcaggtaagaacattaaaggaaactgaaaaaatatcttttattgctgttagtcattttgttaattttaaaagtaatatatgcttgctttaaattttccaaacgttacagaagtatataaaataaaaataaaaatcctctctttcaaagtcttactacctagagataatctataaacattttgatgtatttttttcagacttttctctacgtatatgtaaataatatgtaatttataaatatttgtttataaacttataactctgtaaattatgtcatttatatatgtacccatataatggg

SEQ ID NO: 55277 - DNA, 1035 bp, Homo sapiens
ttgattaaaatcagaaatatttcttaattttcatgtcttgacaaaggcactaaagtcatccgaaatatttagcagcatcaaatatttggttttataatgatattggaaaaagggaagactaagattgtatgtgtgtatggtgctaacgcctgattcttttactgtaaagttcaccatcaaccttttatttattggttttatcagttgacgattgttgttgaatcagttatttcattaggaagaacaaaatgatgcttctgtataattttttctatattaagtataattcttctataaagaagaacttttcctcagcaattagggctatttgattactcagaaaattcataaaggataaatgcttaattcttgcatttaaattgtcaatttttagagtaaagagctggtagtctacttttgtggcactcagtgaatttttgtttctagtttttgctttttctctcatttgtttctcatgaactcatggacttttatgtagtcactgtgtttcagtcaatcttttcttttttttgcccaatttatcttttaccattgggagtcctcaatgtgctccctttcctgagctttcttaagtagagaagcttctgattcagtgagagattttcactatctcttaagtgtgttataatgtaacattttcttttcaaaggtttttgctacagttagtttctccagcagctattttggataactcacctgcatttttaaatgtggtagagacaaatccttttaagcatcttacacacctctcactaaaacttttacctggaaatgatgtggagataaagaaatttctcgcaggctgtttgaaatgtagcaaggtaagatttaaatttaagttattcttttaacaaaataagtatcaatggtctttgataaattattgaagagatacattgccataagtttttgttttctaaataaagttttatgaaatataacgaatttattttactgtttcttatttagtcaaggtatagtcgggatggatctggaccaggaattgagaagctt

SEQ ID NO: 55278 - DNA, 1056 bp, Homo sapiens
aatagtcatacatataatagttgatgctatcttagatttcagacaccatatgtaggccttctctataccctgtttgaagctatagacccttgtttgtccaaagcagtatttgttcatatgtatttaagccagtacactggagagtttttgttaaacccttgggacctgattttgccaacttttcattatgtccttgtaaggtttccttaccttgttttgagattacagagacactgaagttatatctggtatctgtaagcaataaacttgatattttatttaaataaatgtatctcttaatttattaggaagaagatgctcggaaaagaatcctgtgtcctttagatccaaaacagtaagtgtggatcagatacgggtttttttttgtgctggaaacagtaattggcacaagtctcatttgaaataattttctctttaaatttagcacagtatatgaagatcaactagcaaagcatttgaaaaaatgtaactcaagagagaaaccaaaacctgtaagtgtttgatcagtaaaattgaatggtgaaatgtggtatgtaatgccttggtagatgctgcacatggaatgtacttgtttcatagctgaggaacccaagctcaggaaatataatttttttttaaagagatagggtctcactctgtcactcaggctggagtgcagtggcgtgatcgtagctcactgcagccttgaactcctggactcaagcaatcctctcacctcagcctcatgactagctgggactgtaggcaaacgacaccacacctggcttatttttttatttttttatagagacggggttctcgctgtgttgcccaggctggtctcgaactgctggtgtcaagcagtactcctgcctcagcctcccaaagtgctaggattataggcgtgagccaccaaatccagccaggaaatacaaatatttttaaattgggtagtaggcaaacctgcctgacttttgttccataagtagacatttatttattacactgtacaataagggctgccatgcgatccaggaggtgacaccatttctgtct

SEQ ID NO: 55279 - DNA, 1019 bp, Homo sapiens
cttaggtgactaagtggtgttctttcctgagataaggaatgaaggaggcacaagaggaaggatggttttggagacagaaataatgagttcagttctgaatgtgtccagtttgctggtgaagtagagctttctagttcacaattgagtatgtgtctgatgcccattggagaggcctgagccacaaatgtagatcagccggtcgtgggcacataggtatagattagaatggttgtgatctttcaggagagcaagaagaggagcgaaccaaaaatagtacaccaggagtgacaaagataaaggagctagtagacaatcttagataaatcacttaagatctgtgaacttcagttcctttgtcagtgaattgggaatttttagggttaaaggaaataatgtctatgtaataattgataaacattttcaaatcttttttaaaaagtgtgatattttgaagttctcatcaaagaatgtacaatcttaatttttaaatatgttctgttgctctgaattttgaaaaccaataaaaatctttttattttcataaagcttttttaaatgtaagaagtgattattacaataatgttctgtttgtgcaggtggatggaaaacacagaaagaaaaattcagtgtttgaaagacttcaaattgatattcaacacttgtgtttgagtaagttgtgtaactttccattggtctacaaataaatcataactgttttaaactctgaggttgcttagaaatccaatcatgcagaactgtgcttcagggaaaacagtcaaatcaattcattgttaatatagaatgttttatataatgtttttaaatagatgtaaattgaattaaggttgagaattttaaaaattttcagtatcaagtggaaatgaagtgttatattagggaagagtttaaaagttttataatatgtacttctgttgtttctttgtcctgtttaaattaattttgagtctgttcaaactataaactagccttctgcctgcagttaacgtgactttacctaa

SEQ ID NO: 55280 - DNA, 1745 bp, Homo sapiens
atttggtcaacaatggactcatatatgacagtggtcctataaaattataccatatttttactgtaccttttttgtatttagatacacaaataccattgtgttacagttgcctacagtattcagtaacatgctgtacaggtttgtagcttaggagcaataggctgtgccatacaccctaggtgtgtagtaggctacactacaccatctaggtttgtgtagtacactctgatgttcctacaatgatgaaatcgcctaatgcatttcccaaaacatacaccaatagttaagcaatgcatgactgtacttttgcataccttatctcatttaagcctcataaaagtcttctaaagtaaaccagttccatcccgggggtaggagggagtacactcttttgacctacagtggccatttctcatgttccacataattttttcccttgattcactgtatctgaatcctccttttgtctctgctgcagttgcttaccctttttgaaattccattttcttctcttttgcgatactcttatttcctggttcttcccctacatctatgccattcttctgtttatttcacagtctccttccacttctgtccttaaaatactaatattcaggccaggcacagtggcttatgcctggaaacccaacactggaggctgaggtgagatgattgcttgaggctaggagttcaggattagcttgggcacataggaagaccccatctctacagaaatttgttgggcacgatagcttgtgcatgtagtcccagctattcaggaggctgaggtgggaggatcacttgagcctaagagtctgagtctgcagtcaactgggatagcaccactgcactgcagcctgggtgacagagcaagaccctatctcaatcggtcaatcaatctcagacccatctgctacacaactaatgtgtctttccctttaaactcttcggtacttcctgatatagtccaaactctttgacataacgttttagtctcaatctggcttcagccttcctctctttacattccctgtctcctactttgctgttcagcaacatcaaaccctgtgtgcttttccatagactgtactatttctactatatctggaatttcacccccattcacctactcacccaaacaaaacaactggtcaatttttactcatccttcacctcagttgtcaccactctcagggagctcccttaaataagatatgcctccttggtgttatcataataccctctgcatatttttaccttgtggtattttaattatctgtttatatatctaattcttccaccatgctctgaattttttgagtatatggtatatacttagtacgatgcttgctatataacaggaacacagtgaatatttgaatgaatgaataatcttggctaccaatttgctgtgtttccttgtccctttctgcatatgtggctttgtcttttaagttctttataaaagatgaattgagataaattgctaaagctccttctaattctgaaataacttaattcttttttttttttcttcgagacggagtctcgctctgtcgcccagactggagtgcagtggcgcaatctcggctcactgcaacctccgcctcccggcttcaagcgattctcctgcctcagcctcccgaattgctgggactacagactcgtgccaccacgcccggctaatttttgtatttttagtagagacgggatttcaccgtgttagccaggaaggtctccatctc

SEQ ID NO: 55281 - DNA, 1661 bp, Homo sapiens
agaataaatcattaaagaaattgagaagatagaagagcaaatttgaatgaagttgataattcatgatagtattattacaaatataaagctgagtaggtttttgctgtttttattgttgagtttttaaaaacagtactgcttaataaatgtaaaaagtatttatttttaaagatgatgtggtttgggggggccacataattgtgtttgcagatcttgcattacgatgtttggttgaaacctatgctgccagttttgaggaaaggaatgaagaacctttagccaaacgcataaagaatgataaaacagaaaaagaaatttacactttggccaaggaaggaaatgaaaaaaatgtcccagagaagtggaaccctgtggctggcattgttattgcactctgttgtcaccacaggtgtgattggagacattatgtgggcaaagaatatttcagggctctaggccttggagcagtggaattccattatttccagcgaatgagtagttgggcaacttgtgggatgcggaaaacatctttggaaacctcaaatagtaccacaaagaggcaagataatcagaatgatgatagtgaagagcatgatgatggaggatacagaatcacagatgatggcgctgattgtttgcctgggtaagagactacttttgtaatgcatgatactaaaggagaaatattatattgtactgtactttagatgactattatcaacaattcatgaaaatgtattttataatctaattttagaataagctaaaatatacacatcttttattgtggtcataaatataatgtgtcttggaagcatgggacaaagtacttagtacattatgggttagttaacagtctctcaataaatagtgacaaaaataattttttataaacttttgcaaaattttaacaatgttttgtgtgtgtttattcaatttaggcttcttagtgttgaagaaaagaagaaaatagggcatctttgtaaattgctgattgaccaaggtcgaatccagtatttgcagcagaagggattcagtcctgctttgcagtactatacagaccctctggtgtctttggaaaatgttttgttaactgctttaccaaatcattcttcatcaccagaaacaactgcttaatggaaaagaaatttgagcatcatctgtcttccaccaaaaaaaattttttaattatatttttatatcaaaaaaatatatactttaaatagcaaataatatgaactttaaaaaatgctgtggcctcattaaactttggtaatagcttttctttttacttcagaaatccaaacattagagaattcaccaaagtaatcctctttagaagggcatcttgaattatattatccatccgtatttatggagattggtaaagtagttgaaccgttgacttggtgatctgaaacatacataacatgtcaacacataattagcgtatttctgtttgtattaattttggaaatttatcttcctttgattttatttaatattttttatttcttaagttcaagaggtagtgattgattgtaacaagggccaatctgagaatttgacttatatgtggacatttttccctacagatctggaaagcacaattgtgattttctcaaatgcagacaattcagagatattcacaattaataaac

SEQ ID NO: 55282 - DNA, 1028 bp, Homo sapiens
aggagttcgagaccaccctggccaacatggtgaaaccccatctctacagttttgtaaaaatacaaaaaattacctgggcctggtggcacacgcctgtagtcccagctacttgggaggctgaggcaggagaattgcttgagcccaagaggtggaggttacagtgagcagagatcacaccactgcactccagcctgggtggcagagcaacactttgtctcagaaaaaaaaaaaaaaaccaaaaagccaagtgtggtggtgtgcacctatagtcccagctactcaggaagctgagacaagaggatcaattgagcccaggagttcaaagctgtagtgagctgtcattgtgccactatcctccagtatgggtgacagagtgagacctggtctctaaaaaataaaataaaataaaaaaaacaggtcaaataaatgctgttgttgtaaaatttcagataatacaaagagttaaccaataaaagaaaaagtcattcataatcttaccactattaacattttgatgtatctatctgtatgtatggctattcttttttgttaaaacatgatcatagcatatctactattttattatttgatttttaaaatttaacattatattatgggtaaccttacatgtcaataaacaattccacattgtcatgctttaaatggctgcataggctgggtgtggtggctcacgcctgtaatcctaccactttgggaggccaaggcaggtagatcacaaggtcaggagttcgagaccagcctggccaatatggtgaaacctcatctctattgaaaatacaaaaatcagccaggcacggtggcaggcgcctgtagtccacctactcgggaggctgaggcaggagaactgcttgaacccagcggcagaggttgcagtgagccaagattgagccactgcactccagcctggtgatagagcgagactctgtctctaaataaataaataaataaataaatgtctgcatagtattccattgtatgcatttattatacattcaaacattaaacat

SEQ ID NO: 55283 - DNA, 1160 bp, Homo sapiens
gctcacgcctgtaatcccagcactttgggaggcccaggtgggcggatcacctgaggttagaagtttgagaccagcctggccaacatggtgaaacctggcctctactaaaaatacaaaaattagccgggtgtggtggtgggtacctataatcccagctacttgggaggctgaggcaggagaatcgcttgaacctgggaggtggaggttgcagtgagctgagatcgtgctattgcactccagcctgggcgacagagcaagacgccatctcaaaaacaaaaaaacaaaattcatgttactaaaagacaggtagccatatacagacagtatatgccctattttttttaactgactcttaatgaaactttaattttacttaattaagaaatggaatttatatacaaaaatattttccatttccgttattatgctaattgttgtatgaaataagtgcaattatacttctcttttgagatatccaagagtatattcttgctctgtatagagaatatcatctgatagtgtcttatttatattaattaatgtctttgaaaagggaaaagtataaactggccttaaaattgtccaattatagttttataaccagtctattaaaggtgtttgtttaaaatggatatagttttagatttgtggtaatgctttggtattttcttggggaagaccttcacctttgcaaacttccctcatgtaaggaaggtactttaaatgtagcagccactgacatttctttttttaaaaaaaatttgagaagtctacttccttttaacttttttggtcttcagctaaaaaataggataagaaattaaggtctattccattctccatatcctgggtaagaatgtaaataagaggagaaggaagagtctaatagtaattatggatataaaaaataagaaattttgtatagaaatgaaggtttcataatgatcattttgttaaaggtctactttaatcagaaatagcaacgagatgaatgtatccaacatttcaatttgcattcggaaatccatgttgtttctaatattgtccagttgaaaactgtatgccaaaattagttgtttaagtgaagttttgtgacagaaaaaaggttgttttaatatctacttggtttttctcaaaatggaaataattttaaaatcagg

SEQ ID NO: 55284 - DNA, 1004 bp, Homo sapiens
gaccgaaaactctttttgagatgcctttcctgaagtttacttatcattagaagtgcacaaccagaggctgggcacggtggctcacgcctataatcccagcactttgggaggctgaggcgggtggatcatgtgaggtcaggagtttgagaccagcctggccaacatggtgaaaccctgtctctactaaaaatacaaaaattagccagccgtggtggccagcgcctatagtcccaactactcaggaggctgaggtgggagaattgcttgaacccaggaggcggaggttgcagtgagccaagattgtgccactgcactccagcgtgggcgacaagagcaaaactccatttcaaaaagagaattaaaaaaagaaaaaaaagaaaagacatgtacaaccagaaagtgagcttagatattctgggaggtcagctcccatacggttaatacagtcagctgtattaattttaattttaatatctcctgattaagtatatacttattaaaaaaatttcaggcaagaaaatgatgttggccgggtgtggtggctcctgcctgtaatcccagcactttgggggacagaggtaggaggatggcttgagcctaggaattcaagaccagcatgggcaacaaagttaggaggccccatctctacagaaaaaaaaaattagccaggcatggtggtgcatgcctatagttttagctgcttgggaggctgaggcaggagaatcatatgatacctgggagatggaggttgcagtgagttgtgatcatgccactgcactccagcctaggtgacaaagtgaaaccctgcctttgtcaaaaaaaaaaaaagaaaagaaaagaaaagaaaaaagaaaacaaagatgtttaccctcaattccatgaccctaagatagctcactgtttatgttgagatatacatctttctaggatttcatttttacatactttttacaagatatagaattatttatattttctttaacttgcttttttctttttctttt

SEQ ID NO: 55285 - DNA, 1033 bp, Homo sapiens
tggtcaagactatgtctgcagccctgaagatacctcattttggttattgtgatgagattgaccttactgaactggttaagctccgagaagaattaaaacccattgcatttgctcgtggaattaaactctcctttatgcctttcttcttaaaggtgagattcattcatttcaaacaaggcttgagtaggacatttatttgtttgtttgtctttttgagacagagttttgctcttgtcacccaggctggagtgcaatggcacaatctcggctcactgcaacctccaccttccgggtttaaacaattctcttgccttagcctcctgagtagctgggaatacaggcacctgccaccacgcctggctaattttgtatttttagtagacacgtggtttcgccatgttggtcaggctggtcttgaactcctgacctcaggtgatccacccccgccccagcctcccaaagtgctggaattccaggcgtgagccaccatacctggccccaagtaggacatttaaattttgctttgccaacatgcaatatgttgactgtggccttgaataaaaatattacttttcgcaacatcagatagttagaaaatgtgccatttctttgttcaataggaaattataaaattgagatttctgtactatatttttagctgcttatctttgagctaggtagagacaattctgccagttaagtaaagcctctgatcctaaaaggatcactccaaccaagtcttggtttgaactaaaatgagacttgatattaattttgcaatatcactgacatatatttaatatttattttcatttactcaaccaacttatattgaggatcctgggaatcatttctagtgctaagccttgggaccagtataaaatggagtaagaccatcagctaaccttgagcagcatacagtctagctcacattagtgactgtgcagcagctaccatgtgccagcctccatagtaagcatgctgtatacattatctctctcttttttttttttttttttggtatgaatctcat

SEQ ID NO: 55286 - DNA, 1050 bp, Homo sapiens
tggacaaacaagtttccatcaagtttgctagatatagaactgcctgatttttagccattaagaatgagaaagaatagttatataaattcaaaagaaatctgttcatgttattatagtttcataacttaaaacaaggatatctagctgggtctctctttgtatatctttgttctattttctattcattacattgtttcaaaatttaattaatttgttagtagggccttttatagccttataacagaccattttggaagttagaaaatgtaagttctgtggcagtgccagtaagtctgtgttgtaaaataatttatttaaatctctaatggttatgaataatggttatgctcttaaaaattataaaatgctgtttttctgtctgtaagatggaagaatttctgcctctgcctgagaacattctctaattttagatgtgaaagtatatattagtaatatgttatatacttaatgagatcatttctcatttgtctttgaagctctccgtggacaggttgttcagttcaagctctcagacattggagaagggattagagaagtaactgttaaagaatggtaagtgaatctgaaaaaagctcttaagtaaatttaaaaataatttgagtaaaaataactatttttatttttatttatttaatggatagtgggaatccatttaaattgagaaacgtctttataaacacataatgcatttttaaaagcaataaggtagaattaccttgtgttgatgatatagtggtgaaggactttgtcatacatcaaggtactttatttagtgtgatttaaaactgtcaggtagtctaagctctcttcactgttacgaaaatgactttagtaagaatgtaagtatgtttgacttaccattacctgatacagtttacttgtatgtttagaagagatgaaaatattttaccaaaagtcatgaatcaaaaaataaattttgaaacattaaaaaattgtccaaaaaagggcctgaaacagacaaaagcctttcatcctctaccccatttttttctttcaccttctggaaaa

SEQ ID NO: 55287 - DNA, 1010 bp, Homo sapiens
cacacacacacacacaatacctttcagacacttaggttttgatatatagagttgaatacatttgggcctacttatttctataagagattttaaaataatattatactaaggtactatgtaaaatagttaattctaaagagtcatctataagttactataagtaaactttggggtatcatactatacaagtttttcattgtttttagatgctaactattactttagaattctttagtagttttagttcaggaagtccaatgacttaagcatacctataagctgatgtatttatacagaatacactgttaaaatgtctttactttcagaaggaattttgggtaaggatcataaatgtaacaaatctaaatctaaggatataatatttctattgtgacaatggttctacttttagaatggaattgaaattcaatttatacttagagataagccggtatggttgtttataaatgcttttactttttgttttctcatctgtagatttgtgttcgctattttcaaacatgtggtaatgttcatgttttgaagccaaattatgtgtgtttctttggttatccttcattcaagtatagtcatccacatcacttcctgaaaacaactgctggtaagtatgatttcaaaataacgtgtataaaataatgttttgtacctcattcagtaatattttttagtagttgattgagactttttaaacaaaaaaaagttgactctgtatttctagccgggcccttcccatctccccacatttttccagttctcactttcttttttctcatccctctcttttacatactttccttaacactggcacccctttttaaaaaaaatttttttttagagacaggatctcactcagttgcccagattggagtgcagtggtgtaatcacagctcactataacctgaactcctgggctcaagtgatccttctgcctcagcttctcaaagagctgggattacaggcattaacttatctcgcccagcacttgtgtc

SEQ ID NO: 55288 - DNA, 1051 bp, Homo sapiens
aaagtgctgggattacaggcgtaagccactgcccctggcccagtttctcttgatttgagcctgtaattctctctgaagaaatctagtcatgatttttccaccctgccctcaactggaggtgtcttggcccttcttaactggattatatgcctccagtggtcttgtagtttttccaacccattctccatagtgtagccagagtgatcttataaagtaagagacatttgataatatcattttcttgtttaaaactgccttcagcaaaatgtccaaaattcaaatgactatgaggcaatttatgatctggacctttccagtctcttagatctcattccttaccaaaacctacccatcccaaccccaactctgacacttccccacccttattccacactaaactacactagaagtctgttgaacaacttgagttatttgcacacacactgtgctttctgtctcaactccagacctttgcacatgtatttcctctgctttaaagactcttgccttactccactgtggccttatctgcaacatacctcatccccggggttacacctactcatccgtcaggtcttacttcaacataactttctccagctaggttcccttaacacactctatttccttcattatagcacgtgttataatcaccggtttacttgtctttacctttcactgtactgtgcattctataagggaagaaattgcatctgttttgttctctgtataatcccaagtgcctggcacattgtaggtgtgcataaatattttttaaatgactcagtaaaaaaaaaagtcaggtttgtaaactcttctaaaaagttgtaagcaaaaacagttcttacccccgtagtaaattattaaaatagccttataatgttgtgttttacatttccctaggacataatgcatttgactcttgattaatcatgccatttggaatttttctgttgtgtctgtcttcctgtagtaaagtgtaagcaatttgaattcaggaactatatattgcatcttatttagctttgcatttccaagtccagtacaatgt

SEQ ID NO: 55289 - DNA, 2064 bp, Homo sapiens
tgtccagagccttgctacaacgtatagaaatattctattttctgtatttggggcggctacactacaagatgaagacggggaaatgttttccaactcatcgctcaggtcctactgcaacataactttcttgaggtaagtacctttctttgtgtttccttaacactctctattttccccatcacatacactaaaaagattatctttggtgcatctgtatttacacagcagtgttaaatttgggctgccctctgccccgcctccgtcccccaggctcttttcactccccgctgggtcccagatcctagggtttagctcaggctccgccctactccttggttggctgttgggtgggaggctcgtttcttccctccctattggtcgcccagggggaggcgcgtttcccatctcctgataggccgcgccgaggagagtctctccagtttgcggcactgttgtcatttccggggtaagatggctgcagtccgtatgctgagaacctggagcaggaatgcggggaagctggtaagcacgtttgggcagatctgaggccgggaaggagtgatttgtccggagtcatccaggagtggtgttttactttctcctccggtgccaggcgtccagggcacgcgtgatggagaggtgaagggatgcatgcaaaataaagggcagagaacggagcgagtcgaccagtctggagtggaaacccactccctccccttacctggaagcgcttctgcagcgactcagccgtcctgctccatctgtaccccgaggcccagctagcgttttattgagcgccttccaggtgcccaggcattgtgataggcgctgtggatccagagatatattcgtttagcatttattgcgtacccacagtatgccaaacactggtaacacgacccctaccctcaaggaatctacagtgtgtagaggaagaggccgttcaagttatagaatatcagcaggggtccctgcttccgaagaactgagcagctcggcgtcactcttttgccttgtacttctatgtccgcaccacatatcattcctacccttttgtcaccaaggctgtgacccatcaccatctcccctgcacttccttctctttctcccagtcttagcaccaagcactgacacataccggtaatgatacttgttacccctatttgcttagtgtttcttcttcctgcctcttctccctttccctagatgctcctgccttggtgaccccgatcttacaaaaactttcaagagcctgctatgtaccagtgctgtgttaggcactggagatacaaatatgaaatagacatcatatcttccttctcaagagattacaaccttgtggtggaggacaaaggagagggagacagatagaaattacaacccagcatgagaggtactgtgatgggacaagtgcctagaactacaggaacacacaggagtggacacctatggtggacttgggggtcagaggagttcccagaggatactgtatgacttgagatgtaagaaggataagtaagagataaccaggagaagagagctcttctcagcaacacttaacacatattggtctctcttctttctagagctttccattcttgttttctgtgacaccagtttcccaatattattctttcttcatctttggccacttcatcccaatatcctgtttcccttcccgccttttaaatattgctttttctaaagggctctgactttggccctctgcacttttcccactttctgggttatcccatccactctttggctttagttaccatctatgctgatgagtcctaaagttccccagtcttccaaccaggtctactccaaacccatatatcctactgtcctggaaatctccagtttcatatgtacgtgatgttttccagctgcaattaaaaacccaaccaataaataggaaattaagtatccatgcatacagagcatccccaattagatgtcagctcacattaagtggcttatgattatcaatgtcgtcatttccctagtagttcatttgtccttttcctactgtatacaagagggctgctacgacttctt

SEQ ID NO: 55290 - DNA, 1029 bp, Homo sapiens
taggcacaggaaaatagcaggaacaatataggtaagtctagccctcaaggcgcttatattctacaatagccctgtcaaatagaactttctgcattggggtatatgttccatatctatgctgtccaatatggtagtcactagccaaatgtgactattgagcacttaaaatgtggctagtgcagctggggagctgatttttaaattttatttaattttaatagtttcacatatctcaaggctaccacattgtatagtacagacaaaattttgttttttaatgtataaaattttacaaaatacagacctaaaatatttagacctttccatggattacatgtttggatatcattgacatgtcattttattgtaatatagagctttgtttttgtcatgcaatcagtttatgtgggcatttgttatacttttcataggggatattacccaaaagggggtggtgaagtgattgttcgaatgtcaccagttaaacaattgaaccctataaatttaactgagcgtggctgtgtgactaagatatatggaagagctttcgttgctggtgttttgccatttaaagtaagttgtttagatgttcttagaaataaaatatatgtgtgtcttgataaatattatgtcaactaaattttgaaattattgagagaacttaacatttttttaaggaaagaaataatgtcctttgtggcaatatggctgcagctggaggccattatcctaagcaaattaatgtgggaacagaaaaccaaataccacatgttctcataagtggaagctacgcattgaatacacatggacataaagatgggaacactggggactgctaatgggaggagggtggaagggggctgagggttgaaacactatcaggtactgtgttcactacctaggtgatgggatcattcatataccagatctcagcgacatgtaatttacccatgtaacaaacctgcacatgtacctcctgaacctaaaataaaagatgaaatatatgtattaatggatacattaattaac

SEQ ID NO: 55291 - DNA, 1452 bp, Homo sapiens
tgggaggcggatgttgcagtgagctgagatcacaccactgcactccagcctggcgacaaagcgagactccatctcaaaaaaaaccagactagaactattatgttaattcagttaggagttatagatttaagtattagtacaaattctttaactgatgtttttgaagtataaaagtaccatttttggatatttaagttccaaatcctctcattcagaatttccattaaaaggtttaaagtaaacgcttgctctacttatgataacactatctaaaaaccgtagaacaataccaaagtctctgcataacgacctttttatttaagataattctgaaacactttatagtactgtgtgcctgtgaaatggtaccacttagtgctaatgacatgttaacttgttggggggcatggtagacatttcttaacctgtgaattagaatctggtgtgacttctcctggtcaagtggtaaaggatactactggtctgattaagatagacaatgttaatcataccactctatatgaagaatttttacttttgcaatttgttgcccagatttagttctgcctatttaatagtcattgttctcttttgttgtatttgcataaatttggaacatttatagcaaaggtagtaataactttttttcttgcatagaattattgctgagacctccactggctgtttgtttgctggatcatcgcttggtaaacgaggtaagataaatgaagggggtccatagttcccaatgctactgcagaattctttaatccatcaggattggaatgttatagaatgatggatgaaagtttaaaaggatgtagttaattgattctcttttagagtcaattacactttcagactttcagtctttctcccacctttatactttggaaaatttcaaacctatggaaaagttgaatgactagttcaactagtcatccatacaaccttctcttagattcactagttatgaacatttagtttgttgtgtatatttctgagccatttcaatataagttgcaggtgccatgtctcacccctgaatactgcagcatatatgtccaaagagcaataactacataattataataccatttttacacctgaagaatttgttttattctgacacaccagatagcttcatacataatgaattgtttccaaaatattatttagagcgatgtggaatttttttttttgggggggggcacatagcatttgtttctcaagtctctttagtccctcttttaatacacaatcctcccattaccttttttgttgttgttcatttcatgatactgacatttttaagagtccaggccattttctcacagagtttcccacaatttaaatttgtctgattgtctcatgatatattcagattaaacatttttattaagaatactacataggtgattttgtgtacattccactgtatcacggcagggg

SEQ ID NO: 55292 - DNA, 1027 bp, Homo sapiens
tttattcattatattctttacttttcacagtactttacatatagtagatgcttacttgttatttgaaatgtatacataacggaaagtgctatgaacctgtgtatagcttgtatcttggtcagctttgttgtgtataactgggtgacttggggcaagtttcttatctttctttgtctcaatgcaaatagttatctgtaaaatcagacttaagctagataggcctgctatgctcctttcaggtctacatatttgtagttttaagtaggtttatgtataggctagaaatgattttcatagctgctacgtgtgtttcatatttacataatgcttgtaatttgaaaaatatataaacgcatgcatatattactaattaattaatatggttacctagctcagaattcagcatttattcattcaacagtaatttcaagtgtccactctgtgtcagtacattaccatgtaatgctgaaagtgaaagaatttttaaacattactattcattcagtaaggcccccaagtgatggttttcaaattgtgcttccaagaatcctaagattttaggcatatttgaaatccttttgccacaaacttaacctatttaattgttttgatttttttttttaagacgttgatgggagttgtgaggagtcttcctgtgttgcccaggccagcctcctgaactgaactcaaatgatccttccacctcagaatagctgggattataggtgtgcaccactgcacctggctagttgttttgattctaaatttagttttgttaaaatgaatcacatttgctttaaaaataatgatgttttcaaaatacagtgatataggccaggcacaatgactcatgcctgtaatcccagcgctttaggaagctgacgcaggaggatcacttcagcctaggagtttgagcctgggcaacaaagtgagaccctgcctatacaacagaattaaaaattagccaggcatggtggcatgtgcctgtggtcccagctacactggaggctgaggcaggaggatccct

SEQ ID NO: 55293 - DNA, 1628 bp, Homo sapiens
aagactggtgaagtatctccacagaacactcactaggaagaacccttctgcagtcctgctttgtcatatttcagttggagaatctgaacccagagaggtcgagtaccttgtccaagatcaaacccagctaatggagaaggactagaaccccgatccctaagtttctagctgggagctttatccagtcatatagcatgtcaccgagcactgctggtcttggtatattatactacatctaaaccataatagtctgcaaaaagattagaaacagcatgcagtgtggaagagtagaattttctatttagaaagcagtgttgtagtgtttcaaatacactagtcatacagtttcttttccaggtagcttctgagctttgattctggctaatggggctaacactgccaaaactttcgtgtaccaaccagggacaatggtggttgttctcatgtttactttggtgatgtccatggatgtgttggggtaggtctaagtgcaaggagtgatagggggataagagaagcaaggaatgatataaagtaggttgggctggtatcttaggacagagttttccaagctttattcactgtaattcaccataagaaacacattttacattgcagcctagtacacacacatacacacacgccattcacatgtataattgaaacaagaggttcatgaaacaattcttacaaggtgtaaagcatactgatattttatattctgttctattttatttaaaatatgtctttacccatcaaattgacttcactgctcactaatgggttgtaacctgcagactgcaaaacatagccattggagaatctacttactgtgcttagatccagaaggttcttgaatgttcttagggcattgatttttggcattgaatgagcaggtgattgtttgattgctctgcatctaggctagtttgcaattaacatgaatggcttaaggaaaactgaaagtattctgaagactgctctctctaaacatcaagatgcatacctgtctctggatggtttttattcagttggtacttgactttttgggaaaatctgagtttgttttaagccttcaaataatatgatttatcttttcttatctcactttcatttgaatcactgtgttacccttaaagccctctcatactcctcccttcttcctggcaaccaaaatgtgcattgattcagtttgggagaaccttgattgagaagcctgtagctaggtcaacgttgtgggccctgaggagccagcgctgagcctgccttactgggtctgtcattttagtatctcattgggcttagtttctaagtgtgggctgaaaagttatataatgtcccattcacctcaagacatcgaatcttaaaccttaggtttataagggttttcttgattgaataattttaatttatgtaaatttttatttcaagaaatgttttctatttgatagagtgagtaaaattgtggcctttcccctattttggaaagtgaataaattcattaaacccctcttcatgagcactttctgaaattttaaataaaagaagagctaaccgcttgcagtgagctgagatagcgccactgcactccagcctgggcaatagagctagactccgtctcaaaaaaa

SEQ ID NO: 55294 - DNA, 1041 bp, Homo sapiens
cagtgagccaagatcataccactgcactccagcctgggtgacagagtgagaccctgtttcaaagaaaaaaaaatctccttttagtggggttcggtagatgcatgggttcaatcttccatctttatcttctctctttctcccccagagaatacataacatgttcttgtgtcccttcactgttatagtattttcctgtgactacgtatgagccacatgccacgattaagccatttctttcttgtccagtctttgggacagattttgagaacctgttggcactatgtggctgtcatgaggattaaatgcgctatgcatataaattacctgacacagtaggtgctcaaaaaaggcatgccgtttccttctctcaatctggaggatatgactaaattctattgcattccttattagatttcaatttgtaaacttctctgtgccttttcagcctgtggtgactgacttgcctagttctgtcggatggcatgttaactttccctcccaactttggaggcctgcagatttgaccaccgggtcaccagagctctccttttagtcactggtaacaattgtggctgtgatggggtaggaggtatcatggaagcctcaccatactttgcagacattcagaaagaataggcctggaactttttctggtagcttacattagtgacattgtttagctgagtctaggggtgggaagacatacttgaaagaataagggatacctctacatcttgtaattttttttttttactttttttaaatataaagaaatttttacccccttttaaaaaacgtaaagcagtagtttttaatctagggtctgtggaagagaattcagagagtcagtgaacttagatgagaaaaaaattatatctttatttttactgaccttaccttatcaattataaagttacatccaattataaatgttgtaaataaactgtagtagcattagcaatataagtgacaatttaatatcacttacagttattatttcttaaaatatttatgctcattccttcctcaaaattgtagtgg

SEQ ID NO: 55295 - DNA, 1031 bp, Homo sapiens
aaaacaaagatccctccttttgaaatgagacataaatatttggaataattgaagtttcaggacttaagcattctgttaagttgctttgctaacttcctagttttatgttaggctttcgggatgctgaaactcagggatgatgaagttacatttcacttcatggcttagcagccataggttcaagtgaccttgaatggttgtaaaagttggttttatgttaattataccttaaagcccttaaaggtctattctccccttggaacgtcttctggccccttcctgatggctgccatatgtgcctttcactttgtctagataggtgtctgcctgctctgtttcttgggtcagcagtggaggctgggcagagagcctggagccttgaggtcaagtttcctacctcggacaccttggaacactgtagtgttaaagctctggtgccagttcttgcttaactgacctgaacttgatactttagttttatgttgcctaaagcaggtctgctaaattgctctaaaaacttaaataaagtatgaagcactcaattttcaccacggtaggttcccactccttttgaaggagtacttcatggtgcattagaagctctcgtggctcccagtggctcagaggagattgtttggaagcctgactacattttcctgttttctttcttttcttttcttttttgtaggggaaggatggcatttaatccatgaaaacacctgctaggttctgttggcctacatacattgtctctcctatcttttaagcttgtttttatcatattcctgacaggaggttattcctctgccagaatacctcttgcaatgatgaatgttttacttaatcaaacagttcaattcactgttaataataagaatagtcataatatttatgaagtgcttcctatgtaccagccactatatgaaggactttacatattttaaaaaacataatctgacaacagtcctatgagtgatagctgctatcattaacttcatttcacagatgaggagaccaagattcagcataga

SEQ ID NO: 55296 - DNA, 1048 bp, Homo sapiens
tgaatttgtaccttttatttatttatttttgaggcggtgtctagctcttttgtccaggctgaaatgcagtggcacaatctcggatcactgcaacctctgcctccccaggctcaagctatcctcccacctcagcctcccaagcagctggaattacaggtgcatgccaccatgtctggctaatttttttttttttttaaagacaggatttcaccatgttgcccaggctggtcttgaactcctgagctcaagtgatcctcttgcctcggcctcccaaagtgctgggattacaggcatgagccaccatgccaagcccccttataatatttttggttgtataaattttattttgaaatatggctgaatttacttagttctaaaagttcactgaatttttttttccccatggcatcattacaagacttttgattaatgtcttgactgctcaaaatgcaggcaaaggctatctccaagctggtttgcgctgtaaggagatgttgaagcagagtaggataaggaggagtctagaagtcattaactttttctgaaagatgagaagcctgtacaatgtgagtaggttcaacattctcggaaggtgaactcatccgttgggtttccccagaggagtaatacaatttatctctatccttagtaagataaggacagccctcacatttggggccctagtctagaatagggctgtttggatattctgtttccatgttaaatgcaacatatctgaaaagaaactgatcatcttttacccaaacatggtcctctgctttgtgtgtgttaccacattgccatcctactgagcacccagcctcaaggctagaaacattgctgttttcctccctaacctagtgagtattcggatcacttctactggtgccacaggatgtattaattatatctgtctttcctctctgttctcacttccttccctctgactcaggtctcacgtcttttcctgtggacctttcattttaatagttctctaactgagcacggcccttctcctcccaggctgccttacacacacctgagtgat

SEQ ID NO: 55297 - DNA, 1053 bp, Homo sapiens
aatgatcagagagatgaagagtatgaagtcaatgatgacgcaaaagcatgaataagtaacgtgttcattaagcaagaaataagagggtaaaaacgttttctgttaggttttcacctgtcaaaaatgactgaacaagttaaagtgattgtattcttttaaaggtgaaaagtcaatcagtgctttttagagaatgttaattccaaatctctgactttagaaaggctggtttgtcatatcctcctagtccttgaggaccaaaatatgtccaggtgcttgattgccatgtcttaaacaagcagccctcttattcactggcagtaagagagatgtttattagcatccttttgagttgttgatgaatttacttattggctgacctctcctttgttacagtctgaaattttatatttaaacttttaaaggatataaagctctctatttgcaaaacaaccatcaggtgtttttcttctatttaaagctgaagttcttaaaccaaaaataccattctgaatcccaaatgtgtcttctatcaaacatcctcaaggttcttaaaatgatgtaaaaatacatctttttgtttttgagccaactctggactcaatgtcctccgagacaacctttagaagtataaaggtggagtcaggctgcttttacaacttggttgattctatttattgaacatttgctgtgtgaatgttcccctgaccttgggtatcattatctatctgtgatagataacctatatcacagatagatagatctatctgtgacagataacctatatcacagatagatctatctgtgacctcggggatcatcatctgttaaagctttcattcattataaagggatcattgagggactagtgtggggctcccacggggattttcagctcacggagatcctttatttatggggctcaatatggcattgtttttgttttacatttccttctgagacagagagaactcacataaagcctaaatctggctcttgcaggaagttttggctctgtaaagcagagcttccattttgaatgaggttatctttatg

SEQ ID NO: 55298 - DNA, 1038 bp, Homo sapiens
gagtagattgttttaaagataactttttcttgtcgttttgttttgttttgttttttatacagaaaacaagcatcgttgtgggtccaaggagacattttccgatccaaactgaaaaatcgaccatccagtgaaggaagtattaataaaattctttctggcctagatgatatgtctattggtggaaatctttcaaaaacacaaaacatggaacgatttggagaggtaagttttccctaggagattctatcttcttaaaactgatgttctgcatttgtttctcagttggacctatataacatagcagtgtcttttctctggatgccacgagtaccaagtttttagaagtagagccatccgtctatatagcaagaagcagaggaaagaaaccaattgcccttaaaaaaaaaaaagctataatttaaggagtaaattataaaggaggctactctggtaaggggtaatatttatagaaaggaaacagaaaagcaaactttctatttgaaaattaaaataaatatcaagaagaaaaattttaatgtgacaattgaggaaataatacataccacaagtggtgctttgaaagcctcaaattcatgctgatttctaaagtaagtgccaacttgaaaacatgattagggcacttttttaaaaaaaaattaaggctctactgtaaacaaaccacggtaaatagttgatatatattgtctgattaatattcataactacctggtgagttaggtaatactatctctattttataggaaggaaattgcatatcagagatgttctaacctcagtgtcaaacatggttcaatccatgtctgtctgagtccaagcttgtgtttttttatatcacaccctgttacctctgaataaaaatagaagtgatttactaagaattaggattatgagcatttttggaactagaaacaacgttgaaacaccatttgtttggttccactattgtagagacaagaaactggggtcccagaaaatttgtgatttgtgtaaagttccagggttgtttagtagtggggc

SEQ ID NO: 55299 - DNA, 1047 bp, Homo sapiens
tggtcctctttctattttttcccaatcagcatgcatttgttcccctcctttattttctagtcttattttcttctctaccttccttttcaagaggaaacactagttttgttctgtggaaaaatgtcccctgaaacctccgggagtggtaccacgatctggtgtggcactcagtgagagcagcagagatgtttggccaagagtgttgatgaaataggggaaagaagctcttcacctgctggttcttattcattcttaggtttaggactgtttagtgagggcagttcaaagagggcttaagcatctggagcttctggagaagcttgaattgcttctttgtagaactttttccatttttattttggaggcaaaacatgagcttaagctgctgtttggtgggtggataatgaaggaaagagtctacaagtaaataagcttttctctagcagagaggaaaacagagttcagctatattaaatgatttatctaggatcaaacagatttggtattaagattatgactgggccctggctctccagatttgagtcagtttttcctttttgtccacttggcaaatatttattgagcacctgctcagaatccagcattgtgctagccactgggaattgaaatgagagagaagtctttgccctcaaggagcttacatcaggtaacggagatagacaaatatcagatgacgcaatatggtataagagctatgatttactatgagaatatatgatgaaacatatattgcttgggaactcagagaaggcttgcttgatgaggtaacagctgattggaccattaaaggctaagtgtgatagaagtgggtcaaatggacatggaagataagaggtagaggatgggaaggagatgagaaaatgccatggcagggaaatagtctgtgcaaactggacaaacgtgtggacgctacccattcagggaactcaaggcattcttatgtagctggaatagagatgtccaatgggaaagtgtggaaagaaggacctgtccagattttggaggggctgcatatgccaagccaaa

SEQ ID NO: 55300 - DNA, 1084 bp, Homo sapiens
ttaaaagctacaattagcatctcttttgaaagctgcaattgctcactcactttttgcagcagttcagcccccagaaaaatgtaaaaatgatttccttattctgtcattaaatcgtttaacacagaaaacaagaacaaatgttaaggattccttatggttgtgacagaatgctgaggaacagtcagattttatttttattaatttgtcctcttttgctagtcttgcagtttctactgccctgtgcaatgcacacacacaaggttacatttttgttgacccacttactgtaaaaaatgagtttcactccctgacactcagaggagttttcaaatgcttaagaaatgagggacatgtgattatggtgtaggtggggtggaagtattttattaaattgaaattacttgtggtatctgtcttgaatatttgctatgctttatttttatgacacttaatcactggattactagtcatctacattgaccttacctgacccccaactctgagttagttcatgttgcttctcccataagcctctctacatcccaccttggtctaaatcagaatactctttttcactcagaatttgcataatccactagactatatgctttgtgagggcagggatggtgcctctggtttttatagttatgtgccctgtgcatggcatatattaggcactcattaagtatttgttgattggataaaatgatggatggttaaatgaatgaatgctctgtagctttaataataaaactatacaaataagtgaaacttattatagcctgtaataagctttgttatgcactcttctatcttaatcttcaaacatttgcagggatattctcatagtgaaggttgtaggtaatgtcagtggtgccattgtctcttggaatttttcctttcttctccattcagttgcttcctcatccctgttgtgtttgagtctttgatgatcttcctaacttgtctctttccacctttaattcttactttaaagtagggttggcaaactttttctgtaaagggccagatagtaaagatttttagctttgtgtcccaactattcaactcaatacataaacga

SEQ ID NO: 55301 - DNA, 1107 bp, Homo sapiens
ctgctggccttcttgttggctctgcccgatcatctaggcctttcagtctagaaacagaccttaatgacccaggcttccatctcttggtgagctcctcccaggctttcttctcaggcagggatgtggctccatctcagccctggcccgagggcaatggtcccaatttctctcagcctccttccccatgtgggagagcctgactccacccctgatttcaggccaggggctttcgacctatgtacccacatgaatggaacacccagccacttctgcaggcttccagctgtgtagccagagtcccaccactgtcttgattgtttctgggtcacaaagatgttgatcttgcttttaatttctgctgtgccctttctttcttcttcatctttaaaaaatatttaatgcatgcatccagagggtagtttggagtgtaccatctcgacatgaagtaggtccagtctctgcagcttgctgtttagtgcctttttcagctttccccaaccagctttccaaactcatatccctccactcctgagcatgaaccttctgcttctgccaggcagtttcttatgtccttgaacgtgcatggctcctcctacctctgtgcttttcttacatgctatgtccccaacttggtctcccttcctccctccctttgcttctcacctcctttccatcaggagttgggctaagtctaacctcctcctctgtgaagccttccttaatctcaccagaccatagcaatcatgatgttttttgaagtcattctgtttgtattggttattggccttcctcatccctcttttgtgttgagagtcacctatcttgtggatgtgggccttgaatccccactgaattccttgattgaggttagaaaatgtcttttatttttgttatctccaaagcatctggcattgagctatgcttacctgtttgattgtgggtatactcagtccatacttgcatcttttctaatactgtgtaggtcatttgtttcttccaaaaatttgaattttactgtgtgtgcacatgtgtgtcagatctttaacttagaaaggcatatttttattgcaccttcctcttacacacacatacacatacatgtggatg

SEQ ID NO: 55302 - DNA, 1035 bp, Homo sapiens
aaccgagaaaaagcaggtagaaaaatgtttatgctctaattgcgagtgtggtagctggcgtccctcaagtggaatgtatatgggcttcaaggcttttgaccaacttcactggactttcttagggtcttacctcttttattcgcactgtgggttcaggtatatttatagtatagtgctctgattcttgatcatctcacacctattttgaagtattagcatgaaccacatacaagaaagtcaatagccaaaccttttccattcttcctacagctcttgaaactggcagccttgagaaccacccatttcccttactacctctcacctaagcctttcctggtgcacgatgttaactttacactatgtatattactatttaatgtcgacaccgctgtcttttcatttcacatctgttatgacattgtggctttcgccctttgcggtcagggaccataactctttgacatactgtgttaacagggacttactcaggaacagccatttggctgttcatggggtgtaaaattcactgcagttttgaagctgagaaaagatagcttgaatccttttgtaagttctttggaaaatggacagattcttttttactgataacctatatcatcaccaaaatggacctgtcttataattgactagacctgttaatgaaatgttacagactaatttgagaaataattattgggtgggagaaaagggcatttactagaaaatcaagtaaactttgttatcctcaggtatttaattggaagaattgagcaaaaaatttgttaatgtttagattgatttatgttcctttttctaatcactgtttcctgctaaaaaaaataactgtttggcaaactttctgtaactctctatcttttcctggtttatgtctgttgtcccaggcattctgattacatatcccaatcacaatccttttatatgttagtatctaatgtgatgtggaagaatttgtatggtttacttgaaaattgcctattgtttattaaattccgacagcaagactcttctgcataa

SEQ ID NO: 55303 - DNA, 1055 bp, Homo sapiens
ttgtgatgccatttgacctgtaaacatatcagaacacagatttatgaagttacctggagctagataaaactgaaatgtagaaaccaggaataaggaagagttgacaaatcagtttcattctctctgtaataaatcattgcctttttcactatgtcttctctaaaaatatgtgacattttattgttctttttccctcttttcagcaatttcctgatcaaattgtaggatttgttcctagaaagcacgtctctacttcatcaggtatctacagttatggaagttttgaaatgcaagcaccagggtctggaaatggtgaccagtactctatggtgctgattggagcctcattcttcaatagcaaatatcttgaattatttcagaggcaacctgcagctgtccatgctttgatagatgatactcaaaactgtgatgatattgccatgaattttatcattgccaagcatattggcaagacttcagggatatttgtgaagcctgtaaacatggacaatttggaaaaagaaaccaacagtggctattctggaatgtggcatcgagctgagcacgctctgcagaggtcttattgtataaataagcttgttaatatctatgatagcatgcccttaagatactccaacattatgatttcccagtttggttttccatatgccaactacaaaagaaaaatataaaagtaaaacaaacaaaaacaaacctgaaaactgcttggcatttgagtagcttctccatgctatgtatttttttaagcaacatcatgaattttatctactccagaagtctctacaatagaaaaaaaagtgcagtgcttctaggatataaaattcacattacttttgaaagccaagaagttggtcttatccagttaggtcttcttatgaagagttttcatccagggatataactccttggtcagtgattttattgtttacatcctgagactgttctacagtttctttgactcctggcatttgccttaaggacctatagcaagctgtttctaggatcagaaactcaagagaggcatttctctgctt

SEQ ID NO: 55304 - DNA, 1031 bp, Homo sapiens
cttttgtctgcaactgcgtaacaagcagggcaagaaggaagggaatattaaactggttttttaaaatctcttaggccaaattaccttattgaggaggaagggagaactgaatttgaatcaactaaaataagattgatatctttcctcattggaaaaaaacatgaaaacacagggactcgtaagaatgctaacatttgtatgttgtttccatttctactccaggtgttgccacatctgcaaacttcctgggagagtaatggggattcgagtgcttcgattatctttggtggtcatcctcgtattattactggtagctggtgctttgactgccttacttcccagtgttaaagaagacaagatgctcatgttgcgtagggaaataaaatcccagggcaagtccaccatggactcctttactctcataatgcagacgtacaacagaacagatctcttattgaaacttttaaatcattatcaggctgtaccaaatctgcacaaagtgattgtggtatggaacaatattggagagaaggcaccagatgaattatggaattctctagggccccaccctatccctgtgatcttcaaacaacagacagcaaacaggatgagaaatcgactccaggtctttcctgaactggaaaccaatggtgagttgcagtgtagttctcagcctggaaaggctgccgctgtccagagctgggacagacatgtgaatttctggccttctgcttaaccgtctggagaaaaatgaaggaagttagtcctaagaaagcactttggaaagcttgagggacaatttccaagatgtcaagaagtggtttcctggcgaagaggttaatattgtaataaaggatatgctataattacatatgattgcattacagttgatagtaagatgccatttagcttatgcttaatatatttttttgccactcctcttttcctcccattcctgacagtttcatgaggttgcaatttgcttaaaagaatcttggctttattcatttataggcccaatagtttctagg

SEQ ID NO: 55305 - DNA, 1023 bp, Homo sapiens
cttccctcaagatacgttaagactgaaaaaaacagcaaaagaacagtcgatagttgaaatacctgaaaacaaggactagaaacacagtaatcagagttcactggaatactcagggtggagagtggtgagggaaacatttataggagatgtgatatttgaaagagatttgaggggcagggagtaagagtttgtcagatagaagggttttggaagtagagaaaatagcatgtaccaatacatggagtcgtggatcggctcactgtatgtaggtaccattgaggggaaatgtctttttggaatttggcaccacatgcgcctttgccttagtttaaacagtgttggttatctgcatgccataaacctggtcagaaactggtcattggttgtagagccgtctcttccaattttctttttgcatcttcttacgtgcatcagctcaggttctgcattggcctctgtattcaaccttggaatgattttatctcttggcagctgaggccccttttctgagcatctacattctatattcatcagtttataggcaagtaaatattctagaagatgagccagaggagaaacaatctggacagtatgaggcaaatctcgtagtgaaatggcagaatagttatcgttctgctgccatctgtggcagcaaaataaaaatgacagcttctcattgtacaacaccacgttgctcattgcttttctaccttatgagtcagagaacataatctttgttcatgctgtgcactggcatgtttgttttcagcttctctctggataattattgctttccagtctgaaggaactagccttgaggaaagaatccttcaacggtgtttcttctagggaactttgatagattatgtagtaagtaactctatagcagatctttggaaattcaaattgcctggtccatttaaagacatccatgacagaatttgtactgttatttaatatactatatattatttactttcttattctatgtccacatttaagaaaattacttgtaatttcaaa

SEQ ID NO: 55306 - DNA, 1008 bp, Homo sapiens
ctaagccattccttttgccctttcaatatgtcgtattggaaaatcaaaaatgattcttcaactctgttcaaatggtatcttgcaagtcaccaatcagaattcttaattcctttgtatgttacaagattaaatcggtttataagatcataaaatacatatactattgaacatttttaaactaaaaaatggatttctaccctgaacttttaaatatgtttttatatctctcctaccaactaattgcattaggttagctatgcagactctatgggtggaaaaaccccagctgctcagacgtgtgactgaggattctgagaaatgaaagcagagagaattaaggggcagaagctcatttcagtcatggtttcagctccttttgggcaatggtcagcaaggaataggaaagatgctatctgtcattcctcagtaatcaaccctggcatttatctgcaaccctgtttgacccttttagatgcttcaaattgagcgccctgggaactgctggttaaaaaaggagttgtaaaggtacataagaatacaaattcatataaatctagaaactggatacaagtgcaaattgctgacatgttcaaatgttttgctccatggcatacatcctctggtttcaaatgtgtaacattagatagttgggatcgtgtgcatttattttgcttctggatccttatattagggttctctggagggacagaactaggatagttctggtaggatagatgcgtatatgaaaatgagtttattaaaaagaactgactcaaacaatcacaatgtgaagtcctacaataggccatctgcaagttgaggagcaacaaagccagtagtggctcaatcagagtcccaaaacctcaaaggtagggaagccgacactgccgccttcagtctgtggccaaagacctgagagcccctgacaaaccactggtgtaagtctaagagtctaacagtcaaagaacttggagcctgatgttcgagggcaagaagcatccagtacag

SEQ ID NO: 55307 - DNA, 1061 bp, Homo sapiens
gcctccctcctttcctgtcccaggacgcgttgcgcggcccgggccggaagtaagcgaattcccgggtgtgtgtctgtgtctgtctgtgtctcgcagcggcgcgcggccccggacaagcgctggggattcccgtttgaggcgtcactactgtcactgccatcaccccacggagccacttctagaggggagtagacccggcccttcgccgggcagagaagatgttgcccctgtccatcaaagacgatgaatacaaaccacccaagttcaatttgttcggcaagatctcgggctggtttaggtgcggggtgctgtgtttgcggggagggggtgtccggcagaaagggagaaggcccagacctcaggatggcccgaggtccagtgagggagagtcaaaaactccccgtcaacccctagctgtgaagaaaggagcatgtgaactgggagggtcttgaagagggtacccagcctcggggtcccggcacctccttaactctcccggctcttttccacgtgtatcattcccaggtctatactgtccgacaagacttcccggaacctgtttttcttcctgtgcctgaacctctctttcgcttttgtggaactactctacggcatctggagcaactggtaaccaaaggggaaaatggtttgggcggaagctgggtgtgagggagacgaagcactgtttgcttaatgccacgtagctcctcactaggaggttcaggtcctacctttgttacctacctctgctgctgagttgctttctcatacccacaccaatctggtagggctacagttcttgagtaagatctgggcctatcctgtgcaacctctcttgtcacgctcccctccagttccatcagacaagactgacaagcccctccttattttagcagatgggcagaatctttcatttctaattgtaggccttaggtttacccactttgttggaattgggagaaacttgtttgctgcctctctcgggggggagtggcatttggatttcacccttaagattctgagagagtatatctgagatgttctacttagtttgttattgg

SEQ ID NO: 55308 - DNA, 1036 bp, Homo sapiens
gcctggtatcaaaagggtggagcaggatactcaacaaaagcagacctttgctttgtaagatcctgggtgcaagcaggtatcagcctcgtcccagtagtagatggctttttttttcctacctctctttcagtggcagctgacctttgcaagtgaccaaggagtggtcacattcctacccctcacccagcagcagatggtttttgtttctacctctctcgcagcagctgggcttttccttgtgcaggaggtacgagggtttactttttagatatttaaaacttatcctcaaagctatctatatagcatatttaaattgttgttttagatggttaattcctgatgaacaaaggctgaatcttagactttcagagaaagatgcctactgtttggtttttattataatttgtcaatgtgtttgttcttttccagcttaggcttgatttccgactcttttcacatgtttttcgatagcactgccattttggctggactggcagcttctgttatttcaaaatggagagataatgatgctttctcctatgggtaagactttaagaaaaaaaatctttttattgaagtataagatatacacaaaaaaacactaatcttaagctcagtgacttgttaccaattgaacacaggtgtaacttttgaatctttgaagcccccactcaggcctcttcgagttcctacctccccaagggtaaccactttcatgacttcatggatgagtttttgaatagtatataattggaatctacagtaatttgttgagattgttaccatatagaggaatttctcaacttttttttgaagaagaaagttttagtatatgaaaataggatttttttttgcttttgcttttttctttttgaatggatactttgctgttgatttatttaaaatcattttctaatatggttttatattatgttctttagctctgcttttatgtaacagttcttatatgcttgccgagttggacaattaatcaaatatttgtagagcatctgtatgctgaagggactacattgga

SEQ ID NO: 55309 - DNA, 1523 bp, Homo sapiens
gcctacagttgggcaaaatcatctaacacaaagcctattttataataaagtgttgaatatctcatgtaatttatttaatacagtccactgtagagtacagtatcagttgtttacccttgtgattgcttggctgactgggagctgccgcctgctgttgctgcccagcatcatgagagatgatcatagcacattattgccagcccaggaaaagatcaaaattcaaaatttgaagtatagtttctactgaatgcatactgctttcacaccatcatgaagccaaagtcataagttgatcattttaagtcgaggactgtctgtaggagtatgtttgcttttacaggattattatgtagtttttccaagaataatatttaatatgtttttatgttgtgggaaaatttagagctaaagatttaatgcaaagtgagaactccataatatttgtaggccatcaatagctaatacatgtgtaaaattgtatattacaaagttttacatgccagagaaaatcctgtctatgaattatagtaatttttttttgttttgttttgtttttgtgggtggggcggtaggttattaatcaatctctggctctgagtttccatttagactttattgtcagggtttcctaattcccagctatctacttgcctttattaacttttgacttcagtctgactttctgaatggcttctgatccaatctcaactgcacctatttgtcttcactatttctttatataactctcgttttttattttttcactgtgaatatattccttcatactgagaaatttattttcagaaggcttaaatgtgtcttccaatcacaggttttccatttacaaaagatatggaattgttttagaataacatttgctgaaataacatataatcatgcatatatgatgcatctatatcaagtactataaattagccttgataataagaatttaattttgaaagtcatcacaagttggaggaaaggaagttagatttgcctttctaattctcttttatataagttattgtgaaaataaatttatattttctgaatatttatcaatttatggtggctgaagagcccagtaaatagctgaagaacagagaaaactacctggcattaaaaacttcttgtaaaatgaccaggtagatagatactcatacatgaaaaacttgaattaattatgtttttcaattatatgctacatcttgactcctggcttactaaggttttggggggttaggttatcagtatcctaccacatcttctaaggcttttaactttgtataagttaaacatcctagtttatgtttctttcttagtgatttttttcttaaacagtttatgtagtaagaaggctttaggtagttttaatgacacttactaataaaaccagttttcaggttagcaaataaatggtagccagggactttccagtctaaggaaaatcaagaacaaatcattattttcttacaaatcattattttctttttcttttcatgtttagagttattttcatt

SEQ ID NO: 55310 - DNA, 1005 bp, Homo sapiens
atttaaaaatttacatatacactgtatatgtcttgactggactgtttttattttttcattgtgattttactgtcaggaacttttttgtaatgataactaagatctgctagaggccagactcaagatttttatagcttgtagtttgttagaatagatttttttttttttttttttttttttttttttgagacggagtctcgctgtcgcccaggctggagtgcagtggcgcaatctcggctcactgcaggctccgccccctggggttcacgccattctcctgcctcagcctcccgagtagctgggactacaggcgcccgccacctcgcccggctaattttttgtatttttagtagagacggggtttcaccgtgttagccaggatggtctcgatctcctgacctcgtgatccgcccgcctcggcctcccaaagtgctgggattacaggcgtgagccaccgcgcccagcctagaatagatttaataaagtatgatgaaatcataatgtaagatgagtcataaatggagatttttttttaaagtttctgcctaaaaaaataggatatacattttaaacatacagattattttttaattttttcaaattatttgaacagggaaataactctgctatataaaagtctgttataagctcagcacagtgctttacaactataattccagcattttgggaggctgagacaggaggattgtttgaggccaggagtataagaccagcctgggcaacatggtgaaaccatgtttctacaaaaaatttaaaaattagctgggcatggtggttgtgtacctatagttgcagctacttgggatgctgaggccggaggatctcttgaacccaggagtttgaggctgcagatagctatgatggtgccactgcattccagcctgggtgacagagtgagatcctgtctctatataaaaaggaaaataaaaggatttcgtaaagtttgaaatgccttttcttcttctttggaaatcttactgtacc

SEQ ID NO: 55311 - DNA, 1072 bp, Homo sapiens
gatcttattgtcgtaagaaaagcttgtcagaggaagaacattctagtctaggtatcagttggtagaaaagccttgtggtaaaagcagctttgatactgaaaggaggccagcatggctgaagcatagggagtaagaggagagtggtttgagataaagttggagaaataggctggggaagactacctagggttaggagtttggattttattccaagtgcaatgggacacaataaggatatttgttttaaaaaatgattttggctgctgtgtggataatagattataagggggcacaagtgagaacaggcagaccagctagaaggctattatttaaagtggaccaggtgagaggccatggtggcttggtcttaggtactaaccttagaaatggagagacacagaaaagttagaaaatgctttggggtacagctaacaagatttgcttgagaatataaatgtgtgggtcagggttgagtgaaagaggggaattaaggatagtttctagagtttttaatctgggcaactgagtgaatgaggtgtcattactaaaagagaggggactgggagaaaggtaatgtttttatttttaaagaggactgtagataaaaaattctgttttggatataagtttgagatctctcagacattgatatggagagttcaaatagacaaagagtgtacaaataggcattcttgggagcaatcaactgaacagaaagggttgaaaatagtccacacctggatttaaagtcatggagtggttggtattcatctggcattggaattcatctagcatgaatgccacaattcccaccccttctgttttcctggaagatatccctcagtatggtactcctgcctgctaaaactgatttagcgtcaggggccctttcaatatagtgcttcaagcaaccacaaccagtcaactacagtaggcttccaaggtaaaacttatttgtcatccttgtctaggtcctactgacctacttataaacttctctgtaacttacatagatacatagtttcaggtcatatgattggatttctttttgttattgttaagctttgatatt

SEQ ID NO: 55312 - DNA, 1635 bp, Homo sapiens
ttagactttaaaaaagcataagttttttaatgaaagtcagttaaaaagtagctccaaagtacaaaataaagaaattctagttcagcatttttttcatttaaaaaagaaaacaaactgaatttatttaaatgtacacctgataaagaactatttgcaaggagatcactctgagatgtttttcaaattggtaaaaatttgcctgattttaggaaatagtgaaaactcttaaaaaatcaactaaatagagtataaagaagtatttttccctaccattaatttttatatattcagtatttgcagttcatcaatagcaagagaaatagtggcacttcttttaaattctctgggtctactgctgctcagttgaaaacgtgccatggaaatatatgtctatcccttctagcttgcccagcgttccattttcacttccacagtgaaagttatttcttagaaaaagacaggtttttttttttcaacattttctacacagacaaagggtgataataaattttggggtaaaactgagttgtattgtgatgaattttgttttgcaatgaaaaacaggagaatgaatataatgtaagagtgtgattttttattttctgaaaatatgattcctataagagctttcagagtagttctgctccttttttccctaaggtgagttgggatagaagatgaattcataacttagaatgcagaaatctgaacaattagttgtagctttgaatctcactgcagtttagagacgaggcaatttacatagatctgtagcttgatttttttttattcacttaaatgaaagggttacctatgcatgatggataattataaaactaagcaggatatagaaatatactttgttactggtgtgatatttctgaagccttgctagatttttttaaaaaaatcaattttctgcaactcaccagttaccatcttgtggtgctttgtacttttatatacatatatatatacataccacaaaatcatttgtaagtacaaagaaaagctttttaaccaaaaacaagtctttttgttaggtctaaaattttaaaatagcagcttaattttagaggaaacaaatttttagaggcaaactgaggtacagactttagaaatgataaataatggtctgtataaaatagaatgtatactaatggaaacaaaattataaacttgaaattctaaattataagaaatcatcattgttcatgaatataggatttagaccctgtactgattttgataaatcttgttgatttcatatttaaatagaaagagttgaatagaataaatttgtggcctgtattaagcaaaaagtaagcatttttttttttaatatgtagaaagttaccatatgacaaattctggagattttacttttttcaaaattgtttttgggtgttccctaacaatttcctttgtggtttgcctttcaagtggttataatttgtgaactattacttttggggactaagataaacagtttaccaagattttaacttgctgcttgtatatgtgcccatattgtaaaattgaacatatgggaacattattgcatagttattgtattctttaatcatgcataaaaccatcatagtaagaacatttataaaaactgattagtctaac

SEQ ID NO: 55313 - DNA, 1058 bp, Homo sapiens
acatgcatataatctaaatgttttcatataattttgaaaagaaacactggaagaataaatcaaaagcaaatatagttaccttttcggcagaggaaagggattagaagtgagactttgaattttcattttattttatttatatattttttcgagacagggtctggctctgtcacccaggctagagtgagggcagtggcacagtctctgcagcatctgcctcctggcctcaagccatcctcctacttcagcctcccaagtagctaggactacaggtgcacaccaccacgcctggctaatttttgtagagatggggttttgccatgttgtccaggctggtctcaaactcctggactcaagaaatccaccctcctcagtctcccaaagtgctgggattataggtgtgagacaccatacccagacagaatatgtttttaaaatatttttgactttggaatcatccacatatttagcccttcaaagaaaagtaagtcaaaaacgtgaaaagcatattgagattttttaacttactagctgcaaaaagaaaaaaaaattggctccttttggttctttagtttttttatttatttattttttattttgttatactttaagttctagggtacatgtgcacaatttgcaggtttgttaaataggtatgcatgtgccatgttggtttgctgcacccatcaactcctcatttacattaggtatttctcctaatgctatccctccccccaccccctactccccggtgtatatgtgccacaatttcttaatacagtctatcattgatggacatttgggttggttccaagtctgctattgtgaatagtgccacaataaacatacgtgtgcatgtgtctttatagtagcatgatttataatcctttgtgggatcactgggtcaagtggtatttctagttctagatccttgaggaatcgccacagtcttccacaatggttgaactaatttacactcccaccaacagtgtaaaagcgttcctatttctccacaacctctccaacatctgttgtttcctgactttttaatgatcgcc

SEQ ID NO: 55314 - DNA, 1049 bp, Homo sapiens
ggagtctgtagagacagtaggccttactgagctgcggtgggcccctcccagtttgagcttcctggctgttttgtttacctactcaagcctcagcaatacagatgcccctcccccagccaggctgcagcattgcaggtcgatctcagactgctgcactagcagtgagcaaggctctgtgggtatgggacccactaagccaggcatgagagagaatctcctggtctgccggttgctcagaccatgggaaaagtgcagtatgtaggtgggagtgtccccttttcccaggtacagtctgtcatggcttcccttggctaggaaagggaaatcccccaaccccttgcacttcctgggtgaggtgatgccccaccctgcttcagctcgctctctgcagggtgcacccactgtccaaccaggccctgtgagatgaaccaggtacttcagttggaaatgcaggaatcacccgtcttctgcgtcgatcacgctgggagctgcagtggttctttagttttaatggtcactcttaatctgtatgttaatttcaaactctccaccactgggtatagcctgcccttaaattaatctgttgttttgcttaattaatcctttggaaacatgaattccagtcatacctcagcaactaaatattttaatatggttagcatccagtgtaagtagcaattaacttactttgagatattcaataaaaaatatattctcacagtgttatttaaaattttgtattttaggtaatcagttaaataagagttctttttctttgtttttatttcacaatttaggtttacttaaacatgtaactttggaagtcagcatggagtttgggcccagaatggaaattgggtgtcagagatttgtttttggtcatgtcatttgactgtaccagtcagctctatgatggcagaaaactttcacattgttttctatcactgcctcttgccaaggtccactggggttatttttactgttgatgttttcctgagcttttgcatttttttctgtgggctggtccttttatacactttaaaaatcag

SEQ ID NO: 55315 - DNA, 1039 bp, Homo sapiens
ttcattgaggcatttactgttgctggaaatgtttcccctttttccagatgttttacttactgtgactttactttctttactttactttcttttcttaactgctaatgattccatatattatttaagatttagtattgatccctagccttagatatacttttaaaatttatgaattaattatgtttaacagattcagctacaaattctgttccataaacatttatttgccaaacaccatctgagatgctgggtttacaaacataaataagataattcctaccttaaagcagctttctggttagagggagggggaaacacaatctggtaattatcacgcaatgtagtaatagtataggtagcacagatttttttcataggaacacagagaagacacttcatacagtgtagaagacagtttgggatcaggaaatataccctaaaagaggtgacacttgaaattttaaagaaggagtgtaagactatagggcagcttagggacattctaagcagaagttatagtttgagcaaaaccatgaaagtaataaacagcataaggtaaagtacaagtatgttatatttggagagtttaaaatatgaagcaaggattaataggaggtgaaggtagaggggccagatccaaaaatatactgtgttaaagagccagcacttaattccctaggcagtggggagcttttgacacatttcttagtggtaaagggatagggtcacatacctattttatgtagattagtctaacgtctctataaaatatggttgtattagttatctgtggatacataatgaagtacccaaaaacctagtagctaaaataatacacattattatcttatacgttctgtggtttaggaacctgggcatagctaactatgttgcctggctcaggatctctcacaaggcagtaatcaaggtagcagccggggctgcagttattccaaggttcatttgggggagaatctacttctgagctcactcaagtggttactgacaggattatgttccttttgggctgttgaactga

SEQ ID NO: 55316 - DNA, 1001 bp, Homo sapiens
caagatcacttagggttttgggtcatagatttagatttaattctaactcagtgggaagcattggaaagcttttaggcaatagaagtgtcataaatcctatgtttttaagagattattgtgttttctatgaagagaacatattctagcgaggatgaaagcaaagaaaaccagttatgaagttattgtcctctaaatgaaaaacaatggtggtttagattacagttgtaacggtgaagataaatattcttcttcacatttgggatatgtttttgggagtggattatattagcagaggggagagaaagtgttggcttattacttggtagatggtaatgccacttactgagactgaggccttgttggtacaggtttgaggatggaaaatctccccaaatgaagagttctattctggatatgttaaaatggaaatggctactatacttctaggagaaatgttacttaagtagttggatatgaaaatcttgagttttgggtacagattaggaccagaaagagttataagtcatcaatatatgaataacatctaaaacatcaagattgtatttattacctccggagaagttctagttctactcttttagctctgctttcaactctaaatttggagcataggtgagaaagccaggaaaggtagtggttagtggtgtgctggaaaaccagaagagtgtaggatcacagagttgaagaaggaggaagtaattaactgtgttgaatatttctgtggggtcaaggagggtaaaaacaagaagtgatcattgactggcattctggatgccattactgaccttgttaagagcaatttcattggagtgttggagaggggagcatgatttgagtggattaaggagaaaatgaatggagaagtgacaactcctttaagaagtgttgttaaagggggcagagaaatgagttgatagcggatatggatgtactatcaggaaagagggtattttttgtttttaaagtaggatgtttagaac

SEQ ID NO: 55317 - DNA, 1088 bp, Homo sapiens
gctcctccagatcaatatggggatgcagaacaatagcagtgatttgggtatctgtctttttcctgatcttcagggaatacatctaatgtttcatccgtattttctgtacatttttggtagttagcctatattaagttaaggaagtgtccttctaatagtttttttccaagtcataaataagtgttggactttataaagtgattgttactgtaaatttccctgtggggcacactctcaggtgtgtcctacaaattttgatacatgtttgtttatatttcccaaatacttgtcatggcacctggcacataattagtactcaagagtatttatttatttatttattcaaacatcctcctttcctttttttaaaatggacgatagaatccatgtttactgatatgttgcataataacttaagtaaaagggagtgcttaacttgattatgatgttaatatctctcctttatatttcaggtacagcagttgcaaggagtttacagtttacaggaacagcacttctggactttatgttctgacgtttatgttgggaccttgaaattaatagtagcacctgatgctgatgctaggtggattttaagccaaacacataatatttttactcaggtatgtcttttttactaacttcttttaagggccttaacattttttataactagtagttttaaaaatatttacaaggccaatgtgagaggatggcttgaggctaggatttctagatcagtgtgggcaacatagtgagaccccgtctctacaaaacataaaatcagctgggcatggtgacatgcgcctatagtcccagctgcttgggaggctgaggcaggagggttgctggagcccaagagtttgaggctgcagtgggttatgatccagttgcactccagcctgggccacagagcaagaccctgtctcaaaaaaaaaaaattgccatttaacataataaatatatatactactgaactataaggtaagcataaaaccacatttttggctgggtgcggtggctcacacctgtaatcccagtgctttgggaggctgagtcaggtggatcacgaggtcaggagatcaaga

SEQ ID NO: 55318 - DNA, 1043 bp, Homo sapiens
tatcagttccacaaaacacaaaagatggtctctcctaatacatatttactccttgatagaacttctacctttatttcttccatcttttctactcttttgcctttctcacttgtgcctgataagtcctaagcccccaacttcctgcttcagctttttgtgctctattctctgtcctcaaaatagaagttaacactgatactcaggaagaaaccaaaaagcctcctcacaagcccaagtaagagtgctccaagtttcagatactttctgcctccgtaaactctcctaggatcataatcccttcctgtggctttatctaactttgctctgtcttcttgagggagggggtacagagtaggagaaagtggattactatttttccacctttcctttttttttctctaagcttttggtcaagggctttaatgtttcctaagtattgattttggttgcctgctctgcagtttttccttatccatcttcccattatctttcttcatcatttgtatttgaagtccgccagaatctgacctcctttggaggttggagagaacaaccacaggttgtgaggccaacagatccctaggtttattgtttttaagtaatccatatgatttaagtgttcactggttgatgaatagtggtggaaataataacagcaccagcagctagtatttattgagagctcatcatgtgccaagtactgtgatcagtacctaacatattaaatgagcctcaaaagacaatttacagacaaaaaaacccacactcaagttactgttattgacttgtaatttagtcacagttactcattattttgctaactctgaaatgatttaggtttcacaaggaagagtaaggcagtttttcaagacttcattttaaagggataaggatgaatatatgtacagtcgaaataattttctatagtcatattcccgtttatttccctaaattttttacttccgatttgttatcctttctacaacaataaatatgtattgaagatattctaagcctatagcaccaggttaacatttattttc

SEQ ID NO: 55319 - DNA, 1629 bp, Homo sapiens
tttttttttaacaatggatattctgtaaaatatcctgtacaaaacaagactattgccagtaatgtatacaaattgtctttttgtgtacttccagcataggtttggatatatgaacatttttcttttattgttttatcttcacagaaaataaaaggtgttaatttgctttttaaaacaaatttaattatcacattttaaattactttgtggactgtgttttcaaaactttgcaaattcatctgttacacagaaaattttgacttaaaacatctgctgaattccaaatttctgtaatagctactgtatctgtgataaactttcctatatctttccttgccatttctatggattttataatgaaagaaaaaggcattggagactgaaggcagaaatggttgtgacagtgctgtttggctttttcattcttcaaatgccaagtcatccactttgttttcctgtttaggctttgcacaaatacaattgctttcaggaatcctaaagcagcattttattgagtttgaattattaaaggtacagaggaaatgtggtgatgtagaacttttcctaacacaggtatctaggaagtaagtgctgagttgattttctaggttcttacgtatttgaaaaataaaattgcaattcgagataagtgcttgagcactctacttaagtattctctgtgttttatgaagagaaaatgatctgattttcccttatacttcattttacaatacatattcccttttaacttaaaaaaattgtaaatgtgggagaaaaaaccctgcaggatggaaacaattattaagaatgtagatcaataagtactttttagtgatgtggcagaaatccctgttgattctaagttttagagtgtcttttcccctatttctgacctacaactataaactactctctattaggagaactagaccactttcttcattcttttctaaactgctgcagattgccgtgaactctatcaatagtctcttttccgcaggcaaagtggcattttctaaacatgtttgcttactgccaggtggtttgaaatctatgatttactgcagtagtatgtgcttaaaacaactgttgaggtcttttaagcaggaaagttcaaaaggaagtgtcctgataatggtactggtttttctacaaatataagtagtcattagaagtttgcaaccaccaccaagtctgagagaactctgggatattctgtgggttttggcatattagatagagaaaatgacagatctagatgaagggagcttttggatgtgtgcctttaaaaactgattatgtataaatactgatatttcacatacggagatatttgaagacccaagtctgcctttcacagagccctccattccaagtttagtttttgtcaaaatatgaatcattttatttgactgtactatcagtacacaaatgcatgagtatgtttatacagtgttagactgatgtgaatttgcatttgttacattacattgccagcgcatatcatttagcaagttggcattaacatttatgctttaattaaatgccagtatacctatgtgtgcagcagtaaaaaattagtgagaaaaagcaactttttgtcactcttaggaaatattttgtcttatt

SEQ ID NO: 55320 - DNA, 1527 bp, Homo sapiens
tatctgtaggtcagtgttccttgtgctgtcatttcccttatatctggaatttgtcagcattcctgaaaacctacacgtgtatatcagtaaccaaaatgctatgccttttttgcacctttgtacagcagccaaatcatgaactcaaaatgtatttgatcacagttctataatgtttttacctacctattatggaataatcagtttttacagagattattaatatggtagaaccctgttatgtaattccaaaacttaagaaccatatttacattgcttaacacagaattttacatctaagcaaggactggctttagaagcagtgtagttctacctctcattttacagatgagaaaaccgaagcccagaaaaactctcatttgctcaaagtcacagagaaaattagtggcaaagccaaaaagattcagatcttctgactcgaagttgagagttctttatactctattatgctgcctctccagtgtaatatttgcctttctgtaaatgggattaaatatgatttgtaaataaaggacatctgacctccttttttggtacattaaggcactttataaatggacttttattgtctcatttttcgtatataattatttccatcatattctttatggaagatgcaattaattttaacttttttactcttataaaaccagttcctgacattttaaaaaacaatatctgtaaaatggatccttttatgagtgaatttttctgctaattgcccaaggctaaatccaatttaaggattgcttagtttctttattttgtttatggtctctgaactggtatttttttataaaccaggctaattcacaggtcataccatttcattcttgtcgtgttggcttccagtcactggaaaagcttttgcattttaaagatttttagagccatgcaaaactgggcattaaatgttgcataaagcaaatcttttaagtaaggtaaaatgttgaagtcttaaccagaattcctacaactaattactaaaactgctatttctaactcttcatgaaagcattacctttggaaagttaaactttttttttcctttcatcaccgtctttgaaacaaattattttccaattcataagaactttggtaaaaaaaaaaataaaaggaaattatatgtttttctttggacattcattggaaggcttgttgaagacatgatcccccagaagccttagtgacccagatctcaaccagagactcaagatagcctcaaatacagtgaaagattatgtatccaaaaaaaaaaaaaaaaaaaaaagaaaaggagcagggaaggacagttctagttaaagccaaatggatgtgagtctgacaagggtgtctttgatttatatttcctaactgcaaattacacagaaagtgagaatggggaataacttttattaagtatttatgtgccaggcggttagtgtggccttcatgttattacatttaatcctcaaatttctacaaaggaataattttgcatgattttatgattgacggagcattttcaaa

SEQ ID NO: 55321 - DNA, 1032 bp, Homo sapiens
accaacctgttagcttcaggatgcaattatcagattgctctttatgggccacagttccagtgtaagttcggttttcaaagactgcagttctctttggatctatttcaagtttgtggcacacaatttgggacttacgaagtcgtctgttggatagtttagttctcaagattctcaaggctaaatagaatcagatccaagcattagtgatttgaggatgatccttggggttcataaacaactttatgagattgctttcgtggtttcctcccactccataatctctccacttcctggttccctgggctccccttcttggttgagcctctggccagaaaattgggcatctagttactctactctgatactatttcatactttcatggctgggcctgcattctgctccatgtggtgggggtacagagagaaaaaagcaacagggttgctgtacccttttaaaaccataactctaccaaacagaaatattcccctcccccaaagttttagttcctatgggcttacatagctgttggccaccaccataggattgcctggccaaagcttttggaagccagtgggaagtcttccctccaactaatgtaactacaaatgtagtaactttgccttcttctgaggtctgtagaaaccaatatgacctgtgtacaaattattgctcacggggaaagtagtatgatgcacatacaggacaataaaccctgtaaatctgaacattatgatctaacttattgtctagggtggaagacagcgacggctaatcagatggaccttattttatttgtaattttacaagtcacaatgacatactcaaaagtccaagccaaatggccaagccaagccttaattgctatctaagtgctcctgcttatatgtgaatctgaatatcttgtttacttaaaaaataccacatttaaacaatgccatttggtggctacattcaggaaataatttttataaggtctttgtattattttgctttattctttagttttagcagttgctctttcacaaaaagag

SEQ ID NO: 55322 - DNA, 1034 bp, Homo sapiens
tctgatggttttataagtgcctggcatttcccctactggctctcattctcactcttgccgccctgtgaagaggtgccttccaccgtgattgttaagtttcctgaggccttcccagccatgtggaactgtgagtcgaaaattaaacctcttttataattacccagtctcgggtatttcttcatagcagtgtgagaatggattaatacctggatgcatgcatgtttgtgtaacaaacaggtcttttggcttatctagtaagtataaaacaagtgaccaaaaagaagttgactcaacaatgcttggtttcttgtggcagtgagttttttccctatgatatcatcagttgttgctgctattttggcaaattttcaggatgtacacataaagcagaccaggctggaaagcttgtggatagacatccactgacagaatcatttaagagcagtttttatttatgaaaccaatttatacaaggtggttgttaacagaatataacttagaggtaactggaatttgaatcacttgaatctgttttaaagggtaaaaaatgttatgagtgccaagaaaagcaaataaaagattagtaaatgttcacaaaatatgtttataattttcttctttttaaaaaagttagctgtccctactgcatgaggagttgtcctgacagcagctggtattagtgtatataaacaaaggtagaaagattacatttccatccagcagtctgacttaaagctcagctgagcacatgccacaaaatgacattcttctgaattcactgtcttggttagctgacatcctaattacgtggctcatactctgctgtattttggaggttataagattgtttaattataaatgttcagccagccttgtacagttgctgtttggttttaaatagcatctttcacatccaagcagacaaatggaaaacttgctgactacaaaataaaatttttaaaaatgtaagttttaaggcaacaatggattagtcaagatatgccatataacttaattcagttaatatgccattg

SEQ ID NO: 55323 - DNA, 1097 bp, Homo sapiens
gacatctatctttatgtgttcctgccatcatttcagtgagatcagaggaaagttaaattagaacaatgaaaaagcttaagaaatgaacaatcatcatgcttttgtgtatgcttaaagtgagtacatgtaaaaaaacatcaaacagaatgtagactgtggtacttgagtatacctgggagagctaattgcattaataacatattatgtagtttcatggctaagaacagtggcatctagttttctgcctataggggaaggaagatctatgaacctccacggtatatgagtgtaaaccaagcagcccagcagcttctggagattgttcaaaatcaaagaatacgaggagaagaaccaggtactcaagacactagaagggctctcatattattcctctgttactacatttagatgtgtatatgacttaatatctcataccactatggaagcaagagtcagtatttttgtattgtactatttcttgtcatttttgtccaactttaacttaaatcccataggcttcaagttgtagtgaaagaaaaaaaaattggcattcttttatagtataattaacaccattccagaaagtgaggatttttcacaaattaaacataagtcacatttgatataaatatattactgtataaatatttttgtaaaatatatctattatgttatccctaatcaatggtgagatctatcctgcaaaaatatacttatcgttcttttattctccctcctttcattcttaatattgagactaggaatagttttcttcagggtaaatataagagaaaatttgttcttatattcctaatatgtagacacagtgtgtggtatataatagaaatgtttattgtcaataaatctttatgggaggttcttttttttttttttgagagagggtctcactttgtcacgcaggctggagtgcagaggcactatctcagctcattgcagcctccacctcctgggctcaagtgatcctcccaccttagctgaactacaagtgcatgccaccatgcccagctaatttctttgtgtgtttttggtagagacagggtttcaccatgttgcccaggcttttctcgaattccttg

SEQ ID NO: 55324 - DNA, 1058 bp, Homo sapiens
gaagatcagtgtacaggtatttattgagtgcttaccctatgccccatgtagagttagtttcttttggaatactaaggaagtgtagacgtgggtcctgctctcaaagctttgaaatctagtttggaactaatgtgttgtgcacgtgaaagtttaaagaacaaaaattctattgtatggagaggcaggaaggacaaactagaaatgtggctcttgagttgtccttctaagagctgccccttttcttagctttcctgggaaaagacaaacaaggttaaacaatgtatcttccttgctccattaacaaaagcaggaaggaacagagtgtgaagtataggatgtcatgatttcaaatcctcaaaccatagttctcatcgttttatcatctggcattctcattatttaaattagtatgtatttattcaatgcctgctgtgggttaagttccatagggattagtgaggataaaccatggcaggaaaacacagagaatttaaaatttacttagaaagacaagaccaatatatatgatataattagaggttaataaaagatagcattaattgtgtagatctttccaagaacaaaaagcatttgaggagaagtcaacaaagactttatgaaggagttaggacttacgttgcccagagagtggatagtttaatatgggctggtgactgagtggtaggagagtcacttgagtaaatttattcagtagacatttatggagtgtcttctgggtacttcacattatgctaggtcctggtactaagatgaatcagagaaccttacattctagcaagtagaaatagagaggaataattatggactgtgtgaagacaagggaaaagtaatgcggggtctggcttgagacgaagtcacgaatgcactccttgattaaaaaggatttgcgtctaaaaattctcctcaaccctcttccttttaaaaatcagattctatagagcatatttgaaaagtaaagacaactgaaaatatgaaaaatctcatcacaacatttcagaagctcagagtgaatgaattaataaacgggttaaaatttt

SEQ ID NO: 55325 - DNA, 1004 bp, Homo sapiens
aaacaggaggtgccttttaaggttctgtcttatatagtgatcacatttctatgaagatatacttcttataccactgaaattattcatatcagaagaggtaattgttgattcatttttgtacagttttttaacataaaaagcattaaaaatcatatgcatgacacacttaaattttaaaataaatgtatagatatcctgcataatgcaagtactttgacaaagtcttcttccttataatagctggcctttttctctttactttttggactagcgcttatggaagaaaaaataacctaaatctgtggttctcagacttagtatttattagaatcacctagagggcttgtaagacaggttgctgggcttcatattcagactttctgatatagtagatctgggatggggtctgagaatttgtatttgtaacaaagtctcaggtgatactgaagctattgctacaggtaccatactttgagaattaccaacctagacaaattaaaaacttagaaagtgaaagaactgtgttgtcttttttttggcatggcaggattggaagagtaggtttttaattcccagtatacacttgttaaatgtaggatgttgagaggttatcttgccatgctctcttgctcaattttttaaaagggagataagaaccactgtgaaaaggcattctgtcatctccatgaaagagctttccatgagttcaaaaacagccatcaagttattgaacagagtagattaaagagtagcagtatgaaatttctaacctagaaatagacagacttttcagctatcaatttatcaaccccctttgaactattctgttgtttttgttattttctaaagaaacaacatgcagagttcagaatcaaccactgagtattgttcattacctttgtagtttattagccaacagaaaatttttgtttatcactatgatggtaaaaattgttgtataactatctaacactccttcatacacacagacattcacacacaca

SEQ ID NO: 55326 - DNA, 1005 bp, Homo sapiens
ctttgttcttttacccaggttattgaaaggaatatggaaatagatcacacaaagaaagtaaatgagtctaaaaatatatactaaatcaatagaacttaatcactgtgagagttgacagtctcaaacattctatccctaaatctctgcataagaagtctttattaaacacactgtttctaatgatggttctgttttattattccattctgtatttcaatatgctctgtaactatattattataatgaatacaaaatttttatccctatgttgtatgccttttccttagtggcatccatatacagataatatgtcctgatgtaggctgactgcttccattccatgtaatgaatgtgaacagtgcttgatacctaataactataaaatcaatggcagcattattattagtctatttttcttcaatataaataaagctgtcacatgtaaatttatgtatatgataccttcctgcctcccacttctttatccccatgttttaggttgtttccttatggtagatcctccaaaataggtttttaggaataaaatatcaaaaggtgtggacatggacattttgtagaataaagcatattgtcaattatttttcaaaaggatagtgccaagtgttagtgcttccatagttcatgaaaacgtcatttgcgctatatcattgcaaacattactaaatttctggcccaccagccacacttatgtcaaaaacggagacactataaaatttaaaacaaacataccagccggcgcagtggctcatgcttgtaatcccagcaactttgggaggctgaggcgggtggattgcccgagcccaggagtttgaaaccagcctgggcaatgtggcgaaaccccatctctactaaaaatacaaaaaagtagccagacgtggtggcaggcacctgtaatcccagctactcaggaggctgaggcaggagaattgattgaacccgggaggcggaggttgcatgagccaagatcgtgccactgcactccag

SEQ ID NO: 55327 - DNA, 1037 bp, Homo sapiens
taattccttctataagattttaaagtaatctgaggcctaaaaattttaagtctattttttgtttggaagacatgacaataaatctgctccctcctcccataacatatgtattaatcctttgatttacattctacttagagtttgacaatgaacctgaagttgacccttcccccaaatttactgggcccttatgagggccaactataaatgtataatatactaacaaatactttggttacttagtgtatactcatgtaagtgtatactcatacatttttatatattaagtccaggctcactcaatatatacaagtgtatcagtataagccttattgggagatagtctatttaagataagatctctctggataggatacaaaaaggcaatcgccattccctatggacacacttcaaagggggaagctttcagcttggtttttgaatatatataaccaactcattaaggctgtgtcagctcctcattagcactcaactcagaaagggtttcttgactacctcatgaaataaggggttttgataactatcccccaggagtataaaatagctttcctatttactggagaaagccacaaaattagacttgtaaaataggacaaagcaccctttcattttccaagtcacttggttggtgtaaaatttccattcttctgctcctcagatcattaatgaacaagggatgcgtttcaaagggtttaaacaagcagacctgaaaattctgttcagcttagtgtatgaaaatcagatgttagatagctttcttcccaggaggctggggaacgctcagcacctaccaaggcttccttccctacagttaggactgaggtgtaggcttccagatacactcgactgcagcgtctaacaacttccaggcccttgactgtgatgtccttggcatctcccaggcccaacccgatgagataaagcatttcaaacttgaggagaagagagactgcaagacgaagtggacagaaaaaccgtcagtaacaccgaggacatctaaaatctagtgatgaaca

SEQ ID NO: 55328 - DNA, 1031 bp, Homo sapiens
agtctacagcacctagaacagtgtttgcggagagtgaatactcattcagcgaaaggattccattgcttgtaaagttatgattatgaccttggtttcctcagctattaaaggagccaagcttgaccctcctttagcatgacccagagtggttcaagccaggagctgctctgacactgactcagtccctgggtggtgatgactcactgctggggctttaccttccagagcctcttctgatagatgggattttctgaaacttctttcctcccattggatccatgattccagcactgtcctccacagctcagggagagggtgctttgttctgtggactgtgcaaagaccttcttgctgtagaatgtgtgactatgactgagctattctcagaggctcatcagaagtgctagaagaaataccttgattgtcagagacgtttagttacctataaatatctctttcctcttttacttagcagcagtaatttattcaaagtagcaatgaatccagcctaaagactgtgttttccatacaccttgcagctaggtatggccatataattagattccagccagtgagttttacacggaagtgttggctggtacttctggcaaacctttgtagaaagggaagagtgtgcctttttccctctttcctgctgtttggaatgtggttgtgactgctgtggaaataacagccactgtggaccctgaggctgaggccctcagcctaaaagtggaaaggaaagctgaaaggagcctgggtccccaactatggcaaaactcccatagcagcccaggtctgccaatttctggcttttgtcagggctctttttaacttattttaatattttatttcttaccaaacacctagaattcaagaagatagggctctttttgactctctgtctcatgcggctaagccaaatccgactgatctggtgtgcaatttgttctcgtcccagcaggagcatgcgaaaagcttctgaatgaatttggaccatggctcagaatcgagcctcaaaccaacccact

SEQ ID NO: 55329 - DNA, 1025 bp, Homo sapiens
tagaatctcatccactcatttccatctcagcacaatttcattaaataaatgaatgaagaatgagtctgaatagagtgaggagaaggaataaggaagcaagtaaggtttgaatgcaagtccaaaaggactaatttcagcgaaggaactggtggaaaagagtgcaattttgttaatttcatgtagttaatttggggttgtataaccaatgtattggtcagagttcagttaggagatagaaatcataccagatatttttgcaaagaattgaatattaaaaaattgttgactagatattggaaaactgaaaagaccaaaagtgtcttgctaaagcaacatggcaggaagcaagtgcagaagatagctatctctcagaccatgttcattgttttaaaagagagaattttatataaagagtagttaattaggttttgaagaatcaaaaagtcaaacatggaacactaaagtaccacagagatagtagatacaggtaacagttagaagagcagaggaagcagttggaattatgaaaacttagatggttggaagagaggcctcctggagctgaaactcagtcctttgatgagggcctgcctgtgatgatggatatgtgagtgctgaaagaactcccaaatagaattgactgctgaagctggaatgcgctgtagtgcactgctgctgctgggtaaaaacggaggctgaacaagaactggagggaaaaacaggaagcatgaagcaagcaggaaggagcaaatcctttcctatctttccaaccttgcagcctccatctactgggagtatctaacaggtagtcagctggcaaagcagaaattatttgcagaatcacaaaccagcattccaaagttcagaatcaaaattcaggatcttttatacaatattatttgggtatttgtgatggaattctatttttccatgtgtcatcaattagagaagtcatctctccttcattttccatcttagagttcacttggagtttatcttagcacccacttcctggagtggacctg

SEQ ID NO: 55330 - DNA, 1039 bp, Homo sapiens
taccaccttatgctctctgtacgttgtggtctgaattcctctggccactgcccagctaggcataatctgggtctcaatgaatgcctctagaaggaaacatagcaaattcatggtgaggaataattatatctaagccctgtagtctgttgctagatgccagatctagagcctccctaggaaccagcccatggatttacaggagattaactcagtgaaagaaaggataatactaaacaacaatgggagcaggggaaagccagaagagaggcaccttagctaacttcaacttcacacaggggaacttccaatggcatcatttcctgggccatctttcaaccagtccttgctaattgtttacgtgtagattcaaaatataataaaacaggcagttttcctgacataagtctttagtttgaagcacaatcggtgatattttcctattttgtcacatttacaaataatgatgtttaaagttattttttcagctttgtagaattagttattattggcaagattttcaaaaacaggatttgaaaagtagagaaaaaatagtaatttttctgtagcagcattttaaattaaccattcgtccatattggcttgtcagagaaactgagataataattcgacaatggattgggaggtcaaagtaaggaaacttaaagttctaaacaatcttcagagcccacagaactttatgaaacattgtaaaaagctcataaaccatccttcacatcttcacaaatctctaggaatcaggggagctggactcagaaccagtgtttgaaacattaagacctctacaaccaaagggagactgaagacaccttgacaatagctggatgcccctaatacaaatagtattaaaatattgacagaactctataacaatccttaaattactacagctagaattaggggaaagaagaagtatattaggtaacacgattttataaacagtgcatcatcttttaagtcacttggcatgtattccccttttctcatactgatgtttcatccccctatttttgatatagat

SEQ ID NO: 55331 - DNA, 1001 bp, Homo sapiens
agaccaattttgatcagtttaaatgtcacttatgcctgcaaattaaaaaaaaaaaattatatatggctcaatttaagtacatcaggtcatcgtgtatcagattagacaaaattagaatgtgcgatataattattaaagtaacttttaataagcattgaccagagctcttccttagcatagtgattcttttactgttgatttgtgtttcttttctgatggtttttaaaatccgtataatttatgtttaaaaatagacttctcccattgaacattattacaaagataaagcacaaaggaaatatgcaccttgaagaacgatttctctgttggtgaatgtttttaaactacgcattgttatgtatagaggaaagtttaaaatctttagatctgtcataaatgaaggaaataaatttttagttggttaaaagtgaccctctgtgtagaacaggtctttaaacttttggtcttttgaactatttgcatgtgtaaaacgtgtgtctttatatgatagaggttgcatagctttcatctcaagtctgactcaaaaagtattgaaaaccactggactgaaattagtaatcagttaaatggtcttgagttttcatcctttcccgtgattttattaacatgtcacattactccactggtaaaaagtcagatttctttgtgagaaactgaaattatattggaagtaatttgtaccttaactctgtttcagaaacatacagcttttgccacattccctaatgaaaaagcagctataaaggtatgactttttcttgacgattaaagttgtcaacaggatcctcttatacaatcttggttcagataatgtttaactgtggtttttaagaagcaaaagcgtttgtattccaacagtttccccaacagactacatttgatttgtcagttggcagatcttgcccagtcctttagtagattatctataaagaaaaactaactgcgtatgtaattaaaataacaatttctaaatgatttag

SEQ ID NO: 55332 - DNA, 1044 bp, Homo sapiens
ccaacaatgcaaaatttgttgtctatgataagcagtctcagtaaacttattaaagcattaacctgattgaaataggtttgaaactgaataggcagagaggagttgtagatagagggtttagatagcttgtacagagttttactgcaaaactaataatacaaatttaggatgggagaaataggagcatgttttcatactgatacggataatccaatagaggacagtaaattaacagtataaataagatcaccctccacacccctcaccacacacaattccagagcatagctaagtaaagacccttgaggagatgagaggatggaatttagtatataagttaagcagctggatttagataggcatgtggatagttaatagatgataacagatagcatgcatatgctggtagatggggggttatagtgggagtctgatattctcatgtcatcaattctgttgtctcaaagtagaaaacaaggtgctaagctaacggaatacaagaaaaatattgtgaggttaaggaacaaggagaaagtacaaaatactctctgagatataggtggaaaaaatagactaagattgtaataagtaattttgtggcataattaaaaatcaccctgagatttgtggtagtttttataaattgaaagtgaggccagggaaatttgttagtttgttttctagccattttcagctgcctgggtataagcagagctggcataaagtgggatttagctagatttttattttcctaagttataggaagtagtcctttaataagtaataaaggcttgatagcctgagattaaaaataaattaggaaatagtcaaggaactgtttacagcattagcaaaaaaaaaaaaaagtataaaaattggtctctaacgaatcatttttggtacaattgtgaaatgtttactcttgttcttttaactgaaggcattgacaagactccatcaactgaaacttttaggtcatactttagtcgttgaatttgcaaaagagcaagatcgagttcactccccatgtcccacttcaggctc

SEQ ID NO: 55333 - DNA, 1036 bp, Homo sapiens
aattgcaccaaaccatgggttagcatttttgtttgcttttcttttgcttttgttctgtgttatatacagatgtacagatatcttactgctttttgcttattatatattgtaatatacagatatcttattgcttattgtatattgtgttatatacagatatcttattgcaaataagataattttaaaaacaaagatatttaatgtcatgcatatttttaatatgttgaataaacattttgagttgagtttgtcactgaattcagtgcagataaagcatctattaagatgttcagagctacaagataaacctctgccaagaaatgcagtagcttatttttctttttaaatgtactttggatcttttaggaacaaggtaaatctaatagtactgtatcatttgagcagtgtgtttgttatcaggttacctaaaatgagttactgatatgaaattatgaaaacataagcatcttaaatgttttttgttttataggctgacttttcctttaaattcatgcctcaagtatatgtacccaccaccttccagcacaatcctagcaaacattgtaaatgccttggcaagcgtgcctaagttctatgtacaggtaagtagaataaaacttttcctaaaaggacttgttgtatagcttgatactttatttttcatgctgattctcataaaagtaatcagactaattctagacagccagtgatacagtattttaaatgtaattaaatattttctacttccaagtagagacttttataaggtatcgtataagtggatactaataaacagaagctagtttgggaaatgtaatttgtgataattctctattactttagaatacatcattaacatagagattcttaaaagaaaagttatagtagacccctgagcaaatgcttaaaaatattggcagtaataacatatttttttgaagtacaaagtatagatgatgtttattttttaatgtatttctctattttataattttacaataattgggttaaagatataaaatcatttcagtggttt

SEQ ID NO: 55334 - DNA, 1012 bp, Homo sapiens
ggaaagcatccatagatagtatacctaatgagttggtgtggccttattccaactagactttaattacaaaaacaggcagctagctggatttggtcattgagctgtagtttgtcaacccctgtctgcaggactctaatgggaaaatgatcaaaatcttaggtgactgtgcacggaagaagtggtatataggaggtgtgagtggttggcatgaggcagaacccaagcagactctgagcaacatatacaaataatcgcaatttgactgagtcagtgtccacccaagtagtggtacaatgtgcagtatattatctttctaagggaagagttaaaatcaaagcataggtggggctgaaactataaaatgggagtgaatacactatctgtcttaaaaagagacatttagggaaacaggcagtgcctgatagatggttactttaacttgttgagtgttaactgcggactaattacttaacctctgtgaacttcactttctttataaaaataatgatagtaattagaaatgctacagtaacctggccaaacccttttttgtttgtttacttaggtttccattaaaggatgtagtgaggaattctgccagtaattcatcttgagtcctgagagagaacatagcctttgagtgtaccaagctctagtttcatgcttctcttttatcttcaggaaatgtaacaagacctaaacaaaagaaaaatggtacaggttgagtatctctaaactaaatctgaaatccaaaatgcttcagactctgtaattttttgagtaccagtatgataccacatatggctggcttagtgacacctttgcttgttttctttctttcttttttctttttaagacagggtcttactctttcgccctaactggagtgcagtggtacagtcatggcttactgcatattcaacctcccgggctcaagcaatctgcccgcatcagtcccagtagctgggactaaaggcatgtgctaccacacctggttaatataatatttttc

SEQ ID NO: 55335 - DNA, 1032 bp, Homo sapiens
ttgcatttaaatatggaggtggctgatggtttgggaaattcactttaagcaaaataagtacccaaatcaattaacatatatactttgctcttttttataacatgactcatcttaacggacctttaatagtagatattttattggacaaattgtagttactctagaagtctgaaatttttaaaacaaaagttatatatatataaagttttttatataatcaattcagattttcagtgagtatatttaaacccatttgtaatattgttactaattttgttactaattttatgtaatattgttactaattagttcatatgaaaatgaactaattttcattttatgttaaagtgaaaattttaacattttcataaagcttattttgtctatttaacaattaggtttcaaaattgtaattatctttaaaaacttgcttaaaatattttaattttatatctttgttttttgttttttaataagaaatggaaacactttcagttttcagaagttatgaaccgggtgaaccaaactgtagaatttatgtaaagaatttagctaaacatgttcaagaaaaggtaggtataaattgattttttttcatgtaaatgaaaataatttgaaggttttatagttgatgtgttaaagtctgtttgaaactacctttaagaatgtggttttcttactgtgcttcagggcatgacaaattattgtttagtattttcaggttaattttttattaaaataatactctcatagcttgggttctctggcagtaaatactgagacagagtttgtggtatgtattaatttcctagggctaagtggctgaaacaacagagatgtgttgtctcacagttctggaggcaaactgaagtcaaaagtgtggcaggattggttcattctgagggctttgagtgaaggatctgttctgtgcctctcccatagcttctgctggtatgcagaagctggcgaactttcaccttccttggcttgtggaagcatcaccacaatttctgcctttgtacatagcatact

SEQ ID NO: 55336 - DNA, 1022 bp, Homo sapiens
gacatcacctgtaaaattatggttttaattagataatcattgaggttcctttctactccgaagttctgtaattgcttataataatataatgaactctaggccaggtgtggtggttcatgcctgtaatcctagcacattgggaggccgaagcgggggggatcacttgaggtcaggagttcaagaccagcctggcctatatagtgaaaccccatctctactaaaaatacaaaaattagccaagcatggcggtagacggctgtaatcccagctacccggggggctgaggcaggagaatcgcttaaacccaggaggtggaggttgcactgagccaagatcacgccactgcactccagcctgggcaaccaagcaggactctgtctcaaaaataataataatcataataataataatataatgaattctataattgcttataactggctgttaatcctttctatttttccattcttggttatgtagtagtagttgtttttttaatcacttgagcagatagtgccagattgtaaggaacttaaaaaattgagataaatagtaatttaagaagtttgcagccagtgcggtggtccacgcctgtaatcccagcactttgggaggccgaggcgggcagatcacgaggtcacgaggtcaggagatcgagaccatcctgactaacacggtgaaaccccatctctactaaaaatacaaaaaattagccaggcgtggtggcggacacctggagccccagctacttgggaagctgaggtaggagaatggcgtgaacctgggagatggagcttgcagtgagcggagatcatgccactgcactccagcctgggtgacagagtgagactctgtctcaaaaaaaaaaaaaaaaaaaagaagtttggttttctagttgctaatagtataatttttaaatcacatacttttatgatagttgagaatagttaaaagtatatcttaaacaaatactacctacttgtagaatcaattttagtgcagaacatgaaatatatttttag

SEQ ID NO: 55337 - DNA, 1027 bp, Homo sapiens
tcaagtcatgaagagaggcaggaggcactcaaggtaaattaaaaaaccatactcccaccatacactagaaagtttttgagaattatttagaaaagattacttgcatattcatgaaggaaaccttaattttaaattattagcagtttgctcgatctgctagaccaaaacaagatcctaaggaaggaaaaagaaagtgttaaaaattaataaaggtaagtgtgaataaaacataataaaaagacaagactaattcttgagataaaattaagaataaaagtttgacaaggtagtaattcaggtatctctttttttttttttttgaggaaatacctatctgtgcagttaagtcccattaaacgtcaaaactataactacagattaaaacccatttatatgtgaaaattaagtttggagaatgaatcttataaggggagtgtgcctgttactctttttttaactttttctgcctatagtaaagcaatggttcttaaaccctaatatgtatcatatcacttggagagcctaataaaacacagattcgtaggttccttccttccctgaaagagttgatttggtaggtctgatgtggggacctagggaaactgtttataccagttttccttttaatgaggggatttccaggatgctggacatttagtgctgaaatggggaatgtgtctggtaagccaagacaggtcggtcacccttgttggcacctgaaaatttgcgagattaatgaggtttcaggtaatgatgaggcatcttatccagagaccacagcttgaaaactcctggaataaacacttacagatacattttctaactcttaaaattaacctaaagtaaatgttaaaataaaagttaaaaaaaaaagtcaaactgtcattaaaaataattctggctgagcacggtggctcacccctgtaatctcagcaatttgggaagtggaggtgggcggatcacaaggtccagagatcaagaccatcctggccaacatggtgaaaccgactctctactaaaaatacaa

SEQ ID NO: 55338 - DNA, 1312 bp, Homo sapiens
aggaggattacttgagccccagaggttgaggttgcagtgaaccatgatcacaccactgcattctagcctgggtgacagagtgagaccctctccctcctaaaaaaatccttaagaaatatattgatgcttggttcctttggtcagaattttgatttaaggtgttgggagtgtagcacagatgttggaataaacctctcaaactgattttaatatacaaacaaggtcgagaaccaccaaggaagagtttttatgcataaagattcctgtactctaccctagaactaatacatctgaatctctgggaatggagtataacaatcagatttgaaaaggtttctttagtaattttaaggactgaccagtttagacactgctttgttagagtaaaatgattaggtacctagtatcaacctagccatccaaccttatattaataactaggaaaataaagggttggagcctctgtgtttctttgttgaaaaatctgctactattattagatctgtgaaaacaattgaaaattcggttattatcaccttaaaagtacaaaacctatagattttgaaaatgtaattatttttctgtaggcatagttaaaaagattttgtaaatgttataaatcagtttctttataagcggtttatttagataaattttgttatactgacatgattcactaattttctaaatataaatggttcagctcttagttatttttaaactaatgacctgtgttatacttcctatttttaatgggcttttatgatgttttaggtttttttgaatcccgtgtccttcaagtgctttctaactttgagaggaagaaattgaccacctggactatggaactgtgcgtaacagctttgaaagtgtatttaaaaattaaatctatatgcctttaaatcagtgaattggaaacatattacatgtattttaatgattttcctcaaatataataaattgtttcctttccaataaaatagtgtttgtattttttctttatctggtttaacacatctaggaaaacataatattataaaaaatatatataatttgtaatataatttttttatgattacaaatactgccttttaaaaattcttacctggataccaaagcactttcacattttttttattgtaatcttgttttttgtaattattttatatttgtctggctttgagttttactgggcttttggttttttggaaatgggggtttatcccaatttagaaatttgtatccttgctgtaatacagtcttccatttttgttcccccaaatctttcatctgtcagaacgtcactcaaagg

SEQ ID NO: 55339 - DNA, 2034 bp, Homo sapiens
gaacatcactcaaaggtgaaaatatttcccacataaaattattcttttcctttagtgaaattagttccagctgtatatacgtaggaaaacattcttctttttattcgattcattcctataggtacgttcctgggtctgtgattacacctttaccttagaggcactgcccaaaaagactcaagtcttgtgtaaaaatgctgttgtggatcatagcttcctaccttttacagcatcgtgaggcagggagagtaagaacattagagacaggaattagaggcatggagaaatgaaccctggagcatcccaatggtgagatataaaatagttcaagaactattaaagaagactaaggaggaatagctagaagctaaatgaagaaagtatctcaaataggaaggagtgatcaaatattttagctgtgttgatgagttaggaaagatgagtttttggattaagcactgggtagagcaacctttgggacattgacgttgaccaacttggtggatatcaggagtaagaggaggtactcaagagaatgttggagaggaatttaatatagtgagtattgaagacaacacttaaggagtcttgctttcaaggggatgtgagaaatgggttgttaatggagggtaatatagcatcaaaaagctgtttattttaagatcgatgatatagcaggtttctatgctaatgggactgattcagtagacagaaaaagcataatgcaggaaacagagggatattgatgaagacatagacctggtaaaaaaatagaaggcttggttttaaagataggcacacaaacagctaattactaacagtaggatgtacgtcagattatggaggtccagatgtttgtagttcagtagataggaggagcatgtcaaatttttgtgatattttctcagtgaaataggaagcaagctcataaaaagggaagaaatcacgaaggattaaggaaggaaaaagagatgtaaaatgaatagctaggaatgtacaaaagtaaacaaactcttggcaatctgtggtttatttaagtggtattagtcaatgtggtttcgtgttcttttccagttcagttcagcagaggcgctatcactgaataagtacagaattcagtttaactaaaggtgagatttctctaggtgaataaaacagtcagtgatgagatgttcatacatttaggagaatgattataaaagagggatatggaaagtaatctgggttaaggagtgaagtgagaaaataaagaaggttgagacagtggaaaatggtatcatcaattgtagattgcagtgtggttgacgatgcaatggagttctcgaggtaggaactagaaatttgggagatttagataagagtgggttgattgaaattggaagtattagaggataatagtatataatagtactaagtatagtatactaagtatagtagcatagtgctaagtatatactatcttgtgagtataagttttaggatgtgaagatgggggtagcatagaggcaaagtgatggaaggagatgagttaaaggaattgagaacctaggagactgaaaggattatctaaatgaattttgaaatctcaacaagagctgtgctgagtgcttgtagtcattattttatgtttactactctgtgagaagacagcacttccttttgtgagtaatggaaagttctttcatgtgtcaattgtaagatactttattaggttcaattatctttagtaatgcatactaaaaaatagtgagctcagtgggattattcagtagatatgtgagctaaccccctctgtcagacacctaagaggtagaactgatggtcttcaagaggaatagagacttctcatcctaagtgtgtaagctgtgaaatatcccaccctatgttttctgaaaacaaacgttatatagagtgtccacataaaagctaacaggaaatctcacacacacacagacacacacacacacacacacacacacacaaaacattgaaaaacttcaggaaagatataccctgtacccaacatgaacgagg

SEQ ID NO: 55340 - DNA, 1049 bp, Homo sapiens
gaccccgcaggaagtaggaaggacgagcgcgcactacaagtcccagaagcccccgtttcctggagcccgcgccgtgccgcgctacgcccgccgggagccgggcagagcggccaagatgtcgcagcccaagaaaagaaagcttgagtcggggggcggcggcgaaggaggggagggaactgaagaggaagatggcgcggagcgggaggcggccctggagcgaccccggaggactaagcgggaacgggaccagctgtactacgagtgctactcggacgtttcggtccacgaggagatgatcgcggaccgcgtccgcaccgatgcctaccgcctgggtatccttcggaactgggcagcactgcgaggcaagacggtactggacgtgggcgcgggcaccggcattctgagcatcttctgtgcccaggccggggcccggcgcgtgtacgcggtagaggccagcgccatctggcaacaggcccgggaggtggtgcggttcaacgggctggaggaccgggtgcacgtcctgccgggaccagtggagactgtagagttgccggaacaggtggatgccatcgtgagcgagtggatgggctacggactcctgcacgagtccatgctgagctccgtcctccacgcgcgaaccaagtggctgaaggagggcggtcttctcctgccggcctccgccgagctcttcatagcccccatcagcgaccagatgctggaatggcgcctgggcttctggagccaggtgaagcagcactatggtgtggacatgagctgcctggagggcttcgccacgcgctgtctcatgggccactcggagatcgttgtgcagggattgtccggcgaggacgtgctggcccggccgcagcgctttgctcagctagagctctcccgcgccggcttggagcaggagctggaggccggagtgggcgggcgcttccgctgcagctgctatggctcggcgcccatgcatggctttgccatctggttccaggtgaccttccctggaggggagtcggagaaacccctggtgctgtccacctcgcctt

SEQ ID NO: 55341 - DNA, 1021 bp, Homo sapiens
tgagaaagagtttcattttcaagtaagtttgggaaatattaggttaaaattagataggttttcttgttgtgtgacttctcatctttaatacagaatcctgttgtgaatctttatgagggagagcgtctatatggctaatactcctccaagatctctgggaaatcctgctgtgttcaagttttctgaaaatcatctttgcttgctgtttgccagctctttccatagggtctccacttaatcccaggaagatcctggtaaacatttccaacctctttatattacaaacctttcatctcactaaactttcccttatttcctaggaccaacgtccacccctttgtactcagaacctaagatctttttggataagccctactcaggtcttagcttttgcccttctcttgtccatgtacgtggagtaccatggcctttcacaaaacttgctagcatagcttcactacagtttctaggatgaatcctggctttgggtcaaagagaattaagataggtctgccccataatttgggactcatcacaaattcactcttcctgcttgatcttgatcatgtacaggaacacttattctgataaccttctagttcataggacccagtccccactttgttctccattgataaccaggttaccgctcacctgcttggcacctgtccatttcaagaaaaatattattattattataaatactatcattgttttagacaaaagcaaaacttgggcctgttttacaattcaataaaatcaaacatttgtgtttgatttgagggtcaaagatgtacattttttttcagctttagtatttttttaaagtattgctcagtagtgagtcttaatatatgtcagaatagtacagttgaaaaataatattgacccactttagtattatgaatgtgaatcctcataattatcttcttttgtttttgttttctaccttttttatgacatcaacataccagaatgaacagaggcagtctttcttggagaaatatttctttttagaggc

SEQ ID NO: 55342 - DNA, 1124 bp, Homo sapiens
acagatactgagaatgccgagaatgaaagagatatggtaggccagaaactaaaattctcaaggaataattcataaattgcatacatagattattgatctcagggatctagaatctccacaaaacatttgggagatattactgtgtaagtcttcatatacatctccaaaatgttgccattttttggcaactcagacaataatgttcttttcttccttccttttggaagcatttattgtctaaaccattttattttatactttaaatgtattaatattagctcgtatttatgtttttatatatctattcaagtgtaaagtctttaagttagagaaaatagtttctacaattttggtgtttataatgctgatcaacaattgactttcaaaacgtatttgttgtttgttgatgaaaaactattatatagattaggacaagttatacttaattactattttcttcttctttcctggtagtatttcatggcaccactaaaaagatttctgacagcagcagaatttgattcagtattcatcaacattcctgtgagtaaaaatatgctagctaaaattgtggtgtacttcaataaaatcttcatttccttagggggttccagatccctattttaatactcttttgtattatttaagaatattggccttatttatttattttttgcttttccagtttttatatccttattttcttgaaataactgatgtatcatatcttcaaccaaaagtcagtcaacatgtacgaagaacacaaatggaaaaataactttcatgtgttattcttaactctttgtcatgaagaggtagtctcaaataatctggggatccacttccatccccacacttccctgcggagctctgttgctcttccagaccctcagaccttgtcttgtaggtgatgtcctcaccatatcagtttcccctactttcctccattcctccacatctttgacttctactatttggtgctttctacttccagttgtatcatatgtaactcccatttatgaaataccctacttccttatgatttaccagactattttaattgtaaaatttgaggagatatttttcgtttacatttatgtaagcatttcaagtttcagggcacc

SEQ ID NO: 55343 - DNA, 1015 bp, Homo sapiens
ttgcacagccatcgtttctctttccttctgtggccttggatctcctttgagaaaccacactttcctctttcttaattacagagtttggatggtttcatcaattatatcccatgcctttgaccacatagtgatggttcaggaatggggttagtcactcagttgggaccaataagacatttgcaagggtagttttatttttctctcttcctgatacagaagagtgtagatgtgagtctacacaaggagctataaccatctgggtaccacatggagtttcaaaatggacccagttcagagggaatagagttgaagatgaacctagtgacaccctgtgaagtgggaatcagtgctgtgcccaaagctaaatgtatatctataggtttttccatgaaccaatacattcctccttttctcttttttgagccagttttcactagttctttcaaccaagagtaagagaaatctaagtgattcactgtgtttcaccagttaaatgatttcaggtttgtagatgtgttaatctttattaccgaagttccaagcaatttggagaccatttgttaagcctctacatctcctatcgtatatgcaagaggagatataaagacaaagtcccagaacctattttgcagcatgtaaataataaaatagaagtacagtcccagcttcatagtcaatgctttcttttccttgccagtgattccagaaatatcatcgatcttgaggtttagaaggtcaccacaggcatcccgacaacctacttgagagcctgcaatggtttactactacctgtctatctttgtgaaattctgcctggctttccctgtcacaagaaaaccctcccaagcaaaggcttctgagcctttcttggctataggtggccccagggacctcaccttggcatggcttgaaagagccttattatctagtgcatacacgttaatcaacacctgaaaacattttttcatatatacatatgtaaacaggaagaattattttagggtgtaaatctttt

SEQ ID NO: 55344 - DNA, 1007 bp, Homo sapiens
caattaggtagaaatatagacagaaaatagaatgtaatttagtacagagaaacagtgactgatatatatgagaataattttgtttcaaagtgagtcagggtaggcccggcccagtggctcatatctgtaatcccagcactttgggaggccgaggcggggggatcacttgaggtcagaagttcgagaccagcctggccaacatactgaaaccctgtctctactaaaaatacaaaaattagccaggcgtgttggcgggcacctgtcatcccagctacttgggagtctgaggcaggagaatcgcatgaacctgggaggtggaggttgcagtgagcctagattgcaccattgtactccagcctgcgcagcaagagagaaagtccatctccaacaacacaaacaaacaaaaagtgtctcagggtagagaagaagcctgctgaaaggcattgagaaagaaagtggtgttctcctttgtagttggggaaaggaagaggggagagtaggttgcctagtctagcgctacgtgttttgctgatctgagctacagtttaaacactgggtttgttggttattgctacatagaaattatataggccaactttttctgaagttgaagtcacttgtggggaatgttgcactttgtttttagttgcactacagattacctctttcaataaagaagatatcacagtgtggggttaataacagtgttctctgatgtattttattatgccagtaagaataataatacaagattataaagtaaccattaatcctttctttttactttatgtagaagaattaacacactattcttaagtctgatcttaaagatactttacaaaataaccccccccccaaatttttggatagaaccaaaacagcctggttggaggccagaaaaattgttattttgtaaaattaataattatttcaagtttaatgatgcatatttcctacttaattgtcacaaaaatgacaaagcagaaaatgaactggaaaaattaaag

SEQ ID NO: 55345 - DNA, 1120 bp, Homo sapiens
ctctactacgcagagaccacattcagtttagtcctttagtactagaaacatgggactcagaagaagtagaagataggaaatttagaatgtgcgggctgggaaagaaaggttctacaaatagggcctggagggactacggttgccaccactgcaaatttctgaactttgaaagaagtgagtgatgctccaaatgccaggctttgagggagaagacactttgcaaagtcagattttttcctgccagtatgcatggggccaaaattaacctcctgcttgaagatttcttctagttgagggtttttttttttcaattgtgctaaaatatacatagtataaaacttaccattttaaccatgttgaagtatattgttctgtggcattaagtacattcacactgttgtgcaatcatcaccaccatccatctccagaaccttttcatcttccccaactgaaactctatacattaaacaacaactccccctgaagcccctggcaaccccctttctactttgtctctctgaatttgactactctagatactgcatataaatggaatcatacagtttttggccctttgtgactagcttattttatttagtttaatgtcctgaaggtttatccatgttgtagcctgtgccagaatttctttcctttctaaggctaaataatattccgttgtacagacaccactttttgtttgctttttcattcattgatggatacttgtctcccaatcgagttttaagctttagaaaattggcatagtttcgcaggcatcctggcaaggctgaaaccaggaggactttgtttttatttgtagaaccttctctatctttcaaatgtcctggagtttctgctgttgtctttggaagcaattacatggctctgggttatgccaaattctggattctgggaacactggcttgcttgttgtggtagctacttcatggcctgaggattagctttccttttaaatattgtgggtgtggggcagatgatagtcttgcctgaccttataattctttggtctctttaaaagtggaggatgtcaaagatttgagataacgttgactcaacatctgaggctctgaaggaactatactttcttcattacagcttg

SEQ ID NO: 55346 - DNA, 1047 bp, Homo sapiens
tctacaccactcacagctgaggcgccctttgttctagcctgcatggtcccttggttccagcagttgtgccatgcttgggatgggaggagttgggaagacatggagtgtctgtgtctggggtccggcctttccattctgaaatggtgatgagtagaatgtggatctcccttagccttgggacccactaacctttgtcttcttccaaacctccgacccacctctttttctctttgctcttaaaattatccctctcctcttccctctgaggcccctgtcatcctctctgcaggtagcttcagtgtttgcaaaagacagaaaagactttgattgaaagtgacttctgatttctactttaaaaaatcaccaagggaaggaaatgctaaaggcctgactcctgctctgaaatgagaaaaaagggaaaatatagggacataaatacaagttagtattttactcagttatcttgctatagcctctcaaattgcctcctgtctcctggtactctgtctcaggagtaagccttgtgccttacagcagtaggctctgcacataaaaggagatggctgttttgtttgttttaacataaacagattgttatacctattgaatctccaagttcccacaactatattgatatgtggcaatgcagtttcacaaccagacagttcaataaacggtgtccaggttgaagggtcaactatgtacttaaaattcaacccttttcaatggcctggggaggagatgggaaggatgggagagggtacaattacttggaatgctgaaaagaatgataaggtgagactccctctctgcaaggagtctagagctgtttctaaatctgttttggttttggatgtgttggtgaatatgagtgcaagctctcagaagacatggctgataaagttgcaagtgtagaattagaggtgaaattgatgagttgggtgcttgagtttctaagtagaagaatctggtggaattctaccagaagatgaggaacatggtttaaagctcatcctttagtgatctttgtttttgtcctgattttat

SEQ ID NO: 55347 - DNA, 1021 bp, Homo sapiens
gcttgagcaagtcatcaataggagttgataatagatcagcctgattgcagagcgttcatgttgaatggaagcagaagataagattagagaaagactttgaatactgttgtaaagagtttctttctactctctttctataaatgagagttgctttctactgctcatagggtaaaattaaacctaagattcttgaactgagttgttgtgtggttaaagtggcgtatcacctggctgacaggctgatgctatctgtattcaaggttgggtgggggggaaattagagatggggagacaaattaggaggctattaaaataacccaggcaggagctaatgagaacctgaactccgaggtgtctcatgtaagtgactgataaatgataatcttatgacagatgccttgacgccaccacagaagtaaagaagtcaggaaaattatttgttttgtttaaggggaatattgcatatggtggtggaagatatagtgggttaagttgtatgcttagcatgctacatttgaggtgacagcctgatgagtagtgggaggcatttatgcggtatgtggatttcttagatgttgtctattggagccatataggcctgcttactaaacttatttagaatttccttacattgtttttacccttttaaagattattagtgaaaaaaggccaggcatagtggctcatgcctgtaaatcccagcactttgggaggccgagacacgcggattggttgagctcaggagtttgagaccagcctgggcaacatggcaaaaccccatttctacaaaaaacataccaaaaaattagctagatgtggtggtgggcacctgtaatgccagctactcaggaggctgaggtaggaggatcgcttgaacccgggaggcagaggttgcagtgagctgagatcaccaccactgcactccagcctgggcaacagagtaagactctgtctcaaaaataaataaataaaaataaagattattagtgaaaattaattttagaagccagtttttcttggt

SEQ ID NO: 55348 - DNA, 1043 bp, Homo sapiens
tttccttgttttgcagcatttgttggtccaactgcatgcagtatcatttatagaatagctgctataatagctatgttactcaattgctttccttctgcttctaagttaaaaacagttcttgtttccaaatatgattgtgccctagggaaaatggtcacagttctgcattctctggaagaagcctggttctgaaaatatgtaattggcacctggaacatacacatgatcagaaactattagaaatggctttgacactgccttttgtacatttactttgaatatgaatactataatcactttcttaagaacttttactctcagtgctacgtcccatgctgtgttgatttaagccacagacattgcccaaattatagcctagcactaacaacactaacattaaagtaatagagtactctttagcttgctgttgtgatggatttttaaggaagcagtatttccttagaaaccacattaaaacctaccaattttgtgaacatttataagaatacatctgagtcatttttgttagagaaatactgaacactaaaactgtagcagttttaagatagagtgctgttaaatgttttgaacaacaggagtttattgcatagactgaactaataaaggactgaaataattttttaatgttatgaaaaatataattcttcagcgaactaaggtatttaaatactttgtatatcttgcaatacagttacttccattgcactgacttaaaaggatgtccctcattttgtaacttattgttttgataatgaacttggcagagtttataaagtctgcagagtagaatacaaattgaccattaactttttggcaataagaatgacatcatgttatgacatattacagatctttcagcaaagagtgcctctgttccagacgaacttggtgcctgtggacattctagaacatcaagctatgcaagtcagcagtcaaaagtatcaggtagaggctaacagtgaagttgaattccttattgttccaaagggacttgaaactgctgtggtgtgggggaacgatgt

SEQ ID NO: 55349 - DNA, 1025 bp, Homo sapiens
cggagaaaacagcattatatacatcggagtatcattttaggattcaagtgtaaaaatctgtgatcaagaggctcaatagatttgggctctatggtttggtttttttagtttgagagacagtacatgaatataacttaaaccctatagattttgtcaagatagttgtaattcctgttctggaaatcttccctattacactacctacagcattgtataaagtgtgggtgttcatgctttgggaaaatgttagactacaatttaaacatgtgatgtgcttattcataattctcagtgtatcagtcataaatgaaataacaagtgcatttaagtcagagatacgtgaatggatgtaatgccgttatgcagtatatattgttaattgtcattaatattagatgagctgcagaaccacccccaagcactacataaaagactcaaaataagtttaacacttactgtgttgggcaccctaacagaagagctatcttaactcattgaatattaagatctgctggtttcaggagtcaaaatgtagaaaaagaggagaattgtaatatggtcagaaacagagaagccttttctatgtaaattcagacttatctgaggctaacagttttccgaagtggtggtgggtagcagcatgacagctgcttgccatgactgatgcagactactaggtttccattttagctctctgtaggtactgttttcttccccactgtgtcgaaagtgatttgttttgaagcaagagtagaatataacatctatcaaatatagcttttaaaataagaatacctggtctggatccagttgagcagcacagcagataaaccttagagtttttctgttcttacatgacggtttccatgtggaaagatctaaactttcttggaatcactattagtgaagaaaaatgtagaatctgtataaccagtaattccccaattcttactttcaaagtcatatccaagaaagacaatatgtcagaatagaatgactttggtctaggtgttttcacgttggca

SEQ ID NO: 55350 - DNA, 1200 bp, Homo sapiens
tattaataaatttatttttaaatattaaagtcaaatttcaaatcacccagtgttgaagaatttgcagatgtatacaatactttttctaattatgtcttttctatctccatgcctggctttttctaattatatcctagagaaaaagactaatggtatttcaaagctgtgtatttgtgacgagataaagaagagtcttaaacatcttgtttgggagaatgcacaggccagtcaggagacccacctcctcctgtgccctgagctgctgagacccgacagatcatgaaggctagtaaagggcagagaaggccctgagccatcagtttacactcgaattgttgactcccctttgtggtgtttttgaaggctgcttataccaacagctaatgtggattagtgcttatgatcttgaaaaagtcttgaccaagaatcctaaactccaccactcctcccattccagcttaacactatcagaataatatccaaattccagatttttttcttttttacttttttttcttccttttttaagagagacagtgtcttgctcggtcacctaggctggagtgtagtggcgcaatcgttgctcactacagcctcccaactcccaggctcaaatgagcctcccaccttggcctcccaaagtgctaggaccacaggcatgagccactgtgcccagcctagtttcttttctgtatgctttttttacaaaactgtgagccacagaggttgaccacttagccaatttgttgctagaagggagaaaaaaatctccaactagcctccagacaaaacatactcaaattcaaacagcagttagttttaattaacatacagaagtaattttagactttcagatttctatgctgactagaacactttgcaggctgaagctgacattattaccaaatacttcatttaagtacatactctgaagtgtcaggcttccagtatatatagcaacgctctgagagacaaactgggctcatatgacggggttgcattttattttcttaacaggtctttaaattgggcagttctgaaattctgtttggtcagttctagatggtacgtcatgtgaatgcaaccaagcactgtagttgaaattgtgttatgccactactcatgttgtcttaggtactacgcataatgttaatagctgagatgttaaagaatttgaagtctaaaatataaaagatgaat

SEQ ID NO: 55351 - DNA, 1233 bp, Homo sapiens
gtcccagaccgttgtcccgaagagcgagatcgagcttggccccctcccccccctccttccctccctccttccttccgccgcaacatggctaacaacagccccgcgctgacaggcaactcgcagccgcagcaccaggcggctgcagctgcggctcagcaacagcagcagtgcggcggcggcggcgctaccaagccggcggtctccggcaagcagggcaatgtgctcccgctctggggcaacgagaagaccatgaacctcaaccccatgatcctgaccaacatcctgtcgtcgccttacttcaaagtacagctctacgagctcaagacctaccacgaggtggtggacgagatctactttaaggtacgaagtgtgtaggccttggctttgggggtaagttcggaagagggggtatggaggaaacgggcgaaggcggcccccgaaatctgaagatttgtgggtgggggaaggtggttcggcggaggggtggctgcggcctgtagtgtgtctgggaggggtcggactggggccgccctctcgtttccattttagatttttagggccgggagagcccgccactattgatctctctcctcccccaacctcctgcccacccctggggggagttgggcaagagggatgggggagaggaggaaagagtaacagaagcctttccagtttacagctttaaaattattccttttgacgtggatctgctgagcgccaacttgttggtgcttctcccgctcacccctggccagggcgtgtaatgacttcagtattggcctcgtgttgttggtactcactatccgatccaggcagggaaatggtcagtgcgtgtgtgtcgggtggggtggggggatgagggtggagaggtgccatttcaagaggtgtacagaaggcctggaaattttcccagcaggaagtcaggagtaagaggtctcagccacctgtgcattgggctaatttagaattatctgggccctgggcttctgcggcagggtcggtgctggcttggctgtgctggggagctcacctggcgcctcctcactgcactcttgtctcagttcttgtttcgttagcaggattgactcagtcttgcagcgaggctcggagcagcccagggtcgcaggtagaggtatgcactattaatcatgctcaatcgccataaatgcatttccctggttaaatgaacgactaattagatttttgtgggtttttttggccattgctttt

SEQ ID NO: 55352 - DNA, 1011 bp, Homo sapiens
tcttaaaaacttgacagaccgcacaaagtgttttctatcatttgaacgtatgtgtagagatggtaacaaaaggacattctcttttgtcttgcccaccttttcccccagttgagtaattaggttattgaaggattttgagagattagttgctttttatagaaaacatctcttgaatacagttcaactttgggttgataaagtacacaaataaatttggaatcctcttacgagagtaggtctgattgtaattctatgaattagtttttttagcttttaaaaggtaagacctttttagcatggatacagtatggtgaataacatttaatccttagctttatttatgcagtaaactttaaacagttgaaaattgggttcctgctctttctgcggcaggttctgttttctaacataggcaaaatgttaatgtaatagaggaaagtctcgtttttaagtttcaaatgtgttttgaaacaagattctaccaggaattgtttttaaattccgttaaaaaactaaagacccagtttttttactaatattaagaagacttaagactttcagatcaaatactcactgaaatttataagtttccaactttgtaattttattttgtatgcatccagccctgcctttggctagcttttaaggaattgaaacatcttttacatggcaatctgtggggaagaaaggaaacgttaaagcactgcaaaatagtgtagtgcttaaacttacatgcacgcttttctatctaaagccattgttcaggactacaaaatttaccatgtgggtggaaatagaattttagaaatatgcagtgaaaaaacaggatttttttttatgtttttaaaaaaaaacaaagatgggtcttcccaaaagacctttttggattctattttagagttaatattcttttgttgttgttgctgttgttgttgctatttttagataaggactagtttttgtaagatgttcctcttagcaaatatgatactgtatcatctttgatgatac

SEQ ID NO: 55353 - DNA, 5719 bp, Homo sapiens
tttaaattaatgcttaacgttaatactttttgctttaaattggagacttaaatccatttttaaaggaaaatgttaagcaacccataagttaaattgtcaaatattatcaaagttaaaatattaccaaatagtttttgcaaccaagtgagactatagaaattttctgactcccagatgtagatatcagctctttataaagctagttgagtgggatttctcctctgcaaagctattaaggttttgttaaaccctagtagctttatgggtgctgtctaaatgtctaagcagtttttccaaaaatgatttacacacttaatatcagtaaacatatacttaatgccaaaataattttggaagagctgctctattatggacttgggtttacttttatcaggcttttaaacaaattcaaagtatgaatgtttgttgtgttcctcttttctattttcaggtcacgcacgttgaaccatgggagaaaggaagcaggaaaacagcgggccagacagggatgtgcggaggggtaagtagaagtacgtgcatttttcagtttttctgtgtctaataactaagtttatatttagagaactagaggcctgtcaattatacacttgagtgacaatttttttaatccaaattcaagtgttcagtgaaatagggttagaaaagtgttactttttaatgctccttagttctggattatggattgttattgatacctaacaggattaatcaattggtgttaagagtccgttaattattttactactttttcttaactcgtttcccctaaaggttcgaggtgttggaacaggaggaattgtttctacagcattttgcctgttatacaaattatttaccctgaagttaactcgaaagcaagtgatgggtcttataacacacacagactctccatatattagagcgcttggatttatgtatataaggtgagcgtacatttatgtacatttccagtaaatatctcattttaattcacatgtgtttaataatagtcttttgtaattctagatatacacagccccctacagatctgtgggactggtttgaatccttccttgatgatgaagaggtatgtcaacaagggtaataatttgttttcttctgattactctcatatttttattatcttttatttattggtggtttaatgtcttcaagaacttcctgtagttaaatttatttcagtgagatacttttggaattaatgtccttttactgagacctgatggcttttatgtattttagggtaaatttctgaagttttattttcttgttttaaaattgtttaaatgtgtttggtaactattggaaaattttctcttcttaattatgttctgtgtattgtattgatcctgaattgtatagttaatagtgacttttcaagatggggcatgctcaagatcgaacagataataaaagatatgcacatagaatactaattgtagcttttttttcttctggaacatttcagttcttcaccctctagcttcttccaaatatcagtattcccacttgcatagaagtgcagaattgaagagttgggtgttacataaataggctaagtgtttggatgacttgttcaaggtgacaaaattttaattccagttttctgactcctagtacaccacacacacctttaaaaaagaaattttttaaattgtaattcgagtctccctaatttgaaatctgaaatactaagttagatttaaatcgtgtatgcattggctgggcgtggtggctcacattgtaatcccaacacttcgagagttcaagaccagcctgagcaatatagtgagacctcatctctacaaaaaaaagtttaaaaattagctgagcatagaggtatgcatcttagtcccacctacttgggaggctggggtgggaggatcacttgagcccaggagacagaatttgctgtgagccaagatcattgccactgcattccagcctgggtaacacagtaagaccctttctcaaaacaaaacaaaatatcatatatgcattaatttacttgcatggtgaagtccaacatgtcaaaaatgaaatgatgagctgtattgtccctatgtctacccagtctactactttgtgttttaaggttcataagactttttgagtgctatgtgtcagtagtctatttacagagttcatccaaagaatttattgaattaaaggatggttctaatggaaatctattgtgttttgttattacatgcacacctaaaaaaaaaaaaaatctcatttagacatggagaatttttatttttctctttttttttttttttttttttgcctgttaactgagttacttcactcagaagaagcaaaacgtgttttaaatcacaatctttaaggtctttttatctttagatcagtttttcagactgaagtgcttctcccttctgtctttaaaaaagcatgttcctcttcataattggtgttgtattggttttgtttctggatgcctctattttatgttttttattgtgtttacaaatctgaggtcctctatttaagctaacttattgttttcttccttagatatctgcagcgattatatttggaaatactgtatatctgaacacttaaatgtgtgtgagtgcaagcagttttacctttagctcttgttttcctgtttagataacaaatctcactttccttgtgtgcttgcactataggtttgggactgacaatagctgactaacatgtcctgagctgtgagagggcatagcaagaaggccttcatgcggtaatgacccttttcagagacaatggtcatcatggattatgcgtttccaattatttgttcatttatttattttctacataactaaattagaaacctcactgcttcatggcagttggtttgctattgcttccagttttattagggcttcattttatattagagctgttaaaagataacctttagacaggaattatctaaagtagatcatatgtagctaggttatggtgcaaggtatatgatgtgtgcaaatatgtccacagaaataaatacatagtaggtatgtggaatgtaaatttaagtcaatcgttccgcatagtttagaaatgtaaggggctttttcatattgttaactgagtgagatcagttccctttatgcctgtgaggctgcagggtttgttctcacttgcatgcacacactaagcccaaatatttctgttcattcattgtcagatcaggatatgaaaataaaatttttctgttagttttttttgtattgagattccaaagatggtaatatttttataatattcatgtatatatggaaatactttttttgacggctagggtatcttttgtgtttctgtaggacctagatgtgaaggctggtggaggctgtgtaatgaccattggagaaatgctacgatcttttctcacaaaactggagtggttttctaccttgtttccaagaattccagttccagttcaaaagaatattgatcaacagattaaaacccgacctagaaaaatcaagaaagatgggaaggaaggtgctgaggaaatagacagacatgttgaacgcagacgttcaaggtaatgtcactcttgaattatgcttatttttcatatatgctttatacaaaattaatggttctgagaaatagcaagttcttaggaatttgtttttactgttcattttattagtttgtcacttttaccccccaaagattattttcttcctttcagggctttttctataaaattatgcatctgtaaatgagaacaataaaattttttgctttaatgattcttgacatggccttaagcttgaggacatgaataaataatgctgttgaaagttttactgtgaaaagaattgcatatgttttattcattgaaattttctttctccctccgccttccttaggtctccaaggagatctctgagtccacggaggtccccaagaaggtcaagaagtagaagtcatcatcgggagggccatgggtcttctagttttgacagagaattagaaagagagaaagaacgccagcgactagagcgtgaagccaaagaaagggagaaagaacggcgaagatcccgaagtattgaccgggggttagaacgcaggcgcagcagaagtagggaaaggcatagaagtcgcagtcgaagtcgtgataggaaaggggatagaagggacagggatcgagaaagagagaaagaaaatgagagaggtagaagacgagatcgtgactatgataaggaaagaggaaatgaacgagaaaaagagagagagcgatcaagagaaaggtccaaggaacagagaagtaggggagaggtagaagagaagaaacataaagaagacaaagatgataggcggcacagagatgacaaaagagattccaagaaagagaaaaaacacagtagaagcagaagcagagaaaggaaacacagaagtaggagtcgaagtagaaatgcagggaaacgaagtagaagtagaagcaaagagaaatcaagtaaacataaaaatgaaagtaaagaaaaatcaaataaacgaagtcgaagtggcagtcaaggaagaactgacagtgttgaaaaatcaaaaaaacgggaacatagtcccagcaaagaaaaatctagaaagcgtagtagaagcaaagaacgttcccacaaacgagatcacagtgatagtaaggaccagtcagacaaacatgatcgtcgaaggagccaaagtatagaacaagagagccaagaaaaacagcataaaaacaaagatgagactgtgtgaaaatattttgtaaaagtggatcacattgaatcctataaatgattaaatctgcttttttcccccacgttgagattgtgcagtagttcgcactcctcaagctctccctgtaggctgcattttcatttcctctttcgtgtagggaagtgcctttgtaattccatttattgcattggtgttttcacccaattgttaagtttgatacatgatgcacagattgttcttgcatttttattgtttgtttttgaaatgtacagtctgtacatatgtcctgaaaatgttttaattcctttggcatggttgccatgttggttaaatttgtataaggcaataaactgccactaatctatttttgttttgtaggtgtgggattatggtttgtgtactgaagttagcatggctgtgcttttcgtaatagaatgctaaagactttgagaatggatcttggatgtctattataggagaagtatgtgctgccaatgtacaagaaggcagcattgtaggattaacattcttgtctactgtatattatcttggaaggctcttgttaatatgttacacttaatattctccacagttacctttagagagaatttatgagaagttagtttctgatgcagaggtttttaggctgtgatttcatcaaaagtccttttagcattctacctcaaagggacacttagtatgcctaaaatttattcacttagttttccttttttatttgaaaaaatacatgacatgtaatctttttttcttgaattctttctcagattttaaagtactatattaaagaaaaaaattaatgtctaaagcctagcattcttgcagaaccctatactaacatgtaatggggagagggtggggcagatgagtagagaaacagattcaagcctcaagcttccaaagcatttttataaatggaaaatccttaaattatgaaacagcttgatat

SEQ ID NO: 55354 - DNA, 1347 bp, Homo sapiens
tttttaaacagagataaaagcaacagtgtttgatgactgcaagaaagaaggcgaatggaaggtagagtttgcataccttgctcttataaaaaataatacaaactttaaaaacaatacagtataaaaactacatagtatttacatggtattaggtattctagtataagtaatctaaagataatttgacgtatgtgggaggatgtgtgtaggttacatgcaaacactacactattttatataagagatttgagcatccatggatttttggtatacacaggggtcctcgaacccccatggataccgagggatgactatatagggtctggaatcacactgcttggctccaaatactaacttcaccacttaatagctgtggctccttgcacaagttacttgacctctctctgccccatttccttgtttataaaaatggtgatggtaatacctcatatggtaattgtaaatatgaggtgaattaatccatggaaattacttaaaacagtgctttgtgcaataattgttctacaagtggcaattgtaattttaagaaaatttgatgttaaacagtgtcattcaaaatgaataagctctatgtttcaaattagaaatatttctgtttgtttacttatgtacgatactatatgcatgtatattgagaaaatctctagctcatgcaagataaaagatgagatcattttgcctactgttctgatattttgtgttataaaaggcttataaagtttaatggataaaattctttttttcattcttggtaataggatgcttacagtatttttaaatttgtgtttgttttaagataatgcttttagatgaatttaccactaagcttttggcatcgtgttgcaaaatgacagatcttctagaagaaggtattactggtaagtgttattcttggcatgaacactttttaattgtaattgggggagatctgaggtattaaattttagttagtagttgtgtttctaaggagcttatttttttaaattactgtagccataactattagatttaacattcttttctctgaatcttctgtcagtttttttccctcagccgagacatataattaagacctctaaccaagcctaacttaattgctttgttgaggttgttctttaaatgttttactcatatatacatatatatatataaaacaattttgtatattgatacacaagctttacttcagtattttgatttagtttatggtttcatatatcgctttaaaatggatatcaagatttatgtcataaaatcagctgttgtacatgtttacaaatgcataatgctgacttcgtaaatttatctttattaccagaaatgaga

SEQ ID NO: 55355 - DNA, 1070 bp, Homo sapiens
aatatttcaccattgttatggtttactaacagaaaattcaaagtaataaagtacactttagtagaaaaatattgccataaactagtttgcttaggaaagtttttttctgtgttagaagattatttgcattcttccgaatgagaatgtataagtaaaaggattccttttttccccatatatgaaagcagaattaaattgtataaaataacatttctttgcatgttttgtttttcatgcagttcctattgaactataccttttggggggatggtaatgtaggtaaaagaaataatctatagtcttggattacttctttatctcagtgactttcctgtagcatatttgtatgtatatatgaagatgggtatatatgtgtgtatgtatatattttatgtgaaaggaaattctttagtttataatctgactctatgacctaactcatacttgatgccaacctttcagagccaaattatcagatttctttattctgtacaatatctgagaatgcatttttgaaaacctgatctctcacttattcccatgtagaacgttaatttggcaatctctgtttcatttcacttctaaaaaactttagcagacatttttaaaaaaacaaaaagatacacactttttagtctctacatgttggctgctagtgggttttaatgacattttatatcttatctgtaatataattccataagagaaaaattcatgattggaaaaaaaaatgcaacttaaaagtaccatttttcacctagcaaattggcagagggatttaaaatatatatatatgggtatgtatgtgtgtgtgcattctggctattctggttatcagtggataatggagcagaaactgccatatactgctagtgggagtatagattgatacagcctttttggaaaatagtttgtaatttgttatcaagaaccttaaaaaatgttttatattttagagtttattgttaggaaataaataaatggtttagctaagtttctagtagtaaataaatctaattaaattttagcattaataaataatagaccatatgatgatatctgaatgaaat

SEQ ID NO: 55356 - DNA, 1063 bp, Homo sapiens
ctatatgctttgtttttttttcccctcagtttgccctgataatctctttaacaaaattaaggcttcttgctccaagtcaataagaagatgtaaagaaataaatatttccttcattccacatgaatctcaggtactttctatttttattttttagttcatgagaggtttcaaatttggttttatggcttattgttaataaagtatattctgaagatattttttatatgtatttggtgaattttgaacctaatccacaaatagacatttcccatgatgaagtcagacgcgtgagcaataaattggaattaaaaatgaatagcagggcttaaatttcatatctgccaccaagtcctttgtcaaattacagaactaccaggttatgaaatcaagagagttttgagcacagtctttgttagatgactccaaaaaaagtgtttcatttagcttgtgtaaccttttgtgatattaaaacaaatgctctttaataaactttttatataatattatgtaaattattttaatttataaagtgaggggatttttgacttgttttgcctttggaacattgagccttcaattaataatagcaatgattataatgatataagcaaacactcatataatactccctatgtgtcatatactttcctgagtgttttacataaatttattcatttaatcctcacaatagccatagtaatagattgtacttctccattttgaagatcaagaaatcaaagaggttaagtaccttgcctcaaatcacacagctaatgaattgttaaggtttgttttgctctgttctctgtgtttggattctagcattttatagaattgaaatagttgactgttgtttggaactatgatcaatattttaagggatagacaagtcctagacaagggatttctactatattacttttaagatactgctgggttttttgtttttgtttttttctttttttgagactgagtttcgcttttgtcacccaggctggagtgcaatggcgcaatcttggctcactgcaacctccatctcccaagttcaagcgattctcctgcc

SEQ ID NO: 55357 - DNA, 1011 bp, Homo sapiens
actaggaatggccgctgtttctgaaaagttactgaacatgctcagtggtgaagaaggattgaaatattgcagcataggcagatttcaggaagatgtcttacagaaattttgttacattaccccaggctactgcactttacatatttgaaggacaacacattatattaagcgaaggaaaattgatttaactgctggcctctgaaaaattctcttttctcctaccaggttctacacatgttttaacacccaaaaagctgttggatgatataaagatgctgaataaacccaaggataaagtctccttaattaaagatgaatagcatttctttttggagggtttagagattcttactaatatgttgaactaaaatagaaagaaaatgttgctgtcatgtaatttaaacaatgtaaatattttatggaataatggcttttcaaatacatttcttaaggaactgtttatgattattactggatttgtcatttttgataatttaaatattgctgctgctttgtagatgatgagaagaaatgttaaagtgctttctaaaaggaaattttttcacctttggaggagaatatattagagttgtgggtaatttttcacagccacctatgtacatactaattacccattggatacttatatctaaaagtctcatgctgaagtatagtttttgggaaagaatgattttaaataaagagattgtaaaagtaaaaaactgtaaatgtatatgtatgatagaattgtttcctctaagtgtagtttttctttcaactaaaattcagtttatgtgtaaaataattcagtcattaatagaaatggagtgatttcacagtgtgtactgttttgccacatacttctaaagaacacaattttatataattttgaaatcatgtatgtttaaattagaaaaccaaaaatcatgaacattctaagagaaaataaatatagaatttaaaaaattattctggtttgtgttttctgtaggggagaggggaaagttacaa

SEQ ID NO: 55358 - DNA, 1038 bp, Homo sapiens
ttcattagtctggtttatgatatagctgaaatacttaaaaggatgttatatagaagaggaattaggctttattgtatatggcagcagaaggaagaagtagaacaaatgggtagaaatggaagaattgctcaaagtatggaacgattttcttacaggaatattcaaaattaagattagctgctttatgacctatgtaggaatgctatagtaagatagtggactaactgacctctaggattgtttataacactgagattccaggactttatgattgtatatctaccaatttatctcatatatgtatatgtatatccttctttgtctttctcaactgttatctcagaggttatagtttatgtctgatatgctgtagctctctctaatgtatcggtatggattcatttttatttaaatattctcagtctttatcactgaagattttacctttattcctctctttttctttctcaccctcctattagatatattatagagctgctcattttgtcctccttttctctgaacttctctttattatttttcatctgcttattctttctttagctgcttaactagtacattgagggtttgttgttgttgttgttgttgttttggtgggggcagacagagttgcactgtgtcgcctgggctggagcgcagtggcataatcttggctcactgcaacctccgcctcccgggttcaggctcactgcaacctccacctcccgggttcaagtgattctcatgcctcagcctcctgagtagctgggattacaggcttgcatcaccacacctggctaacttttgtatttttagtagagacagggtttcaccgtgttggctaggctggtcttgaactcctggcctcaagtgatcacctgtgtctgcctcccaaagtgctgggattacaggcatgagccattgcacctggccctaactagtacattgagttattaatatcagtgttcatggtagttttttgtttcattttgttttggggcagggtcttgctctgtcaaccaggctggagtgcagtgg

SEQ ID NO: 55359 - DNA, 1116 bp, Homo sapiens
ttaatactaaccagtattactaatattaatactaagatttaatataaatcttgctaaatactgacagtgcatatatatatataaatataaatatataatatataaatatatattatatataataaatatataaatatagacagatatataaatataaatatatatagatagatatataaatatacatatatgtataatttttttttttttttgagacggaatcttgctctgtcgcccaggctggagtacagtggtgcgatctcggctcactgcaagctccgcctcccaggttcaccccgttctcctgcctcagcctcccgagtagctgggactacaggcgcccgccaccacgcccggctaattttttgtattttttttagtagagacagggtttcactgtgttagccaggatggtctcgatctcctgacctcgtgatccgcccgcctaggcctcccaaagtgctgggattacaggcgtgagccaccgcgcctggcccgacagtgctaatatattaatactaaccaggatggctaatgccataattatcagcactggaagatgaagcagcgctggaatttccttcatgagtgctttaataaattccccagttccttttccaatatgcttcaatggctccgttacaaatgtggtgaatgtaactgcaagtgcctaaaacgagagaaaagcaacttaattttctcctcacaggactaaggtacagaatgcatcaaaattcattgagtactgatgctgaaagtatgttacataaattaaaatgctgttgtgccatttttaatgtgaaaatcactgtgcaaaagtattttttcttggacaaacgcttattagcaaaatgactcaaacactaaagttctttaaaatacaagggatttctgactgactttaagtaatttttacaaaatatatgctatacctttgttggtgggaccaaccaaatagggttgactagtaagagctcatagtatttttggcatgggtcatccttataggtccatgaacttctaaaccattctgtttagagaaacagacaaaacactgatcatttcttttaatgttgcatttcattcccaaacaagacattactttggttttgaccc

SEQ ID NO: 55360 - DNA, 1044 bp, Homo sapiens
ctgccttcctgagcattccatacagcatgggatgattaattgctgattaaaacattaataaaaggccaaaagtcatatgcacattgaagaaatactctgttgtgtccttcatttcatcgtctggcttcatcttgtttctgtttctctgtccctttgtttctctctgtgtatttattctactcttccctcctgcccttccttccttctttctcttgttaaattgttgctttggaattagaaagaggcagattggtccagatgctctgcttgtggatctctgcctcctttagctttaaagttgctgaaagtcagcagaaaaactgccaggttagggctaagtattggatctgtgctccttatttgttgcctacttgccctttgcaaagagaacatggggaagcaggccagctctgcactgtaatgtattatagctgataaatgcaaacttgatcaaaacaactagctccttaccttgattccgatgacagcactaggctagaaacttaacccttatattatactttgactctaactaatgttgaattgattttatggttacagattgatgagtgtgaaaagaaaaagagggaagactatgaaagtcaaagcaatcctgtttttaggagatacttaaataagattttaattgaagctggaaagcttggacttgtgagtatttgatggtgtgatactaatccgtatagtgtatatttttatttattaatttcaaataatatgaagaagtgaaagcatcatgatgctttttaacagagaccacctgactgactctttaaccagaagctattcattcaggattaaaggcactactatactgctttgcagtggtctggtggaagatgagcagtgcagaccgctctttctcctctagtttgtatggatttacttactcagctctgtgcactgctccaccagttaatggaggtgaggaggtggggtgataattctgttctgatcctactccttgttttctctcagtatatgctgagaaaaagaaaaatgtgttttctgtagtttttctccttg

SEQ ID NO: 55361 - DNA, 1068 bp, Homo sapiens
ctggtagctggttatgctcatgatgatgactggattgaccccacagacatgcttaactatgatgctgcttcaggaacaatgagaaaatctcaggtattaaaaaaaattcgtgcatgtgtgtgagaccttatcagtcccatgatggaaacagtctagctctgttgttttgcacagagctatgagggtcatggatccatgattagcaattatgcagaatattttcttgacactgttaatctaaaattatttcaaacctacctggtattgaatttgaatgtaaagcccttgaagtagcaaaataatatgattttagttcttagtgtgtacatttgaaactttttttttgtggttcagtacaatttaagaatataacatgcagagtcatgaaatgatgaagtcagaatcttagtcttcattaaccaaaggctatttttgtaactaaactataaagaaataaaatgtttctatactctgttttaggcaaaatatggtatttcaggggaaaaggatgtcagtcctgacttgtcatgtgctgatgaaatatcagaatgttatcacaaacttgattctttaacttataaggttagtttttttattgataaattttatatttttatattatgttaaatcgctctatattcttgtctctgctgataaatttgtatttctagtgtttccgtgtaccgtatgatttttatatgtcaaatttttctttggatactctaaccttggtttcttattagttattctagccttggtttttctagtagtaccttgtattttcctgtaataacattgacatctctgtgttgtaagtatttctttaccagactgcagacttcttggtgcaaggaatacgttttattgatcttaattctctgtcacctatcacagggctgaggcatagtaaactctcaacaaatgtagcaaatgaagaaatgtgtctattaccagcttatacgaataagagttactcttaagaaggattattataatttagtgtgtaatagctattcattccttcatttatccaatcctcttaaaaaaatgtagctgaagagtttacac

SEQ ID NO: 55362 - DNA, 1105 bp, Homo sapiens
tgtggtcccagctactttagaggctggggatcacttgagcccaagagttcaaggctgtagtgcactatatttgtgtgtatgaataacccctgcactccagcgtgggcagcagagtgagatcctgtcttatgcctgaattataatagaacagtgtttttatagataaaagtttaatgtactaataaaccaagtttattatttttattttagttgtgaaaacattatgttcctatcttgaaagctgttgcatatcctacaaattatatgagtattctgtggcaatataatttattctttgtactcttgtcgttttcatatttcatagcatgttttttatagtgattatttgatcatttatatttttcttacagctggaatttaccatgcaagaagctgtgcaatgtttacatgctctagaagaatactgtccttctaaagatgactatagtaagctctgtttgcttttgactttgcctcgtctgaccaatcatgccgagtttaaggactggaatcccagcaccgcacgagttcactgttttgaagaggcttgtgtcatggttgcagaattcatccctgctgataggaagctaagtgaagctggttttaaggctagtaacaatcgtttatttcagcttgtaatgaaaggcctgctttatgaatgctgtgtagaattttgtcagagtaaagcaactggagaagaaattacagaaagcgaagtgcttcttggcatcgacctcttatgtggtaatggttgtgatgatttggatctgagtttactgtcatggcttcagaatcttccatcttctgtcttctcttgtgcttttgaacagaaaatgcttaatattcatgttgacaaacttctgaaacctacaaaagctgcatatgctgatcttttgactcctcttatcagcaaactctctccctatccatcatccccaatgagaagacctcaatcagctgatgcctatatgacccgctctctgaatcctgctttagatggcctcacctgtggactaaccagtcatgataagagaatttcagaccttggaaacaaaacttctccaatgtcacactcctttgctaacttccattatccaggggtaca

SEQ ID NO: 55363 - DNA, 1026 bp, Homo sapiens
cagtggcatgatctcggctcactgcaacctccgtctcccaggttgaagcgattctcctgcctcagcctaccaagtagctgtgattacaggaggcttgccagcacacccggctaatttttgtatttttagtagagacggggtttcaccatgttggccaggctggtctcaaactcctgacctcaggtgatccgcccgcctcggcctcctaaagtgctggaattgcaggcgtgagccaccgcgcctggccgagaatgatgttcttacaggtttgtgtaattgtattcttccttatggttatacttcctggatgcttaattaagctcggttgaacatcacgtatatttgtggaataaggggcttacaaccaacaggagtagacaaaacctgaacatattaaatgttaagtaactgaaaaatgctttcaaggcagatcagctttgcaaaatgagaaaccaggaaggggacaaacaaactactggagttttctgggacgaagtgggacctaggaaagcagcgaaagaagggtagaaggcaacattaatttcattaacctttattaattatcggggaggagtatgaagagtcaatcctaatgcgcagtcttctccatttgcaggcgacaatcctgttcgtgctattttgggacatggggtcaccggccagctaagggtctacgtccctgccaccagtctcacgctattgccgcacccgttctgctactcccccgggcccctagccggtccctccaagcccgacccccgcccgccccgcccaggctttggtccgccccgcccaggctttggtccgccccgcccctccccgccccagctttgggcccgcccctccacgcccctccccgccccgccccgccccgccgactcgcccttcggctcaggcacctgcctggccgccccgcgcggcggggtcctgaggcgcctcggggaagcgcggcgattggctgccgctcgcgggtagagctcggctccccggcacttgacaaccgcagtctgcaagaggctgagctga

SEQ ID NO: 55364 - DNA, 1305 bp, Homo sapiens
acagctatagtaggccaggcgcggtggctcacacctgtaatcccagcactttgggaggccgaggcaggtggatcacgaggtcaagagatcaaaaccatcctggctaccatggtgaaaccccgtcactattaaaaatacaaaaagttagccaggcgtggtggcaggcgcctgtacttcccagctactcgagaggctgaggaaggagaatcacttgaacccgggaggtggagcctgcagtgagccaagatcacgccactgcactccagcctgccaacatagtgagactccatctcaaaaaaaaaaaaaaaaaaaaaaaaagctacagtatagcttacaagggcataaacatacctaacacattaaatactactttatcctttaaatagtcaaaagtcagaacaacggcatggtttgcaaggtactttgacttatgtgtggtcattaaaacccagtaagtaattcaagtatggtaatataaaggcaggcaattacatgcaccaatatcaccctaaaatcaaaggcataaaaataaaggctgaaaactttgtgtttctccatctttcatttacatggctagatatcagaatcttactttagaaaatatacaattattatatatggtttccccagatggtaattttcggaaactacaaaaagtgtcaagatccataatttgcttcatcaaatgcttttctagctcgtttcaattcttcattcatagtaagcaagtctttaaccctggcaaacttccttgggtcctttcgaatcaagaagacgatatcttcaacttgtactcgaccttgtcttccaattgacattgccttgtgagtctattacaaagaaacatattacatttaacttttttaaatctaatattttactgttttaatttgcatttattaattgcaagtgaggtagaagattttctcttattattattattatggctattcatttgtgaattatctttctactcatgtcctttgtctattttctactggattattagcaatgttctcctttatgcttcacaggcactttaaaaaaaatcttaaggacatgaaagctgtcaactttattgttccttttttgttttttgatatatgtagattttgtcttcatttatataaaataattttataattttgtgtacccacccatttcatttatgctttgtgtcctcctctatcttaatacccaataaatattggtgggttttctaaaaatcaaataactctatctcatcctgtcattatatactcacctgtgcaaaatcaaagacctatcacagcattatttctaatg

SEQ ID NO: 55365 - DNA, 1043 bp, Homo sapiens
gctggcggatcacctgaggttgggagtttgagaccagcctgaccaacatggagaaaccctgtctctactaaaaatacaaaattagctgggtgtggtgatgcatgcctgtaatcccagctcctcggaggctgaggcaggagaatcccttgaatccgggagacggaggttgcagtgagccaagatcgtgccattgcactccagtctgggcaacaagaacgaaactccatctcaaaaaaaaaaaaaaacaaaaggaagaaggggggatagaatatacatgtataacctccatcctcaatgataaatagtaaccaataacttctgcaaacaagcactcaaatggatagcttatttcaaagggatgccataagttctagtcttacctaaagtttaatatttcaaatctattcttcaattaactaagaccagttaggaaagaatcttaccatttcagtgataaactctatgacaagatcttcaagaatatccactgactcagtataaggattctggtcatccccaaagccatacatcatacatcgcactgtaaaagaacaatcacttacttttgtttacttttacagatttaacaatttgatactttaaaaaaataaagtagaaatgaaccaagttatagataatattggtatgaaaacatatttacatcgtatttgttatctccaagtatggattcttgtgtaaaaggtttaagaacagtctgatgaccaactgttcccacgtagcctccagcaaaactcttccttcctcccacctactgaaccctaaggtaaacagtcttttcctaatctctagcatctacttaccagtccctgcccccagcagaacacctttaagtaggaaactctggcaaaggacaggacagacagcaacagcttagccttttttggaggtggtttttgtgtgtgggcatggcagtggggcgttggaaaaacggcagactctttactgatattaccataggggaaaagacatgagagacagttctccaaatactttttttgtttgtttgtttgtttgtttttctt

SEQ ID NO: 55366 - DNA, 1415 bp, Homo sapiens
ccattgcactgcagcctgggcgacagagcgagtctccatttcaaaaagaaagaaagaaattgaagacaaattaaagtcacgatcacagaaaaactaaagatatgtatataactatgtagttatacaaaggtcaaaaggctaagtgccgtggccatcgcctgtggtcccagctactcaggaggctgaggtgggaggatcacttgatctaggagcaatgagccgtgttcgcgctactgcactccagcctgggcgacacagcaagaacgggtctccaaaaaaaaaaaaccacgattctgtaaggtggaaattagtactgccttttcctgggacctatgttcccctccgagccacgcgagggcagcaacgcgcgcactctgaggaacacccccttcctcaggactcgtccgcctgtgctcggtggtttctcccagaatcctccaaggcgcgggagggggcggagagcttaaaagtcgcggggggagcggacttccgctgttttagggagggagagcggcctgggtcctgggtgttgtgtgcggagctgtggcgtcgcgtgtgaggcgcgtgcagggtgagtgtgagtggacgcgtgagtgtgtgagtgtgcgcgcttggagcgtgttaggcgagtgcgtgcgcccacccctgcgcccctcctcccgcttacactttgatcttatttgatcggatcgtgaccccagccccgccgggccgacccgaaatgaaaagctctcctcctgcgaagccccctcggggcgctgtgcagcgaggccccttaggcggcggccacgctgtggtccccgaggtcccggagctggccctgcggggcccggcgctcagaagtgatgaattgatcagatagacgaggccgggcttgtccccggccactgattatcgaggcgattctgatctgggcacggccaccgggctgcgggctgccggtggcgtaggggcgagcacgtgaacggcggcggcgggcggggatgctgagcgcggtggccaagggtaaatgagccgctgcccctccccctggagctggaaggtcgcggaggcctttttggccgctgatatactttcctcccactttcccatttctccttgtttttcttttttcttttgttcctttttttttttttttgagacagggtcttgctctgtcgcccagactggagtgcagaaccgcaatatcggctcactgcaacttcgacctccttggctcaagcgatcctcacatctctgtctcccgaataggtggaactacaggcgcgcgtcaccacgctcggctaatttttgtatcttttggtagagacggggtttcaccatgttttgccaggctggtctcgaactccagcctcaagtgatccgcccgcctcggcttcccaaagtgctgggattacaggcatgagccaccgcgc

SEQ ID NO: 55367 - DNA, 1006 bp, Homo sapiens
ctctaggcagttatctagagcaaatgattttacaaaccttctcattctctaactaaaacaaggactgaatataaacatgaatgaggtaaagttcattaagcccacatcaggaacaatattcctgagtctccagtgagagctcaccactccctagacctaacccaaagataattccatatcaacaagagttatcatatacaacaatttagtgtgtacggagttggtggatttcaggcccaagagagccttcactatacttttggggaagagtagagcacaatagaacctgactagagcagggacacaggtggctgagctaaccttgggggggactgacttctgtagataccaaaggatgacctggacttccgcttagcagccttgtacaaccaccacactgggacattcaagaacaaaagtgagatactgttaaaccagaaaaccacgcaggatacctataggtaagtggtagaggcagagcctctccagcctaaacatgctgccatccagtcatataaggtaaaatgtcacctggaaaatgataatcactaggtactcatttgtatacaaatttctgtatttttacatctgtgtctataatatagtttctgtattttcactgtctaagatgaacagaaatctcccaagattgtgctcatctgtataaacaaaatctttggttaatcccacagaggtaaaaagagtctttggctgctttattcttgagatcacattcaactaccttgccttcctcacctttctctgattgatttcactctccacttttcttccctatgccttcttctagaaccaagatccaattccctggagaatttttaacccctcccactccacccatcactttcctggctaacatcagacactggatcaaccctaaaaaggagtccatccacagcatccaaggatccataggtaagggttagaggactgggtaagcagatggggcagtgggggagtctttctaaatggacccatgaatcaggga

SEQ ID NO: 55368 - DNA, 1137 bp, Homo sapiens
tgacaatttggtttatccaataatcagattaataaaggtataccatttctaaggcacgagagcaggaatcttaagctgaggtagccctgggactaaatatgccatcctcttgtatcaagatggagaagacggccgaggttcagggaaagagcccagtggaagaacccaacctagtgagaggaaaacgggcacctggtgaaggccccggcctctaagctagggatgaggggacaggcctctgcctagcctgagacaggagtaggaaactgaggcattcacacttttatgtggcgatcacagttcctgcagactgtagcagagctggggagcaggaaccagaggtatagtcccacgcccacccactctcccctcccctccctccgcggccccgcctccaaccagccgcttccggtcgcggggagggtcgcctgcgggctccagctgcgcctgcgcaggaagggcgggtcagcgcgccggcgcagtgcggcggtcacaggctgagtgctgcggcgcgatccttgcttccctgagcgttggcccgggaggaaagaagatggtgctggatctggatttgtttcgggtggataaaggaggggacccagccctcatccgagagacgcaggagaagcgcttcaaggacccgggactagtggaccagctggtgaaggcagacagcgagtggcgacgatgtaagtaccgggacgggcgggttacctccttgatgctaaacccaattttctctctcaaatccagccaccgctcctgaggccacagcttccacccttcgtcagaccccctcccagggtgcggtggctccgaggttctccccatccccgaaaacacagcctggtcgccggggtcatcccactttctcctccacccgggcggagcgaggtcccttccacgcgtgctcagtgccgttcgctgccagtgtgcgtacgcacgcgcatcgggagctgtcaagccttcctgccccaggggttgccagaacatgccggggcgggaggttgtggggtctacgcggctttcctaacacgaatctttggtcccccccagtctttttctcatcttcagcaaggccagagtggttttcctttgttttgataggatcaaaggcttctcctgagactgcgtcac

SEQ ID NO: 55369 - DNA, 1010 bp, Homo sapiens
aggccgggcacagtggctcacgcctgtaatcccagcactttgggagggcgaggtcaggagttcaagaccagcctggccaacatggtgaaaccccgtctcttccaaaaacacaaaaattagccgagtgtggtggcgggcacctataatcccagctactcgggaggttgtggcaggagaaccgcttgaacctgggaggcagaagttgcagtgagccgagattgcaccattacactccagcctaggcaacaagagcaagatgctgtctcaaaaaataaaaataaaaagctgtaagattttataacttcatgaggcagatccttcagctctgccggcatttgggccttaacctgaaatcagtactaagaagtcaagatcaggagaaaggagtatcttaattatgggcatttctttggtatagtcttggattctttattcctaggtagatttcgggcagacaacttgaacaagctgaagaacctatgcagcaagacaatcggagagaaaatgaaggtaagagaactgaataacaaacagccatgagaacttgagcggagatatttgatcttgctcttagctaatgttcacagaagttctaactcagtgtttaagtctacaagatgttcaatttcttaccaaaggggaaaatattattttaaaaagatagggaggcagggaacttggaggcattttcatatactttaccacaagtccatcttctgtgttcaggtaagattctttgttgtctagctgtttgttgtctattctgttcttatattagaaatataaattccaccagtcatcttttttatggcagatttcagatttgtcgtctcagcgtagttatgctccataatgaaaactacagattcagagttcaaatcttgctacgttatgtgtcttttaggcaagttaatgcctcagcctcagttttctcatttataaaatgacaatactaacactcacctacagaatggaattgttagaactttttttttttaatttaaacgcca

SEQ ID NO: 55370 - DNA, 2301 bp, Homo sapiens
agccagacgtggtggtgcactcctgtaatcccagctgcttgggaggctgaggcaggagaatcacttgaaaccggaaggcggagcttgcagtgagcccagatcacgcaaactgtactctagcctgggcgacagagtgagactccgtcaaaaaaaaaaaaaaaaaagaatccacactcaggtgtgtctgctccagggcttgctcctgagcactgcactacctctccagcgcttatagctcatgagcatttcgaataaattctcttctgattcctatgatgatctatgtacagggaatgacattcttctcatattcttcaggatgttaattctctgacccagacagattaattgattttaggatcaaaaagctattaagtggcagcatagggaggggcttgacactttgacttctggcttccagtgtactaatttttttcctacatgttgtatcttttagaaaaatttatgtaagaagttctgtgattcatttatataatacgttaatttggtgtacactttataaaacaatgccagagattttcttttatttatttgtgttgggtttttttccttcctgcagaaaaaagagccagtgggagatgatgagtctgtcccagagaatgtgctgagtttcgatgaccttactgcagacgctttagctgtaagttatagttcttttctaagttaggatctctgctattttgtcttaattttattcctagacagcaagtgctctcactctgctccacacagcattgtgacatcctttcatttctgctgctgggaaatgtccccacccattcttgttatattctatatttgagtatttattagacagcagagatggagacagatggagtgggagagtcggagagtcaaggacaggaagaatagaaaaaggaaaggaattgtgtttggtttatataactccatattctaccgtttgttacacaaaggcaagaaacttcagtttactgtaacacagtaaatattcagtacgctggcaagagcagtaatttttgagttttttagtcactgaaccctttcttgaaacccttaacatatagcaagaacataaaccaaaaaagcaaagttgctgtgcttgaaggtctcggattgggggcctgaacctgcctggccctactgctaaagcgcttgcctcaaagaaataagagcacagtttgaaacacctgcaatacagaatacaaaatatgcttcagacaaatctcttactcctaataaatttataatcttcctagagaacagttgaatgcagcacatcaatggagtgctaaattggttcagtcaagaaaatcagaaagtgcaaattaagggaaagttctcataagagagcggcagtacttaaatttctgcaatgtatgggaacaatagatagtggccagaactatctatctctgcctcaagcacccccaaagaaaaatgccgatggatttgtagggcaagactgtgtatatctgtgtgtgaaggaaatctcagttcttaaaagtcttcgtttccagtttttaaaatgctaccacaagggctatctttagagcacaacagggttagggcaaccgaatcatattcctgtgctgtccttgcctcactgtcctgcttatgggcctggcctgttcatctgcagaacctgaaagtctcacaaatcaaaaaagtccgactcctcattgatgaagccatcctgaagtgtgacgcggagcggataaagttggaagcagagcggtttgagaacctccgagagattgggaaccttctgcacccttctgtacccatcagtaacgatgaggtaggtggctgtgccgcagcaggaggctgccttaggtcgctgctgtctctgcaggggcggggacgggaggagatctgtggaacactggcattgtctgtcagaagcaggttctttgtatattccctctgcccaccaattgagaattgcaggagtcagatccttgtctgattgggaagtagcagagacagcaggtaggaggagactcctggcacagaaatctcttctaaatagggctgctgtcctccgctgcatgttgcccgtggtagcaggcatctcgtgggagggatctgctaaatcaacctaaccccttcacccacaccctgctgagaagctgcaggttgaagggaaatctgcatgataaaagtttcctgctgagcgggagcttcccctgcacaaagctgctctgagcccagcctttgttccccgacaccccagccgtagcagggcccatctgtgcctctttcattcattccctggtgaacattaaactcactgcaggc

SEQ ID NO: 55371 - DNA, 1828 bp, Homo sapiens
tactacttctccattgagtagcaagttgccttctctagttatgagacacagtagtgtttgagttaagcgatgacttcacaaagttaagttgttcgtggaataaagtttggaaagatggaggttgtagaattaagaaatcatatatcaagcttggcgcggtggctcacgtctataatcccagcactttgggaagcctaggcaggcggatcactcgagcccaggagttcgagaccagcctaggtaaaatggcaaaaccctgtctctacaaaaaatacaaaaattagccgagcatagtgttgcacacctgtctgtagtcccagctgaggctgaggtgggaggatcactggagcctggaaggttgaggctgcagtgagccaagattgtgccattgcactccagcctggatgacggcgtaagaccctgtctccaaaaaaaaaaaataatttaaaaataataaaatcatatgtcttgtatgtctctttcttgctctgtttccttaggatgtggacaacaaagtagagaggatttggggtgattgtacagtcaggaagaagtactctcatgtggacctggtggtgatggtagatggctttgaaggcgaaaagggggccgtggtggctgggagtcgagggtacttcttgaaggtaagagctgggaaccagtgaggataggattatgaaaaagaaacaaaatatatatatatatatttttttttttttttgtagagaaacataatctgtttaaagaggcccacagatctaccagttgtacttgcctttctgcaaatgtattggcaattagatgcaattctctttctaaagcaagagagggcttatcaggattccgtagaacaaaagccactaagtggtcctccataatgaatgtctgttttgctgactgaatcagaacagtctctgcctttaagtagctcagtataattggacagtcagacaagtaacaaagaatcaaaatccactgtcataagctctgtggtttgtgtaggcccaaagtgctttgagaacatcaggataattctcttaacggtgtgcctggatgatttgctgggcttcagtgttcagaacgaatctcaaggttcagaatgtcagttgctgggatctgtggtcttttcttggcctcctgcttgcccctcggtagtcctgttctcttggcccaggtgcctttaggtgtcagttctagctgaacatgatggtgacaagacccaatcacatagtactgtgtctctgctcctctagggggtcctggtgttcctggaacaggctctcatccagtatgcccttcgcaccttgggaagtcggggctacattcccatttataccccctttttcatgaggaaggaggtcatgcaggaggtggcacagctcagccagtttgatgaagaactttataaggtgagtagcctgggtcaggtgacagaatgacttcttaagttatgtagcttaacttcagtgatgcagagtggtgctgtccaataggactttctgcgatgatggaaacgttctctctctgtgactcttgagcacttaaaatgtgggtggtgcaatggaggaagcacattttttattttaattaattttaacttaaacatgtagctaatgactgccatattagacagtgcagctgcagagcctcttttacctttccctgggtaatctgtatgatgtatctaaatcaagcatacttgaacaccatgagcttagaaaagaagcccattccttgggtgcttggacaaaaggaaattacagtggtggcactgatctcctagcctgcttcccatgtcctcccactcctaaccccagactggaagctt

SEQ ID NO: 55372 - DNA, 3381 bp, Homo sapiens
ggctgaggtgggagagtcgcttgaacctgggaggtggaggttgcagtgagccgagattgtgccactgcactccagtctgggcagcagagtgaggctctgtctcaaaagcaaaaaaaagataagtggaaaatattctttcctcttaatttacatttctttgatctctgtcagggaccccattttggactgacccattcctttatctttttagtattctctccccactcccaggcagggattaaaggaaatttttcctgcactattattgatctctttcttgtggtttcttattctagccaaggtcctccccacttcctcttaactggtatagctccttccttccacaggtgattggcaaaggcagtgaaaagtctgatgacaactcctatgatgagaagtacctgattgccacctcagagcagcccattgctgccctgcaccgggatgagtggctccggccggaggacctgcccatcaagtatgctggcctgtctacctgcttccgtcaggaggtgggctcccatggccgtgacacccgtggcatcttccgagtccatcagtttgagaaggtgagtagatgggtcagggtaaggagtggaactttctctgtctccagaatggttagatgagagataggatctgtgttgctgaggcccatcctggctccagcttttcctctcattgcttacctctgtgtttctggggaagtgcatggtggagtggcgtggattatggaccctgaaaccaggctgcggctttaccactcaccagctgtgtaacattgggcataatgcataagcccccagtgctccatttctgcctttgtatgaggaggataacagtaacagtgcctgcctcaccaggcctattgtggcctattgtgaggattatcccagtcactatatgtaaagcactcagaacaggggctggcatgcatacgggaagctcgcaccataagcatttgctcttgtggtccagtcccagttgctgggggcccagacttgcctgcctcccagtggtgtggaaacaggtcttcatggcaaggatgtctcccacttcagtcctttattcaccctataccgctgtcaccgtttccttgggtccctctctgcagattgaacagtttgtgtactcatcaccccatgacaacaagtcatgggagatgtttgaagagatgattaccaccgcagaggagttctaccagtccctggggattccttaccacattgtgaatattgtctcaggtatgggacccagcctcttctcagcctccctttcctgtaatcccagacgccacccttaccagctgagctgccacacagagaaacagctcacaattcaactcattgcccacattaattaaaatattacactcttctcacttgggagtatttggtgttaagaatatctgggtgtgatttcacctctggagacaggacatgaattaaagaattcttcaggcttgctaaaggttagccttctgaaataccatccctccttcatgaattctaggggtttttccttacaggttctttgaatcatgctgccagtaagaagcttgacctggaggcctggtttccgggctcaggagccttccgtgagttggtctcctgttctaattgcacggattaccaggctcgccggcttcgaatccgatatgggcaaaccaagaagatgatggacaaggtagatggcccccagggaggtgggaagcagagtcttcagtacacggcccgtccgaattatttctcagcctttggggtgcactggtccccagcatcatgggaaaatctgagcttctcaatctagaccaaaaagggaatctgaaaatgccttctactgagtcaggactgagttcttttagctagaaacctgaatctagctctcttctataaggtaattctagcttttctctttctggctttgtttttcttaactccagagaaagaataatctccatttatctacacagaacaagttggaggcttccctcttctcacccaagaaggtctgggttgtaagctgctctcttcaaacccaattttcaggccctactcttttccaagtcaggtgcttgaaaggggtgaaaaggaaaggccacaatagtagtttcttccttccctcaaagggcccaactctcagaataccagaagctaccacttgtcactcatcgaaacatgagggatctttctgcagttatctaataggcaataaataccaaataattcaaatttagaaaaaagttgctaaggggtagaacccatcattttgatttggacagttgtggttggggaagtctggttgaatggatggttcctggccgtcagtaagacccgatgagagttgagcccgacttcccctctgggaccctgtcttcccaggtggagtttgtccatatgctcaatgctaccatgtgcgccactacccgtaccatctgcgccatcctggagaactaccagacagagaagggcatcactgtgcctgagaaattgaaggagttcatgccgccaggtaaaactcccagctcatctcatcgttctcctcttttctgtcttcacactcttctaaatagcagtcccctttcaggatataccaggtttttttgttcagacacagcccctgaaactctgtctgccctctcgggctgggcagggcagggggcctggttgagaaagtagccagtgcaggtatgatgttgaaatgctgctaaaattcagactagggaagaaaagaataaaggaaaccagtgcctatcaaagggacccctctgttcaaagggatcattgtcttgttgaattctccccagaggtcttagggctttgactcactgagaaacaacaggtcatttggttggctcttccctcccaggactgcaagaactgatcccctttgtgaagcctgcgcccattgagcaggagccatcaaagaagcagaagaagcaacatgagggcagcaaaaagaaagcagcagcaagagacgtcaccctagaaaacaggctgcagaacatggaggtcaccgatgcttgaacattcctgcctccctatttgccaggctttcatttctgtctgctgagatctcagagcctgcccaacagcagggaagccaagcacccattcatccccctgcccccatctgactgcgtagctgagaggggaacagtgccatgtaccacacagatgttcctgtctcctcgcatgggcatagggacccatcattgatgactgatgaaaccatgtaataaagcatctctggggagggcttaggactcttcctcagtcttcttccccgggcttgaaccccgcctctgaggttctccctgatatacacttctgcttttccttccaaattaggctgctccctccagttagcaagtcacagagc

SEQ ID NO: 55373 - DNA, 1042 bp, Homo sapiens
ccgcttctccatcaccagccaaagtggtggtgggctggtatcccttgccctgccactggactacaaacttgagcggcagtatgtgttggctgttaccgcctccgatggcactcggcaggacacggcacagattgtggtgaatgtcaccgacgccaacacccatcgtcctgtctttcagagctcccactatacagtgaatgttaatgaggaccggccggcaggcaccacggtggtgctgatcagcgccacggatgaggacacaggtgagaatgcccgcatcacctacttcatggaggacagcatcccccagttccgcatcgatgcagacacgggggctgtcaccacccaggctgagctggactatgaagaccaagtgtcttacaccctggccattactgctcgggacaatggcattccccagaagtccgacaccacctacctggagatcctggtgaacgacgtgaatgacaatgcccctcagttcctgcgagactcctaccagggcagtgtctatgaggatgtgccacccttcactagcgtcctgcagatctcagccactgatcgtgattctggacttaatggcagggtcttctacaccttccaaggaggcgacgatggagacggtgactttattgttgagtccacgtcaggcatcgtgcgaacgctacggaggctggatcgagagaacgtggcccagtatgtcttgcgggcatatgcagtggacaaggggatgcccccagcccgcacacctatggaagtgacagtcactgtgttggatgtgaatgacaatccccctgtctttgagcaggatgagtttgatgtgtttgtggaagagaacagccccattgggctagccgtggcccgggtcacagccactgaccccgatgaaggcaccaatgcccagattatgtaccagattgtggagggcaacatccctgaggtctttcagctggacatcttctccggggagctgacagccctggtagacttagactacgaggaccggcctgagtacgtcctggtcatccaggccacgtcagct

SEQ ID NO: 55374 - DNA, 2506 bp, Homo sapiens
cagctggccacgcggctgctggcccacgagagcacccagcggggctttgggctgtctgccacacaggacgtgcacttcactgaggtggggcttggaggatgcagggctggctggttagataggggtcatggtgagtgagcctgctcatggcaacctggggggcagagggggccctcccatcccacctacaaggagctccctgctggcaggaggcctccatgaaaccctgtgacccctggcccagccctcttcccaacccttctcatagtaacatatgtgtgttggggcatggtctgacccagagcagaggcctgcctgtggtaccatgggctgggaggaagcagtatctcaggacatgtgtgtgggtccaggcacagggctgggaagctcttatgtagagaatgaggaggagggcttaggggcagagcatccagtgacctgagtgggcagtgcggtccaggagcatttcaggggaggcaacagtgagcacagagggaggggcctggtggggagcagggactggcccgggcacaggccggggctccatggtggggatgtcaggtgtgggttgtgagcacacccaccgtgaccttgcccaccccagaatctgctgcgggtgggcagcgccctcctggacacagccaacaagcggcactgggagctgatccagcagacagagggtggcaccgcctggctgctccagcactatgaggcctacgccagtgccctggcccagaacatgcggcacacctacctaagccccttcaccatcgtcacgcccaacattggtaaggctggtgcctgggttggggaggggtttgtggagggagtccccgacaagagcggctgtgctggggtcctgcctgcctcacaggtccgatctgtgaccatccccttccttagtcatctccgtagtgcgcttggacaaagggaactttgctggggccaagctgccccgctacgaggccctgcgtggggagcagcccccggaccttgagacaacagtcattctgcctgagtctgtcttcagaggtcagtggtggccatggattgagttgggagctggaccccagtgtctgtgcagactccacagagagcagggcccagctaagtgtgacagtgtcccctcccagagacgccccccgtggtcaggcccgcaggccccggagaggcccaggagccagaggagctggcacggcgacagcgacggcacccggagctgagccagggtgaggctgtggccagcgtcatcatctaccgcaccctggccgggctactgcctcataactatgaccctgacaagcgcagcttgaggtcagcagctaggggacaggtgtgggtaggggtatgggtcgggcggtgagtgctgaggcatggagggggtcgggggcgtctccccagtcatgtgactgccgtggtgactgtgcacctgactgccccacatcagagtccccaaacgcccgatcatcaacacacccgtggtgagcatcagcgtccatgatgatgaggagcttctgccccgggccctggacaaacccgtcacggtgcagttccgcctgctggagacagaggagcggaccaagcccatctgtgtcttctggaaccattcaatcctgtgagcctgcactgccctcgccccctcaggcttcgggctgaaagtccaggcccctgcatgcctcaccctccttgtctccctgaccctgccttcctcacacagggtcagtggcacaggtggctggtcggccagaggctgtgaagtcgtcttccgcaatgagagccacgtcagctgccagtgcaaccacatgacgagcttcgctgtgctcatggacgtttctcggcgggaggtcgggcccacaggggcagctgcagagccgtgggtgggcacccagggcacggggctgggtgctcaggtcctgcccttcctaattccctggccccctgccacctactctgcagaatggggagatcctgccactgaagacactgacatacgtggctctaggtgtcaccttggctgcccttctgctcaccttcttcttcctcactctcttgcgtatcctgcgctccaaccaacacggcatccgacgtaacctgacagctgccctgggcctggctcagctggtcttcctcctgggaatcaaccaggctgacctccctgtaagatgctcctactgcccagaaactgtccccaccttctcaggccgcctccccagcccccactggcaacccctgctcctgcaccatgaactctaataaggtgcctagtgcagcacctggcccagggtttcctcttctgtggctcccccgggatcccccagcacctgcctctggcccaggcttccctggaagcagttcccaacacccaggccctcctccatgcctgacccgaagcagagcctgtgctctgggcgggccccggtcgctgacctgccctggcctgggccctcagtttgcctgcacagtcattgccatcctgctgcacttcctgtacctctgcaccttttcc

SEQ ID NO: 55375 - DNA, 1034 bp, Homo sapiens
agccccctgctccaatttctaacaaatttggagtaaatctctaattccaggcagggagccaggatgggcctcctaggcaggggcctgaataggccctagggccttgagattccagcttatcaggctgtgactgctccccttgttggcattagacaaggacaggctgcctttccccaggtctcaggtatcattggaaggtccagatgaaagttaagtgtagcttaattcacagtatgtgaggctattaagctaggatctaggtagattcttatttatatcctaaacttgaatgtcctttactggcaaaataatggagcctcctagaaacgcaccagcttcttgtttgctctccctgtgagacgtgaaggccctttggtggtgttcatcttccctgatcacctcagccagagctgctggaacacctagtcaggctccaactaacatcactggggttgtctgtgctctcctcatctcccctgttagacttgggggtgagcgtcaggatccggaaacctctgcagtaccctagtgttgtgacctgtgtgtagcagagcatttagtttatttattcagaagatattcgagtgcaagatggtgtttgttgaaggaataacaaagacacgtttaacagatttggtgtagggcctccctttttttgcagcctttaactctagtaatcagaaccaattcaattccttctgagttttgaggaaacttccctccctgaaggtcaggccatgacttgagaaaagcagcaggtaagtgggcaaagagaagtgggactgccagctggtgcccccacccatgcctatttggccataaatgcctgacttaggcaccaaagtgtccttgccctgtccctggagccagaggcccatcactgctttcccctttttgtggctgattccaaggttcacctggcacattcacctacttcagtgacaatgcctagatatgcacctttccctgaattctgcagcaactcccgcagcctctgggattccaggaatcggtgggagggaaggggtatgcag

SEQ ID NO: 55376 - DNA, 2663 bp, Homo sapiens
ggagacctttgtgctgaaggatagtcctgtccgagacctgctgcccactgtgaactctttgacgcggagcaccccctccccaagcagcctgacgcctcgactccggagtaatgataggaaggggtcagtcagggctctccgggctacatctggaaagaggccctccaacatgaagagggtgagttgagagagttgagttggaggtgtgccccagacatggtgtgtgccatgatgcagggagtggtttccttattggtaaaacagggatagcatttctacatctagaattgttggaattaaatgagaaccatgaaaaaagagaaccaaaactcttaccacagtgtctgagtatatgtctatgataaactcaataaatggtattggcaatagtgatggtgatggtgatgtggtgatgttagcagctaacttctacccttccttactgggatgtagacaactctccacctctatttcttaattccttaagccacagaacagatattttttccactctagtcttttttctctctctctttgtgtttcaggagtcacccacttgcaatctgttccctgcatccaaaagcccagcatcttctcctcttacccgatcgactcccccagtccgggggagagccgggcccagtgggagagcagcagccagtgaggagaccagagcagccaagttgcgggtgagtgggagtggggagtttgtgggattgaccctgaaatttctccacccctctccaccaggcccacccacccccatcagatccgtcctggccccacagccttctaccagcaactctcaacgcctgccccggccgcagggagcagctgctaaatcttccagtcaactgcccattccctcggccatccccaggcctgccagccgaatgccactcaccagccggagtgtgccacctggcagaggtgccctacctccggattctctgtcaactcgaaaagggcttccaagaccaagcactgcaggacacagagtgcgggaaagtggacacaagggtaagaggtcaggaggaagaatgcccgcccttgcccagcgtgtcctcaccctcccagagctgtcaacagtgaccacttttgccatccttattgcaattcaattggaagatggggagactgagttacagagaggatatggggctggacagagtctgagtcttagttttcaaatacctcatggtcagggggagagtactaatcccacactcgctcccttcatccagtatttcttttcgaggtcagttaaacttgctgctaactcatttcttttgttaacccccatgaagttcctgtttcccagcgactaaatcttcctgtcatgggtgccactcgcagcaatctgcagccccccaggaaagtggcagtcccaggacctaccaggtcagtctggtcctcccttgcccatcctgtctccctaccccgccatcatctgggattccaagctgttatgcacatcagccctgaattttgtatggaaagatggagagaggaggggagcctggggcaggggaagggggatcccatttcttcccaccctgaggagcttgaattctgctgggtgacaaatgggcttgaggaagaagggcattttaaagcagttattccttctatttctttaggtaaagagatcaggacagcaagcaagacttcagtagcaaaccactacagtcagtacctggactcgcctctacccagcagaccctgactccagcagattctggcccagggacaggaggaagagatgccaccagggctggtctcccaggagtagagaccatgggaaatggggtggattaggattgagctggagaagacttaaactctctgggttgaaagaagattaggggaaaagaggtcaccttccagcagtgaaatgaacaaatagaagatgagaagtacaggcaagtggtttgtctttatccacccccactgttgtggtcagccccagagaattttatcttcttccttggcattggttcactggacatttccacgtgagcggcctccgtagctaacctccctgccctctgaggagccatcttcctgaatcgcattctctactggactctggcctgcttggagaggtggcagcaggcacctggtcttcagaaattgtttcctgtgaattctgtgactcctaataggccagtttgtgataagcttactctatgagtcttcatttttctaaaataaagtgaatgtatttttatattctctgtatatctggaagtcgatcctgctcctatttctttctctttttttagacagaatcttgctctgtcacccaggctggagtttaatggcgcgatctgggctcactgcaacttccaccttctgggttcaagcaattctcctttctcagcctcccgagtagctgagattacaggcgcctgccacccacgtccggctaattttttgtatttctagtagagacggggtttcaccatgttggccaggctggtctcaaactcctaacctcaggtgatccacccgcctcagcctcccaaagtgctgggattacaggtgtgagccaccgcacccagcccctgctccaatttctctttttttttttttttttttttttgagacggagttttgttcttggtgcccaggctggagcacaatggtgcgatctcagctca

SEQ ID NO: 55377 - DNA, 1572 bp, Homo sapiens
cttggaaaaaacccacaactgaggaacctcggccaatgcggcgcctgcatattgagtgcgcccaagaaaacgaatttcctcccgtagagcgtcggttagcggccacgttaggcagcacaaccgttctggagactgggtgctcggcggcccagcagagggagcggggcggggcgcgagttccatactcgtgggtccgtttcttccctcctggccagccgcgctctgctcccatctgcctacgggaaagagagtctccgcgcacgcgagcacgcgcactcgcagcctcaaccctcggctccgccaccgggatgcagtcttctgggaacggttctcccccagcccccaccggctgacttccggccggcagctcctcagcccctccccctgaggattcaccaatcacggtgcgcgtgtggcttgagtaggtggggcctgagagattcgaaaggagccccgccccctcggagctgattcccgggactaggttgcgggagaaagcctgttgcgtggaagataaggcggcgcgggaagtggacacagggtgggctggaggtgtgcttcgcgtgtgatgccaggggagtggaaaggtggcttggggagtgcagaaccctgaggatagtggcggggaggaagatggggcgtgcaggccgcccccagtgaggagaggccaggatgcagggcggctccagggcaatctgggcagttgggggagccctccgtatcgttcccggaggtagcaggagtagctgtgcgggaggtgccactcctgggcgcttgctttgcctccagcatgacccccgaccctggcttgcaccctgaatctagctgcgagccttgggcagaatggatacctgaggaaaggtatggtttctctccggctcagatctaactggactctcgctcctgctggctggacatggaggatttggaggaaggtaaggaaaggagggagggaagaatgaaagggaggagtgagacccagcgatggagagctgcatcagggacccatgactggctttcattcttctttccccttcagatgtaaggtttattgtggatgagaccttggactttggggggctgtcaccatctgacaggtaccagcctctttatcccacttattttcctctaacagtacctctttgtctcgaatcccttactgctgaattattggcttgggttggtaacttagcaaggtttggcgcacttggggctgctgggcggctggctgactcgggcctctatgacactattggtagcggggagagaagggagaagctggagttagatttcagggtgttaagaagaaggataagtggatttgctgcatctccatcctggcatcatttctgatgtccgtaaatgctaaaggcctattaggccccatagaaccaggtatctcatcgcccagaggccacatctcacagccagcatgggcatcggggcctagggtcatgtccctggctctgttgtggggcttttatgcagtctcccttgcataatctcctgttcccttttgcatgggcatgatgcctggtttgtttcctgtctcagccgtgaggaggaagacat

SEQ ID NO: 55378 - DNA, 1048 bp, Homo sapiens
agcaccatcctgccctagcagagcccaggccttgccctcatgaagcatcattgaaatagcaggagcatgttgatttcttggttaggttgcattataataacaagagtcagaacattaattcgaaacaacttgcagtatgcatttcttcacaccagtacattcttaagtgtacttgtttataaggaataacataaactaatctgtacctttatatatatgtgtgtgtacatatatacatatataaactgtatagtgtacatggtaatgatttattgctatgccccagatccttaatgtagttctcatcctccgcatgccctcagccacaagcgggtgactgactgttccctgatgatttggcccacctcctgtgtttggacctctagggaggagggttttggtcatactctccttatcctcgtgcacagaaatgctcagggtccccatgtgcctgttgttcagccctctctcttgttccctttctgagcatgtggtccttccccaggctgtgggacagctgccttcccacgaaagtgtaaagcagtattaagatcattactgcatgtgccctaaaaacccaagttttctattcccttaggacagaaaattgcatgtgaggtgggataatcgagtttcagtgacccacgtcagttacacattaaagccagaccccatgataaaattccacaaaatggaaataaaactcaaatttctttagcattgtgtaaataaatctgaatgtgtttaactttgtactggtaattttctgtatatttggaatatttgggttaaaaataaaacagactggactttgttacctgacctactgaaatgactaagctacagtttgttgatatactttttccagttttcttgcttcagaatcagactccagcaaccagagaacaagccatttaaagagccaggactgtacatttatagcatgaaatgtattcggtcatctatgaggaaaacgtctcacaaaaatgtgagccataaattacctaattttcttgttcttcattttcttgctcttagtgctcataca

SEQ ID NO: 55379 - DNA, 1090 bp, Homo sapiens
aaactcaatattcttctctaaccatatacgatagggctcttcgcttttaatgatatctgggatttctgtggaacttggcaaattttcagagcaccttcactcacataatgtcatttgaacctcacaatgttcttgggatggagtcagttgttcagggtccccgtgtgtgtgataagcagtgctggctggctgtcttcagaactcttggaaatctttacacatgcgagtgctaaccactttgagcaaggctgccttcttgtagatgacttgctgttctttatgacagggatcagtggcatttgtttcctagcagtatttagcacctttttgccaccttggtgaacagaaaattgtattttcctgtctttcatggctgaaaacaaaagtaatgggaattttaaatacgtttgcagaaactgcccctcccctcattgagggtcactgctcaagagtgcaggagtggactctccactgatgggtctccctccccatcctggtttccaccccgggctggctagctctgttggtttgaagactgacagccagcctggctcattctcattattggctagttagctttctttatcaacctgctcactcacaaatgtgtgccctcagccagagagtaagaaagcccaaatctgttacagcttctaaaaaaatagatttctaatttgtcctactcatgttaggagcattatctttgaaggtaaaacatagtgtatcattgtgtaaactcccaggcttgatgtagcagaagagatcatttctggaggcttcagcaatggaatttagcattataagagagattggacaaaccagtccaaagtggtccgagttcttaaatccaggtagggaactcactcttctttcttctctggacctaattgggcattgggctttagtgagaccacagaccaggcccgtctctcctgtaggcttttaattcaatggcaactctatttcaaagaataaaagcctttggagagttgcggcagttctgggggcgggctcaggagagtccatagatcagccgtaactggaacgtagaatctacgtctgcctctgaatggacttcccacctcctctc

SEQ ID NO: 55380 - DNA, 1076 bp, Homo sapiens
cagctgtagagatgaaaacaggctgcagaggctggcacagcctggccggcttttctccatctggggacagtcctactccaagaacactgcacaccagctcctcacacagatcccacttactctttttttttttttcagagaccacagaccacagtgatttttcttttcccttgtttaattaggcaatacccttgttaattgccctttggcaactaacttaaccatgtgcttcccacacagtacatcaggaaaacttacagggcaatatttttaacttggggcaggaagaagggagcagcagagaattgactagatatagcacctattaaaagagaactcttgcttcttctgagatttttcaagctgtgctttgtgtgtgtgccagtagacttacgcaaggacagggtacaaacttagctggaagtctgcccaggctgaatgatctcttccctagagttgattgtcgggtacacagtgtgaacccccgaagacggaacctcacagtcttccatgttcccttcttaactgtcgtgtggctcgttgctaaatcatgacaatggctgcctatctgctgcttcttaggttgctgttgtacatggaaccaggactagagattttttcagatttatagacttaaaaaattagaattttattaccaggctttccttctcaccccttttttctgactttgccaagtaatttgttgacacgaaaattttggaggaaccaattgaaaacacacttccagtctagatgatgctttgtgtgatacattaagttcttattttggattaaaagaagttttccatttgatacctctctaaattaaataaattatagaatgtagttgggtggattttggggtggccatatagtaatggaaagctgcaataattagttttaatacagcttgaatatttgctatatagaaatatagtatggaaagtttttggtcttaatgtagctactgtgcgggtcacagtttctcccaatgattatgactgggacattctttggtagataccatttgctactagtttattttgtggctagaaagtcagttttgtgtgtttttt

SEQ ID NO: 55381 - DNA, 1065 bp, Homo sapiens
gctcttggctaattagtatcttgtcctaaacaaagagctccctggtcctgagtggagaatatctggttgcttacctctgacagctcctactgactgagggcgtaggtgtgcaagacacacacagcagcctcttagtttggaaggaacttgagagattttctatccagcttcccacttcaaaacaaatagggtttttcctaatcctcagatggatgttgagatggaaggaatactcttttggcatgaggaaatgcgattgctagtaggctctagactagtgtaactttttgtttgcaattccaaaatgaaggaataggttgagtcagacattcccactttccctctccttgttcttcctatagcctggcagctgcctcccgtgggtgggttctgtgctgtgtactttcctgaacagtgtgtctctcctttaggtgaagagaaggactataccatatggctggcacactccacagaccctgaagattatgaagatggctgcattttgggctacaaagaacagtttctgcggctacgcaagtcatccgtgtgtcagaatggtcgagactatgttgtgaccaagcagccctccatctgcctctgttccctggaggactttctctggtatcagcattcctcagatttctctgtctccctttccctgttggaggaggtgaaagacagttttcttatagggctaacaaatattgaaatccagccgggtgcggtggctcacacctgtaatcccagcactttgggatgccaaggcaggcagatcacttgaggccgggagttcgagaccagcctggtcaacatggtgaaaccctatctctacaaaaaacaaacaaacaaaaaaaaattagcagggcatggtggcgcacgcctataatcccaagctgctcaggtggctgagacacaagaatcacttgaacctgggaggcagaggttgcagtgagctgagatcatgccattgcactccagcctgggggacagagcaagactcttgtcccaaaaaaaactgaaaccctttcccccaagagtggagaactgctgcttcttatcaaggaa

SEQ ID NO: 55382 - DNA, 1045 bp, Homo sapiens
aaacttaggggcatatattttgtttaccttttcattttctaatgattagtttttattatgttttacaatagcatcagtttgtgacatattggaaatcttacaaattgatccttcactacagatagtttgagaagcattgttctagagtgtaaagatttaaaaatatgtaaactaaacatagggcctctcccaccaaaatatatctgggaagagtttttctgtagcatctgattaatttattcaacaaactcagcatctgccatattccaggcactaagctgggtactagaattaaagatgggcataaagatcttgagtatcaaaccttgattaattctcaggtctgagtcttcatcatgaagagacacaattggctactgtgtttggtcaggcaggtaatcgtgtgtggttagactattgtttttctctttggttccacccaagacttagtatttttgtttgtttgcctatttcagacactgggtttggcacaatctttacctcagatgatcgaggcattgtctattccaagtctttggaccgacatctctacactaccacaggcggagagacggactttaccaacgtgacctccctccgcggcgtctacataacaagcgtgctctccgaaggtgagtctcggcatcgcagtggtgtactgtgccttcagctgcatgtggtaggatttgaggcttcggggaacctgtcccctagtaatgttgcttgccaagccaacaagcctacccatgtacatttttttgtttccttttttttttttattgtggcaatatgtctaacaaaatttgcagtttttaacattgtatagggtacaattcagtagcattaagcacagtcacaatgttgcacaaccatcacccctatttccagagctttttcatcatcccaaatagaaattgcaccaggtgcacaagcactcctcgttccccacccagtcacccagctctggtaaccaacattctattttatgtctcaatgaatttgcctattctaggtagctcatgtaagcagaatcatacactattgg

SEQ ID NO: 55383 - DNA, 1088 bp, Homo sapiens
ttacatcttgacttcccttgtgatctcccaaacatgggtttcatctctattttctagacccttaagtatataattctttaaattatgcaagcactgtatgaaagggaccaaacttttatgcagtagtcatcattttaagaattacctgagtgtatgcaaatggctataaagccaacctaatgttctcatcaaatccttagctctactgaaggaggtggactatcagagaccaagactatactatcttacagggccgcatcagaatgaagaattcaaagagaaagccaagatagccttacttagaatagaatggattgttcctttacctagaactttgctaggggctagaaattgctttggtaattggtactatgacctttcattcatagcaatcgtacccagtagagaaatggataatagtagttatttaaaacattcttgttcatgtccctgcccatggcatcttggcagaaaattagaaagataaatattgacatctgttctaggatacaacaagaaggatccacgtttcaacagatcaaggggacacatggagcatggcccagctcccctccgtgggacaggaacagttctattctattctggcagcaaatgatgacatggtattcatgcatgtagatgaacctggaggtaagagctttttagtggcttacccttaaaagcatagagatgtaagctttgagcagcttttatttttacatgtcgagttttcctcttacccctagaaatttattagtgccctactgatttttctgtcctagagatcatctgtagcccctgttaaaaatgccacttgttttggtagcttgtgtgtatgttcaggtgttctagagcagagctgctcaaagaatggtcagcagactggtactgatttgcaaactatctgttaccagataagtacagaaattgagagcaagagtttggaaactcttctagccttttgacaaagcaattttatgtctgttggatctaatgacaaaaaattaggggtttatggctgggcgcagtggctcacacctgtaatcctggcactttgggaggctgaggcgggcagatcacgaggtcag

SEQ ID NO: 55384 - DNA, 1052 bp, Homo sapiens
gtatcctatgcaaggtttttacttttgtaacatgtttttttttttttgtttagtgtctaaatatgaataaccaggatgctgctgtttactcacctttttagatctctagtttctaggaatttacaaccaaaagttctgaaagaacatgctcaaaaccaacacctttttttggttgcaatccagtaagtgccaggagggtctgaatctagttccctgcaaactccctttccaggttacattttaaataattcaacctccgacctagttgtccatttgagatggaagaactaaattatttaactcatacaaagcattgaactagattctgaagggaaacagcaaagtatagtacctgccctgaagaagctaatttatatagtaggaaaggtaaggcatatactatgcaagtaaaataaaaaacaggcaaatgcatgccaagtggctgtgcagatggtacagtgctctaaaacagagtttctcaacctcagcactaatgacattttggatcaaagaattctttattgtggaggaccgtcctgtgcatcataaaatgtgtagcaacatccctggcctctacccggtagatgccaataacacctccgccacccacccctcagttgtgatgatcaaaaatgtcagaggcaaatgttgagagggtgagtagaccagcatgactgcctgaaagagttcacgtaaagaagtggtggactgtagacaacacatgggccgggcagtggggagcttgacaggcagagctgtgaaggaccagggctcagcgcctgagaagtggtgcttgtcagtgcctgtgaatgaagcttgttagacctgctaggaagtttgtgagtaaggtcaacacagtccttcagcagtcttaaaccatttcttttccctgtttttgcctcattgtaggggatcagacaacaccatcttctttacaacctatgcaaatggctcctgcagtaagtatattttagtcccagaaaataatgtcctgttgtccattcatggtagaattttctgggttgtgcaaggtagaaacataaaaggtccct

SEQ ID NO: 55385 - DNA, 1785 bp, Homo sapiens
gtgaccaacttacatgcatgtgcatgcacgtgcgtacacacacacacacacacacacacacacacacacacacacccctacctctcatcctgccctgcaggagaagtcatcccgttctactatgctagcttctaaattcttgcagagcctgttcctcatggccagtgttcaagacctcattagctcttaccgaactaatgtggcagtcattccctgcttttccttgcctctagtctggaccctctgaaatccatctttcccattcacgtccaagtactccacctaagaaagtgaaacggactgtgtcatcctcctgcttagcacacattcctcctgagagcacctcatatgcaataaaccctggagtccttaccatggcacagaaggaaggctctctgtgagctggcctcacctttctgcctagcgttagttcctcatttgcttaccttggaatttgcactcaggtaatgcctgatggcttttagctccctgcacacactgcagggtttatgacctccttgcgtttgctaatactagtctctctttgtgcagcaacacctcatctccctgtttgccttcttttggtcccactgctcatcatttaaaactcagtgcacctgtcttcttcaggacaccatctctgatgcaatgttcctcctctcctcacttctatactagaccatattttataactctgcatagtgttgaactttcttcttatctatgcgccttgttaaactgtgagccccttctctcagcagggagtgtgtcttattcatctttgtatccccagtgcaacatctggtacagtgcctggcacataataggcacttcatacgcatttgttattctgaacttccaagaccccaaaagggcccagataaactacgtgtgtgtctgtggagctcgggcagctctgatggagcttcagtatgtgtttttcctgtcctgaatgattggatatgaaatattaaaggtcatacaagcaactacacaggataaagctagaattttgataagtcatttataatctttcagaatggcctgtgggtgtccaagaattttgggggaaaatgggaagaaatccacaaagcagtatgtttggccaaatggtgagtaacagaagactccatctgtgcagagccctaaacccttcctgatagcgctgccaaaaatcacatgaataaatattgagcacttactgtgtgccaagtactcttcagggtgccataagagatattggagaggggtgtgacacaggccttgacctggaggagcttctcattctgctggaaaagaagacttagtctcacttaaatgttagaacataaagtataaaacaaggcaggtgactgagttgctgctgcctgcccagggttcattctccatgaatggtgacatcaattaaaatacaataaaatatagctttaatttagggatttaaatacttctccatgcccagatttaccctcttgtctagagttccatttcagtcatgtagaacatggcaaggaatcaggaagaaagctgaaagagcttccagactcctgaagtcacattgcgcaccacaactcattcacttttctcggagagattccctgcccctccgggtgcctgcttaaagaggatggagtggagggagctcttacttgggagtctcgtcacctttgttctgtcctcactctgctgctagtcaggggctcaacctttctgggctttagttttttccttttgtgaaaggaggcttatttggagaatgtggggatggctaagcaagaactgaat

SEQ ID NO: 55386 - DNA, 1051 bp, Homo sapiens
ctacaccaatgttatatacctaattattaatatcacaaagactgctgggctattttattcctggtgtttctattgagaattgctcaaatttccctattaagaggttttgcattaaaatatattacatagtcaatgtaagtttttcagaatgttacttgagatttttttaaaaggataacttaaaggtatacaatgcaaagtgctgctagtgcagtaaaccagcttcttcaaggcatgttgtgtaacaacctttttaatgatatgctcagttcagttttcactgcagtagattgttaacaatgactgcatatttcagttacaaggttgggataaattccatttacaacatatattttcttgcttttttttttttaaagaaaaagtatattaaaatgtgatgatggcattttacctttaatacaacttcacttctatacacgtaaagttgtcaatcagagtaagatgaagacccacaaatacatattcatgttccttctgattaaaagttctgtgatttttttatttacaatatcttactctctttattttcccacttgtagtttcaaaatttctacagaaaacatgtatcctttcccaataatgataaaacacaacatagttaaataaaaacacaaggtaatatcagacagtgggggaaaaagacactgaaatattgggaattaagtttattatgaattcaaatcttgccaatattacccagcagtagtttcaggtccatgattattttgatacattttaataaactacattctccctattgatcttttacctggaaatctcagtgcagttggttgtcattattagtgatagttatgttctgtaaagttgtcatgaatattgaattagttaatagtgaaccattgctcctagggggacatatagggttaggtttctgcaaacttctggtcacagcactcattttcatcaaatgatcaatacataactttgttttatgtgtgtttctgtttaaagataccttatttaatgtgtattattgattcattaacactgaattcatggccaatagcac

SEQ ID NO: 55387 - DNA, 1142 bp, Homo sapiens
gtcgaccctcagccaggaccggctggacgcgccgccgccgcccgctgcgccgctgccgcgctggtctggccccatcggggtgagctgggggctgcgggcggccgcagccgggggcgcgtttccccgcggcggccgttggcgtcgcagcgcgccgggcgaggacgaggagtgcggccgggtccgggacttcgtcgccaagctggccaacaacacgcaccaggtgagcgggcgccgggcccgggagccgctcgggtgcgaggtgccgcccgcgtgcccctcccggcccgtgcgccccgcgactcccggaggagaccccagccctgccgcgcccgcgtcccccgggccgcagccccgaaactgcggcgggcgggcgggcggagtcgggcccgggcggccggcggggctgtgttttgtcataggggaggcaatcttagacttccaccgcattcttttttttttttttaagttgtcaaaatctcttgaacatcgtttttcgtctgtataaataatcaggacccagtaacgctgttaggccccaggaaggtgaaggagtaattaactcttgagcgcttgcagaagttgggctgcgcagaagcaaaggtgtgtcctctctgggtcagtactttccgggtgggagaggcgggagttcaggaggcccgaagcagcgatctggtcaccgtgttttaatagttaaggggactagcttggaaatgagatggcaatatttatgtgatctcttttactgcttcagatttgaccttctgtcatggtacggaagtctgactagcatgtctatatcccgtggtgacaagattttcaatagttaagaaacgcattgcacatattctgctttgagccagctcttggtcaaaagactttcaaaattatgggatttctgtccctggggacaagcagctcaacctttgcacactactggactgacaaaactaattattaagaaagtcctggttccttgcttcagcacaacttgggcatctttctcctatttctctaaaattaacaatttaatccttgctagccacatttgcataatgtattttcaattctatatattttctcccttgcctgttttcctctttcaaagaaaatgaattgcacttgggggcagagatgggtggcca

SEQ ID NO: 55388 - DNA, 1006 bp, Homo sapiens
tgctgggctctgggtatattgatgtgtaggaagttgtactatatgttaataaattatgactatttggataggctgaattcatactaaatccatactgtagttcaacaaaaaacaacatgtttatatacatttggaaactgcaatgataggaaacatttggaagaaagggattttgccctagaataacacataaggaaagcagagaattagagtatattgttactgaatgttccagagacttctagtgattttaacacttattaagtatagcatgttgatggggagatttgtttctctaaagatcactttgttttattaaatcctaatagaaaatacccttgaaaatcctatctcatttattcctgtaacaaatttattgagcacctacctactatatgccaagaaatgtattagccatcaggcagagagctgttcaaatggtagatatgatctgtgctcctgtgaaacttctagtggggagagccaaacaataaacaatattcctttttaactctaggttaatgcagaaatggataaagcccatgttgcttttgggagaggtgagttgtgtctctgaatcacatgcatttcatagggggaaaaatgcccaaatactaaggagtagctcttagcctatgtccgttcgcctcagcttaagttgttttccctcccactggctgggcagcatatttgtgttttacctggtaaaacagtaaatttcgtaccttctataattggcattcttcaaagaggtagaactttgatttttttgtagaatattaaaacaagctttcttaggttaaagaagtgatcttactacgaacagcaatggtttcatgatgtgtaattgctttatgttatctttctgctatagaatgtttcctggagaaaggtacggtttttagtaataagataaatttactttagtcctgcaaataaggtgaaatcttatgtccagtatctcacaaaggagaactgacagtgccacttttatatttaatgtcaa

SEQ ID NO: 55389 - DNA, 1053 bp, Homo sapiens
gaaaaaagtactgactccatgtactttgctgctgcttttgtgatccctgttgaagtgacttcaagaagtgacaatgatgccaggcatttggttaagtatgatgtggtgagttaaccttaaaatagaaaatttggtcaataagcatttttattttggagccagagagctattttagggacctgctgcctggaaaggatatccttgggacagcagatcccttagttcctaatgaatagctgcatcaccaacacagcttctcctgaccatggtagggccatcagcagggtaactcagcccagcttattaacccttctgttttctttccagctagccacagtgcagcctggccagaatttccacatgttcacaaaggaagaacttgaagaggttatcaaggacatttaaggaatcctgatcctcagaacttctctgggacaatttcagttctaataatgtccttaaattttatttccagctcctgttccttggaaaatctccattgtatgtgcattttttaaatgatgtctgtacataaaggcagttctgaaataaagaaaattttaaaatatttgttaatagactgttctcttctaatagtcttttttttttttttttttttaagagatgaggtctcactatattgcccaggctggtttcaaactcctgggttcaagtgatcttcccgcctctgcctcctgaagtgctaggattataggcgagagccactgtgcccagccattgtaatacagtcttttgtttgaaatgcaaatgttagtgggccaaaaggacagtgttattaatatccctattctatgaagatgtctgttctaaaactgttttagtgatgctctataacagaatcaactatatccattaatcccatggtgttgataaatgaactagtccagctcttcccagtggttaatagatgttaacagcactgtaaatccatttcggccctataatttctggagcaaacgtgtatttttgctgcttttcttataaggagatgctactaattgactatcagaagaacatgttttgaggtcctcc

SEQ ID NO: 55390 - DNA, 1721 bp, Homo sapiens
aaaaaaaaaaaagctgaaagaaataaaaggagaggttaggatagtgatggaaaagttatagaagaggtaaggcatggtacacatgaaggagttggttttgaaaagtaaaattcattcagcatcatattgagtacccattatatagcaggtattatgctagatgcccagggttacagacacagaaaatccaattcctattcaagtagtatactgtgtagtgcagggaacatatagataataagaacctggggtgatacttctataatagcagtaaaaacagattcctgtgagtatgtataacttagactaaagcattagggaagcttcttggaagaggtgatgtctggaaaagggagcagaaaggtattccaggaagacgggacaacatgtgcaaagggttcaagatgtaaaaataatattgtgggtaaaggaaactttgaggttttgtctgactgctgaggtgtgggatgtatataagatggtgggggacggtaagggatgagactggagaggtatggaccagcttgggaatgtccttttttagtatgctaagagtagacaggagcaaaggaagtaatgacgagtaaagataggtgggtttggcggtaaacctggagagatgtcccacatttccccagatttttcctagtgattgtaaagtcatctgccgagggtaggtgaatgcaacagtaaaattgagaatgggaaatatttggaaaagttgttatgagaagacagggaagagtaaaaggattgctgggccatattaaaatcgtagttgaggccagtaatcccagcactttgggaggccaaggcaggaagatcacgtgaggccagaagttcgagactagcctggccaacatagtgaaaccccgtctctactaaaaaaatacaaaaaattagctgggtgtggtggtgcgtgcctgtaatctcagctattcgggaggctgaggcatgagaattgcttgaacctgggcagtagaggttgcagtgagctgagattgcactccagctgcactccatcctgggcaacagcacgaaactctgtctcaaaaaataaataaataaaatttaaaggccaaccaaggctgtaattatatatcagtaattaaaccaatcagtacttaccaggatatttgttgaccacactcatgagaaaatggatggttggattaatccatggtaggggattgactagttaagaacagaagattagagaggactggagagtattgttggtgaatgtctcacccatagaaccagctttcataggctgctgtgaaaggtcagtctaagaaggactgacatttgggagccactgcgctagagcccatctgctttaagttcttagtccattagttgttccttggagctccagcctccctacatgaactgcttcccctaagaaaaggaaaatatccggccaggcgtggtggctcatgcctgtaatctcagcactttgggaggccgaggctggcggatcacgaggtcaggagattgagaccatcctggctaacagggtgaaaccccttctctactaaaaatacaaaaaaaattagccgggtatggtggcgggcgcctatagtcccagctactccagaggctgaggcaggagaagtgtgaacccgtgaggcggagcttgcagtgagccgagatcatgccgcgccactgcactccagcctgggcgacagagcgagactgtctcaaaatatatatatata

SEQ ID NO: 55391 - DNA, 2135 bp, Homo sapiens
ggctattgtagagtgtgtgtgtgtgtatgtatatacatatatatggcttctaatactaaagtttagtgattctataccgtttgcacaaatttggggattccatgaagaattcccctattggaaccagtgctaattctggaaggaattagaagtaacttgttactatagtcagggtatgttttagaactttgctctggaatgttgatctgatcctcatcctcaaatatttctaagataggcataaacaagtaccatatttatacatactatacttctaaatccctaaggaaggtactaattttcttaaacagtttttaaaatgtctggtttctccagacatagaacatcttttagatctgtgcctcaatatttcagtggtgtttcctggctgcagggccaagcatttatactttgttttagtgagacgtttgttacataaagtgccaccactcctgagcattttagtcctcattttgggggttttgcaggtttcatatggacccatctgggacctttgtacagtgtgatgctcgagcaattggctctgcttcagagggtgcccagagctccttgcaagaagtttaccacaaggtaattaagtattctcacaactcttactatttttttatcatggtataatttacatataataaaatgtgcaaaccttaagagttcagttctgttttgacaattgcaaaacaagataaataacactttcatcaccaccagaaaaatgctcatccacattccagtcaatctctttccctcccttgcaaccatgtttaccaccatgtttaccactctccattagttttgtctgttgtgctttgttataaatggaattaaacagttagtcagtttgtatctgttttgtttaacacactgtttttgagatccattcatgttgttccagtatttccgtttgatggctgagtaatataccatggtatggatgtaccacaatatgtttatcctctatattcacagctttacttagcactttacaattggctcttgaagcaagtgggcatttggtattttctttgtgagatgggaagatttggttttgggtaactcattggtgtgattgaaggctgctctacttattcaggtggttcatacagggatgcctgctcacattagctcctaatggtattgcttttacatgtggaagaaattaggtacaaaacagggtaaatttgaattttctaaaccattgggctacctcttagatcatttgggcattattgttcattggatattaccaataatattatcttctaaattaaaagaggaattcaaatgtacacaagactagtctatccctttccccttcttcaaagattactttggttggtgactttattgtggctcacaataaggtttgggggttttttttcctgaaaaaatgtattctacttatttgccatttacttgagttctggagatacttgtaatgcaccatactaagtaagatgtttgacatacttgctaaatacttttttcagtgagataaagggaaaatctttgaaggaaggacggattgtgcataattaataggcatcttcttgccttctttgtttcaagtctatgactttgaaagaagccatcaagtcttcactcatcatcctcaaacaagtaatggaggagaagctgaatgcaacaaacattgaggtactttctgttttattgttggatttttttcggttttttttttaagagatgaggtctggctatattgcctagactggtcttgaactcatgagttcaagtagtcctcccaccccagcctctcgagtagctgggactacaggtgcacacaccatgcctggttaatgttttttaatttttttagagatggggtcttgctgtgttgcccagactggtcttaaactcctggcctcaggcaattctcctgcctcagcctactgagtacctgggactataggtgagagccactgcacctggctgttttattgttttttattcagatatcatagctggcattgctgaagactacatagatcatggaaatgacatttttgtatgtttagttcctaagaaattattaacagcctttgaataataagcagcttcagtaaagtggtgctggcagaagccagaattcagtgagt

SEQ ID NO: 55392 - DNA, 4024 bp, Homo sapiens
agtctgcagacatgttaagcaagttatacataaagattcgtgggattctttggaactctttgcagtgctcacacttggcagtgattactttgtagaaataactaaatataatggaattcaaagcagaaagcatagtcatggaaggctttgatgagtggaatttggattgggggaaggaagaatgtattccaggggagacagcatgagcagaggggtgcaagggtaggagataacgtggcttgagccagtgggctgggctatacctgagggattttgttggagaataacgagtagtgaagttggaagggaaaagtggcatcaggatatgaaggctctggaagtttatttggatatattataggcagtatagggtgatgttaattcttgagagaagaaatataatgataatagcattttattagatcagtcaggttataacattagagatacattgagagagattaaagatgagagaggctattgaagtatctaggcatggaatatgaataacatttgttcatatttggcaggcaccattttaagcattttataatatataatgtgtttacccttcttattattattgtcatcctcattttgcaggaaatgggcatagaggagtagatgactgggagttacgtagagatagagatgaattccaggtatattgtggacttctagcgaccttaaataattaatagttttacgttgttggtggtgatgatggtggtggttcttttcgtccctccctaccttcctttattacttttttggaggtcaggtaggttggggaatatcatcacctcttgggacagaccaaggtagatggcagaggtgaaaagaggccaggtccagagaagacattaagagttttattactttcttgcccactatgtttagaacttttgaatcctccgtcctccaaatattggcattagagagtggatttttccagtgtttgaaagactttgttgaacttactcttttggggttctgggaattacatgggtaaattataaagaaaacattaaaaattttaaaaaaatttaagggagaaaaaagaactttttagaatcacaaaattctgtaaatcaatgttcttgctattgacaggaatagtatattaattacttacagtatgttagggtgctccttctctctgcctataagatgtggccagttgaagtttctatcatgtgaagatttacagagagctatctggtgagtatgtaagacagttatttgacctatatatggtaatcataacatgtttctctttagcttggttctacagccattgggatccagacatcagagggtgtgtgcctagctgtggagaagagaattacttccccactgatggagcccagcagcattgagaaaattgtagagattgatgctcacataggtaaggagtggaggaaagctgttctgtaggatctggtctgggttaattagtcctctatgatgttccaaggaaggtttatgaaatgaacacgttatccccttgttagctattattttccaggcagtaggccagaatgcgtaaatgtaggagtaggaggctgttgcaggactcatttatgtttaacctactcccataagttcctttcccctcaaatttagacttggtaaatgtgatggttgttgaaatatgcaaaggttgagatctttgaagtgactacaagttataagaataatatagacttgcctagatcagtcttcctcctttgttttcagattatctttgtattccttgttgcctctgcccacttttttggtctttaattcccctgccttggcttctgacatcattgtataatagtattacagggtgagtaattctacttatttatagaatggcattttatttggctatccaaattttcttaacctgtctagtcatctaattaatgaagcattggcaaaataattaattgcttgaaggcatcagaaccaaatgccatggtgactctgggagcttgatattatgtctttcatagatatagaaactgaaattttatcttttaagattggaacattgtgtcttctttaactcaagtcacttggtcttttgaaggtagctcagtgtcactgtgttcaacaaattgagagcctacaatgtgccagaccttatgctagataccaggatatagaaaggaataagacatagtccttgttttacaggagcatacagtctaattgtggtggtggacatgtaagtaagtcaatgcaattaagtgacaaaagtattaagaaagactagtgtgttcttagtaggagtacaagggaagaaataattagttttgcctggagtcagcggtagtggggctttcagaaaaggattccatgaaagtgattttgagctgagtttaattctgaaagataaggaagtgtacacaaggcaaacaagtgtctgggtatagcaagggagagcattctagtcagggggaatagaaatgactgaagccatcgtggtgtaaaatataaaataccatgtcacaagcagttttgtaggcctgggccatgaactgcagcagcagagtcggtcagagagcggaattccttttttaccacactgaagggcttcaatgtaatccttttgcaaggatgggaaaggttttaagcaatgaggtaataggatcccattataattttagaaaggccattctgataatgatattaaagatagactaaagagggctgaaactggaggcacggaggccagttgaaaaatttgtaatagtccaaacaaagagatggtgaaggttttaaccaacacagtagccagagaatggagaggaagatagaaattgacagaacttgtgatctgattgattgtgagggccaaggaagaagacggggtctggaagggaaatgagtgtgtgatatgtccaagtagatatattaaggaagttatttggctttatatgtctgaaacttgggagagaaacttaggctggagatttagatttgagccatggcatgtacaataacagttatagccataatcgtgacagcttgggccatcaggcaaactctctctgatataactagttgctttgtgtttgggacagagaggcaaaaggcttttgatttattcgagagtcctccactgtagtccatagtgaggtgattttcttttccttgtttcccaggttggggcattagtatttgcttcgtttgaaaatgtatcatcgtctacaaagagtgctaaagggatgcttagggatgtaatatgtggaaattcatgtttggttagctgcttttctctgggcttatttttatcgtctggacttctgtgtcattgtggatggttttttgtttctaatatcattaatacttgggttcagtgcagatcatttcctatctaatcttttgggtataaaatgccatgggatagctgaatggctgccgtggttccaatccagaatttcaggatttcctgagtggatgaaagagttttacaaggatttggccactgggtcactgtcgcttttacattgcaggttgtgccatgagtgggctaattgctgatgctaagactttaattgataaagccagagtggagacacaggtaaaattggcattatctcctttttaccaggatgcttgagttccttgtttagtgattatctagctgcctgggctatactgcaggtacctgtgtcaatattagatgtggctcttgggagtaattttgggtagaattcccagttagaacttcctggggcttggagtttagctgtccaatcattgcagttttaaagaggctctggtcagtagtgctgacagtgtcttccttttttttttggctttgcctatatataaagcatgcattgtttcctaattgactttgtgtgggagcatcatggcaggaggtggacgtagttaaaggatattctcccctcagctgcctttgctgccaggcttgtaaataacagcccgcctttggtgagtaataacttgtaccaactgacaaatactggtcagggatactgttttttttttttttaaactttgt

SEQ ID NO: 55393 - DNA, 1062 bp, Homo sapiens
gtgtttttctctttaatttgtccactgtctcattggaaagcccaataaagcctgagaatgggtgattccaaccttatcttggccactctgggcctgcactttccagaggcagaatgaagctgatctgcctagtggtttggctaccagaaagagaagaactacatatattgcagttgtgacctaaagggccctggagacacttgggaatacatggtcaccatgtctgggcagggtagatgagtggggtgggttggggagcagctgaggggaaggtagagttttactggaaatttcgggggagttcccatcttaactgcaaggttccttccagaaacttgcctccttacatgacccctttcttggctctgtaagagtcccctgctgagaactagcacaggactacttctgggccagggagagagaggattgcctgagctcaggatggcctcccctgccacctgcaggttgcaccggatccaatatgagatgcccctctgcgatgaagagtccagctccaagaccatgcacctcatgggggacttctctgcacccgccgagttcttcgtgacccttggcatcttttccttcttctataccatggctgccctagttatctacctgcgcttccacaacctctacacagagaacaaacgcttcccgctggtggtgagtcagcacaggccagaaggaatggggtggagaaacagatgtttgtgagggggttgaggtcagaactggagcagaggacaagcatggcggcttccacccccatggtggaacctctgcctccatcaacctcccgttgcttgctcctgttcacaggaggcacaatagcaccatacacaagcaggctctggagttagactgcctgggttcagatcccagcatggccccttacttgctgtgtgatctcggacaagttaaataacctctctaaatcgcagtttccttaactataaaatggggataaaataatacctgcttcatagttttgtgtgtgtatgtgaaaaaatgagaatgcatgtatctagtacatagttagtctcaataagcattagcgat

SEQ ID NO: 55394 - DNA, 1047 bp, Homo sapiens
caaaggacccgccgggtcctagtgcccgcccgctccgtcaccttcgcgcctccgggtcctagcgcctgctcaccgctcgcagcccaccctgccaacctctgcctctgccagtcgctaatacctgcccccatataggcttgcctttatctttctccttgcctgctgcccctcagctcgcgaccctcctgcacctgcctccagctttccctgtccgcaacagtcctccacgtgtttcccacgcaccccacttctgtgcccccttcctcaccccccttgttccttcgccttttgccccacacctcctgctccttttcggcatttgcctgcagctgcagtgcttttagacccccgccctctccgcgttagttcgtccgtccatccatctatcctccctccctccatccttcggtccatccatccatgcctccaacccactgtcctttcccaggcctcttgccctgcctcttggctctctgctcttactctcaccttctctaggcccctgagtgccttagtgagcgggcctacagccccttcttctgatctttgtcttctgggccccagggagcacctggcctcgtggcctttcggggtgacagcaggcatcacgcccctgaagaagtttgcaagtgagaagaggtggaggaggagactgcacggaggggtctctaatgacacttgttctcctctgagacatccgactcccagtttcgttctatccatcattccccgcacttgcatttaacggacttagagtgggagctgccccttgtctcttgcgtgcctaacccacgacccctcataatctggatattatataagattgtcaacaatcttctcatcctagaaaggagcatatctgttaatgggcatcagagagcagacctaagtgggagcccaggccaccctggggctgccccatgctgggtgggcaaagatggggccattgtcagggtctgggtgcattgagaaccggaaatggagtcagacgggtttggtgactcagaattgattttttttttcccaagggacagggagggggcgtag

SEQ ID NO: 55395 - DNA, 1197 bp, Homo sapiens
aaaatggtgggcagcagctcactttcacagaattttattatcagtattttcatgttgtaaatggtagccatcttaggctaaaagtatattcacctaatgggcaggttaatcttccttgacagtttagtgtgtcctaggcattgcgtggaacagaaaaatgcagtccctacgttttggtacagattcagcctaccagaaattggactggactctaaaactctaaccatgctgattctttggctcctctcttggtgattctagaagggggctgtcgtggcagattccaaagagggagaggaaatgataccaggaaaaaaattaaaagaatgcgaatttgaatacttacctaaagtcttgaccgaagggcagccctcctctatttggaaagttgtttttcacttcaggaggaacaaccaaggtgacgaggggtggagctactgcacaaccagccacatcagacaagtcaaccttggcagtcagtgaaatgacagctgttgatgtcagagcactcccatactctgcatttatatagtttttcatctgcaaagcagtttttctatggctgacaatttggctgacaggatgaagctgataaggagagcaagtctgatgaggactacttggagtttggagttctctcttctgttttggcctgtgccaagcccaaggaagtccatggctgcatctcttcaacaccccccacccacccaccacccacatcctcaccacctcccccaaaccacaagaagttccttagattctggccaagatgtgcaattttgtctgccatgccttgcagcacttaccctggctcctcttaggtagcacttgcggggagggaggaggctaatatgacagttttctttgagaataggtaagagttcagtgcattggttaacctggcctctcttccccccagtctctcaactccttccctttctgcatgcacttcttgcaccacttatcttgtatctcccaggaaaccagtggggaagcttcactttctccacccacatagcagaaaaggctcaggcccctgcagtgggacggttggcttttctggtctagtcacagtcagcctgtgctgaatgcttcctctcctggggcttgagagaggaaggctaaagcagctgccagtcaagccccttcatcaggcttctacactcttaggtggaaaatgcaaaatggtgaagacac

SEQ ID NO: 55396 - DNA, 1041 bp, Homo sapiens
ccccggggggagcccgcccctacaggccccggggaccctcaaccccgaccggacgcgtcctacccagcccggtgccctgttgaccttccctcagctcctcccaaaaggcacaccgaccccacctccaaaccctgcccgtgccatccctgtgactcccagcagtccctgccatcctgtgcatacctgcagcctgcacccctgtgaccccagcccagtaggccctcgggccacctcctcttcggccgatatttacagcccactgcctgcacagtgcctggaaactacccagcatctctctctcctagcccaaagggggtggaggtaagggtgggaggggaagtgggagagggtgtccttccctctggagtccttggtgaccacaaacccatcctctttctctcaagtgacccttccgtaccccaccagaacatgcccgggtgacctcctcccagatcttccttgtggccttcctcgcccactccagtgacactatgcacccccaccgtgacccgagaggcctctggctcctgctgccgtccttgtccctgctgctttttgaggtggccagagctggccgagccgtggttagctgtcctgccgcctgcttgtgcgccagcaacatcctcagctgctccaagcagcagctgcccaatgtgccccattccttgcccagttacacagcactactggacctcagtcacaacaacctgagccgcctgcgggccgagtggacccccacgcgcctgacccaactgcactccctgctgctgagccacaaccacctgaacttcatctcctctgaggccttttccccggtacccaacctgcgctacctggacctctcctccaaccagctgcgtacactggatgagttcctgttcagtgacctgcaagtactggaggtgctgctgctctacaataaccacatcatggcggtggaccggtgcgccttcgatgacatggcccagctgcagaaactctacttgagccagaaccagatctctcgcttccctctggaactggtcaaggaaggagccaagc

SEQ ID NO: 55397 - DNA, 1049 bp, Homo sapiens
aggagttttctggcaggcgagaaattaccagcagatattcccgcgcgggatgtaggctttaatttagaaatctccgccccaaaactggcatcttgaacgcgggagggcattatgagttagaggccccggtttttctccatttatccaaatcaggtagccgaaaggtaaatgaggcttcaagttgggcggcgggcagcgaacttgacagaacctcgaaactctgcagatccgccgcccaacccagccgccagctccccgtgacttccgctttcggtctcaactcctctccctgaggagagtggtttaaacggtgaaggctgcggggcgtcgccggaagtgtcgtaaacgtcggatatccggttcttctgggcgctaagggagctgacggagagggccaccgcccagcaatagacggtgcctcagcctgccgagccgcagtttccgtggtgtgagtgagtccgggcccgtgtcccctctcccgccgccgccatgggctgcacgttgagcgccgaagacaaggcggcagtggagcgaagcaagatgatcgaccgcaacttacgggaggacggggaaaaagcggccaaagaagtgaagctgctgctactcggtgaggggctggaggcggggactgagtggtggtcgggagagcctaggcgcttggaaggcctgaacggggtctggtcgggccgacggaaaggaccctaaagggatctggagggcgtgccgggcgtggggcggggtgttggggttcctagctgaggccccagagggcgtgatgaggggggtggggttttggggttgcgggaattaggctgtagagggtgtgactccgggctagaattgcgtttagcagagagacttgggagtatgggccggtagatgttgagggagtaggaatatgggaaaagctcataaaggaagagttgatactaggaaggttttacgttgggttggagcgtgttggtaacgagaacggcatagagtatatgttgggcttgtataatggtttgtgagtttggagcgtcgtggttctttggcaggataaagct

SEQ ID NO: 55398 - DNA, 1006 bp, Homo sapiens
ttaggataagttacagagttggacatattcactgtaaagactatggtagacttctggtggctgttttatcctttttggcctcttcaaagcaaaaccattgacttcaggaattactgtttatgttatttgatagtcgttttaattggctttttttaaacacagtcggatgtattttactcaacatgagtttcaaaatttttgagaggctcagtaaatcatacaaagaatactggcattagcttactaataaatcaagccacatttcttcattattagtgaagattttctagggtagtatttccattattttccaatattttctagggtagtatttccattagagaagaataagtaggagtaggggtttctacagaaacccttacaagcaatagaaatttactttttaaaacaattgatttttgaggaaaaggagtcactttaggggaaatgctaaattttcatggtataaagctccagagaacagaatgtacactgtaacccaagacttattttgtacattctaagtgcccctgttagtctcttcgtgtgaacatatttggttggttgtagattgcagaagctctggtaatagcttttttgaatatactataaagggaaagttatgtattggagcttaaggttccggtttgtatacctgaactttcagaagatgcgagttcaaattgtagttctagactgcgactgtctgtataacaggtggatatgcatggtccctggtacctagtaggtgctccttaaatatttactgttaaccagcctgagccagcaaatgttgaacactggtccttggggcctttgagaaatttgatataaactataacattcagggcgttaacttttttttttttttgagacggagtctccctctgttgcctaggctggagtgcagtggcgcgatctcgtctcactgcaacctccacctctcgggttcacgccattctcctgcctcagcctcccaagtagctgggactacaggcgcccgcca

SEQ ID NO: 55399 - DNA, 1062 bp, Homo sapiens
tctacaaattcaatgcaattcccattaaagtaccaccatcattcttcacagaactagaaaaaacaatcctaaaattcatgtggacccaaaaaagagcccgtatagccaaagcaagactaagcaaaaagaacaaacctagaggcattagattacctgacttcgaactatactgtaaggccataatcaccaaaacatcatggtactggtgtaaaaacaggcatatagactaatggaacagaatagagagcccagaaataaagccaaataacttccagtcaactaatcttcgacaaagaaacaaaaatgtgaagtggcgaaaggacaccctgttccacaaatggtgctgggataattgacaagccacatgtagaagcattaatcacttttgcagtctgaaaatacggcccttttcaggaattaaaataatgtaattttccctgactacgctattcctgtagtacactgatggccatagagtagggtgcttaatactagatttcacagggcatgtaaggttctaataagcgctgctactacgtttctttaaaaaataatttttagcatactaaacttatatgcattattacaaaaaagtcttttagtttttaggcagttgtctctaataaaattgattcgtagtctagagatcttttagagatggttagtaaaacctgaagcactatgctgttcctcccccgtggtgctgagcttctgcatcctctagcttgggaaggaaaagggagttgttaggcctctgcagatacttccttttttcctatcctgtctctcttccttccctggtttcttctacagcatactttctcctggggaaaggagtgcgtgcgtgcgtgtgtgtgtgtgtgtgtgtgtgtgtgtgtgtgtgtttgtgtgtgtttcatcaggtccttccattaacttccattctttttcttttttttttttgttgagtcttactctgtcgcccaggctggagtgcagtggtgcaatctcaatgcaacctctgcaacatcactgcaacctctgcctcccaggctcaaacgatcctcccatctcggcctcctg

SEQ ID NO: 55400 - DNA, 1336 bp, Homo sapiens
tgggaggccaaggcaggcagatcactaggtcaggagttcgagaccagcctggccagcatggtgaaactccatctctactaaaaatacaaaaaattagctgggcatggtggtgcgcacctgtaatcccagccacttaggaggctgaggcgggagaattgcttgaacccaggaggcagaggttgcagcgcgctgagattgtggcactgcactccatccagcctgggtgacagagcgagactctgtctcaaaagaaaaaaaaaagaaaagaaaaagaaaaaatgtctagagcagtctgcactaaatttgttcacgttactgaagttcatttttaaaatttgttttctagccaataaaatatagtagactagcaataataaaacacatctctttgaactggtaactcacatcagaaataggagataccatgcaattaatacagggcaaagagaatgaaaactgagagattagtccttatcactgagcttcattttcctttctttttaccactgagggatttaaattgaacctcaggggtcctttgtctgtgaacttaatattattagccagatggaatattttagcaagttataaaggtaactatttttgtgttatgtctcttattcttgagtttgattgaagttagcttaacatcataaagctggttagaaagatagttaaaaactgaagttaaaaacctgaaaaacataaattcatgaagtacccctaatgtacatgttcaaaagaaaatacaaagaaatcactcagtatttgacttcccctccaattttaattgtcttttggtataattcttttttggtgtttagcaagttaaagttatctttaagcatttatcttgtccaggtgatcctgttaccggcttagtaatcagctgtatcatttctgtaattcaagctgtttgaactgaataacatagtgttaggatcactgtttaattgttctagttttgatagatacaatgctttatgtaagtgaaatatccgatttttcatgactttctgttaagttgtgacaaattcatgtatctgatgtgaactaagcaaagaagaaagatacctaaaagactaaatttgtttgacttatacctgaatagtggtctagtgatgttagaaacaagtttcaggaagagctagtcttcagatctgaacttcctttgatttccaagttagacttagatacctaaaagtttaagaaagattgttaaggattagctgagatgttactgtgtttgttgatccattactaattgctgttagggcttctttttgttgccaagtcatgttttcagatggataaatgtttttaatgttaatacaaa

SEQ ID NO: 55401 - DNA, 1070 bp, Homo sapiens
ttttgtgctttcaaggattgggctttgagcttagggctagtggagtcctaaacaggcacaaacccgaataattacaataatttgaccaagtactaatgtaacagtgtatgacattaccctgtaaagccaggttgagcctggtcagggtgcccctgagggagaattacatagatatggaagggttttcaggttgtggcagaaagggtttcattactattttaatcaaaatcaagaaaaccagttagcagcttatgagaagcaaggagattaggagctaggaatatagtcaaataatttttttacagtagccagagctggctagagataaaatgaagtgaggtggctgggaaggacagtttgggggctagttttggaaattaacctcttgaactgatggtcaaagggaataatctgtgccagccaccagggtggaagtgataactgttcagaaagaatgaggagggcttcagcaaggagttgaagtctgagttgaataggggttttacggatgcttatagcatatgtagaggcttgtcatgtttagagggatagtgggctggctgaaaaactattttgagattgtaggctaaggaaacttagtaatttcacaagaaaaatagatctgtaacttctcccaccagaccgtaaagtccataaacttatttgtatttgaagtcaccatattcagcattttcaggcatgtaggagacatgtttgttgaaaaaaaatttttttatttgctcagtgatgtttttcctatctgttattcttctagccttttcttttattgaactaagaagcaactggttttttaattaagtatagtaccttgaaaagccgtttgaatgaaatgtcattcttttttgtttgttcgagatggagtttgctcttgttgcccaggccggagtgcaatggcgcggtctttgctcactgcaacctccacctcctggattcaagcgattctcctgcctcagcctcctgaatagctgggattacaggtgcccgccaccatacctggctaattttttgtatttttagtagagatgaggtttcactatgttggccaggct

SEQ ID NO: 55402 - DNA, 1145 bp, Homo sapiens
gatattatacttttatgttgattaccgagaaattcaaagtctggttttcttttcttacaggtgctggagaatctggtaaaagcaccattgtgaaacagatgaagtaagttggaatgtagcgttttgttagactaggatttctcctaatgcatataaagtccatagtatcttttcattttaggtccatggtattgacttgtggttttctttgttttaaagaatcattcatgaggatggctattcagaggatgaatgtaaacaatataaagtagttgtctacagcaatactatacagtccatcattgcaatcataagagccatgggacggctaaagattgactttggggaagctgccagggcagtaagtgtttctcatttcctcttcacttgctcttattcagcagatacagttaagttaagcaaaatttttgcttcatgttttagggaaatgaatttaagcaacaagataaaatgtagcaaagtactttgtgctcacttgagaaatgttagcaatctactttagcaggtgttagatataaccaccccaagaggagcctaggaaatgggattctgtgggtgcacggtaggtttctgggataactgttctattcaattgctttttttttttttttaacagcactgttgacttttatagtagtagataatagtacattaaaataatctaagagaaaggttgccatgatatgtagctctgctttctgaggtgtacagattaaaggccaaaatcagtctcccagaataaattctgtaaggacatgagcactaagtccaaattcttgaatatctaagtcagatattcaagaatactgtatactacatggaacctaaggctatagaattggagtataacatgccctagtataattctttaatgccttgcacatgtcagctatttaaaaagttgtattattataataatacttagtggaccctgaagatctagtttataaaattagagcatgtgtaattaggatgttttatgccattggggagggtgccaatatgaaggcaggagatctttgatattattatcagctaaaatccagagaaggctgggaaattatagaattatttcctacatctaagggactcactggctgtgttcagagtgtcatacttatgtg

SEQ ID NO: 55403 - DNA, 1052 bp, Homo sapiens
atggtatagcctgttgctcctaggctatgaacctgtacagcatgttattgtactaaatactgtaggcaattgtaacataatggtaagtatttgtgtatctcagcatctctaaacatataaaagggtaatgcaatggctatgatgtcactggggctaggagtgtttcagctccattataatcttacaggatcactagcatacatttatacagtctgttgttgaccaaaacattgttatgcagcacatgactgtatttgaaaacttgcttattctttcaatgagaacttggctttagaaacgtttcaggattcttgcctaccttttaataacatcttagttgcaagtattgatagcttaaataattctaccagtggtcatcaaaggtagattataattgctttttttcatctttcattcagaaagctctgaatcctctaactacatgtgcttatagagattttcataactgttgatctaagcttgcctctttacattagtgatagtatttggttttatagatcattaatgattcacttacattggtgccatctgctcatcagttttctagcctggaatcagcaaagaatacagttttgaagcagtcttttaattatttccctgaacaaattaatttttttggaggtatttacaatttgtttttgatttagattaaaaaaaaaaaccccagacctccccagctcttctgtttactgaaagaaaacggaaaatattcttactcactatagttctctcaattttagttaatcaaacaccattctctaatgtcctgtcaaatggttaaacacgcatgacctattgagtttaattgtctgaggacttttggtatagtttggttttgatattatacagtacacagttgatttagtattacatttcaggaatttttctttaataagaacatttcctgttcctattgttttaattttttaaattggccttcacaatttaattctgtagaattaaacctacttttgtgtccgggcgcggttgctcacgcctgtaatcccagcactttgggaggccgagacaga

SEQ ID NO: 55404 - DNA, 1004 bp, Homo sapiens
tcatttaacattgaatgtgcctcaatttctttatctgtataattgggataataataatagtacttctaggagtgttacaagggcaaaatgagttaagatgtttagtagtagtgtctggcaccatggtaagcactcaataaatataccattattattattatctcaaactgttttatttagctctttgcttttcctgtcttttcccctccttcctttaatccatttcagtgcttattctgctgacttttcacacatctggtacaagctttgatagagaagaggctcagctatctaaaatgagaatctagattattcacaagttttattttctcatgttgttgtcttgtacttttagccaggataattattttgactgcatttaatctattctttttcttctattataaatgaagttttgaatatgtaatagtgggaagtttcctaatcatttcagtttaggggaaggtgtatgtgtgaccttgctgaatttgctttctttccccttgcgcaggatgtttgatgtaggtggccaaagatcagaacgaaaaaagtggattcactgttttgagggagtgacagcaattatcttctgtgtggccctcagtgattatgaccttgttctggctgaggacgaggagatggtatgttggagcttctggtaaaaagcctgtctaatgtagccaggaaatggaaaataacttattaggaagattatctgcatccatttcctcattcaaccaaaacttagtatctttaatttttttgatctgtgccctattactctaaaaaagatgttatagccaccttgagtatgtggaaaggatgttagccagcccttcctcctacctcctctcccccaaaaattacaaaaatgaggactgacactcaactttatcttattggtgtttgacttatttccgtgaatgccatttagtgctgcaaaacttgttggtttgtctttttcattaacttaatccacttttactatttgctactgacctatc

SEQ ID NO: 55405 - DNA, 1094 bp, Homo sapiens
acatgtagttgcagagagacataaataattttattatagtgtttaattgcacataaataattttattatagtgtaaaatatgcattaatagaagtggaatagaagtggttacttctgatggggtcactgtagtctttttctagagctactaagaggatgaaatagaaatcatcaggcagacgggaataaaagcattttagaaaagaggaattgcatatatgagaatatggaggtaggaaaatggtatgaccagttgtggaacccagaaggaatttggtattactagagtttacagtggcagggaagaagtggttggagagatggtcagagatcaactcatggagggccttatatctcatgctgagacgatgatcagttaaaggtttaatatcctaccatgatccatatcatggggtgcatgatatagaagaaactgtgcttgagaaagattatgcaataaataataaagatagatagtaggggatttgaattagtaagaactcaggatggaaataaaaacttttgatggggattaagggatatatcatagaacccaagggcaagaatggacaggtcttagaatggaattagaactaggaaataattgtcaggaaccctggaagcactctttatccccatcttttttctctcctctctgtgtatcttttttattattctttctttcctaaccagctttctctgctattcagtttatgtgataacagcctagtcacagtttctgtatctctggtaaaaagatcagactaggctgggcgcggtggctcacgcctgtaatcccagcactttgggaggccgaggcgggtgaatcatgaggttaggagatcgagaccatcctggctaacacagtgaaaccccgtctccactaaaaatacaaaaaaaattagttgggcttggtggcaggcacctgtagtcccagctactcgggaggctgaggcaggagaatggcatgaacccgggaggcagagcttgcagtgagccgagatcgcgccactgcactccagcctgggcgactgagcaaaaaaaaaaaaaagatcagactagactgggattgcttggccttggtttcaaattcc

SEQ ID NO: 55406 - DNA, 2606 bp, Homo sapiens
ataccaaggagatctatactcacttcacctgtgccacagacacgaagaatgtgcagtttgtttttgatgctgttacagatgtcatcattaaaaacaacttaaaggaatgtggactttattgagaagcatggatgttagtgaaaggtaaagtttcatacaaggtagttatagtgctacagtgatgtctcttggtttttaaactttttctaattaagaatattcttctcttctagttactacagtgtggagtgttgagaccagacaccttttgctgtctcatggggcagctacaagcatgaacgggaccagggaatggcagcagcatgcagaatcttagcactctttagcacaatattttgtattagggaacttttaattgacatgagatgctaaagtcagacattggaattggaagaactataaagtgtgattcgatcgtcaagacatcacttggatttcttaatcttaaatgcttatggaagatgtgaagttgaggtgctgcattctagaacttcaatatgtagcttactctttttttccccccttcttaaaccaccagtggttcatttttaaggttttttcatcaagagaagaataactttactaaattttatttctttatttgcaaaagaatctttattaaaacaaacaatcttaactatgcacatgatgtgaccagatcatcttgaaaatattcctctttagtaggaactctttgtttttaactcttggtatggtcagaatataatacttccataattacttataattctttccggttactggggctataaatacaactttttaaatgaaatttatgttattatcctgctcaaagtaccattatggtttccatatggtaattacattggaaagttctgcaataagattctagttctctcttttctttaagcttatggttgaaggttaaccttgtttgtgcagattaccaaattactgctgatgtagtatgataaagtcagcttcttggatacagacacacccagggcagctgccaatcagaaatgcaaattgctaaattccaaacagaaccagtgactttgctgctacatatttactaaattgaccactttgattcttgcttgtttgtctcagttatagggagttttgtacatggtgcctcttgttttccatcttcatggccttttctgttgagaaacatctaaagtgtattaacagtgcatgcttttactttgtaaatgtggtgccaaatccctgtttgccatcgtttttactgtaccgatgttaactgtagtaatccttagccagtatgttcttttgctgaaactgttgcattttgggacttttttccactttgtcatgtgtacatttttaatctgttatagttggcggcagtattaaaatggtgagtaaagagcccaggtttgctcctgtttgtaactagtcttttctggaaatactgtcttctgtttccttttgcctttgcagaatgtgctttagcctttgtctgagaatgggtttaggtagaagggtttcctgaaagtctagtcttttggtgtaatagtattgttgaaccttaggttttatgttatatctgcatatgagtgatatgtgatcatgattcattttgcagatttacattttgcttgtgtggaaagttacgttcacttcaacctacagacccttttgtataatgtacagcaaatgtcattaaatattgaatgctctattgggggaagacaaatgaagagaatgcattttgagcatttcaaatcagtagtttgggcagtgccttttggggtccaatctttttggattggattctatttcatcttttgatgtgacttttcactagtttacaaaaaaaaggttggtggtcaacaaaaaaagcaagtcatagcagttcagtgcctttgttggtagtttttaactttttttgtgattctttttggaaaatcatagcttacagatggtataactgtattatataatggaattttctttaggtgtgggaaaacttgatctgaaagaaaattatcagcttcaattggcgattgattcagtgcccacaatgtaaacagggttggtagttgttactcattttgaatataccttttccttattgtattctgtaatataggatcctggaaatgagacctggtggaatattattttcaactgtagtctttctatactgtggactaatgaaatggtgttgttgataatctaaaataaccaataatccaaaaaagttcattttactttgaatttgtattttcatttgaatatctatctgatatgttaaatttttagcccttctgttaaagaaaaatagcaggtccccatttttctgcctctgtaccatttacatttgctctctgtttgttaacatgaagatcactcttatttcaccatcccaaataacttatctaaatgcacattccttgaggacacagggagacaatttaagtcagtagtttttaatatgacttaagtaaaaatcacttggacccatctaagggattgacttttggctggtgggctggcaatcgattttttttttttttttttttttttgagacggagtctcgctctgtcgcccaggctggagtgcagtggcgcga

SEQ ID NO: 55407 - DNA, 1008 bp, Homo sapiens
aagaagccattagtctctgtgtaaagaagaagtattcttaatggacagtcccccctaaccttataaattcagctttgcaacagatttcacctcctagcatgaaaattccaaaaactttaacaattactcataagtggatcttgagatgacattttcatcttggacagtttgaattctaaatctctagttcacagtgaatcgttttttaaatttttactgatggatcgttatttttcacaaggtactacattcttacaatgtaagactagatggaccaaaattttaaaaaaaacttcttgccttgtttttttaattttcatatatattctatttgttgtatatacacattagactattttaaaataacagctggtttttgtaattcattcattcaccctatattcttatattctgctcattattctctcatttatagctgtgacattctttggacattacttgcctggcctgattagttacttaatataatttattcatttgcttagcatgtgtgacatagttctggaatttcctgttgcagaactccttgctgtattgcagtcatatataaggtaaagtcagtctcttgttcctattaaaaagctaccattgattattttccctttttacatgttcaaaaaaaaaaaaataagcaaccctctactcatttgtataaacctaaaacgtcactgttttccttgagcgttagtacttgtgggttctttccttttcatgtgtaatactgattttaagagcaatgatcttagtttgccagtgccaggtaattattgtgttctactttaggcttcgtagtgcaaatcagggatctgacctggatcagcctcagctctttacatagctttatgatcatcatattttgttgtattgctcccaacaagcacaagagaaaaaggcaggcttcctagagacctcaagttgaaagttgattttgctgacaactatcagggagtaaaagaaagcctttttcaggcactggagaactaactt

SEQ ID NO: 55408 - DNA, 1017 bp, Homo sapiens
tccctcctttccccccagttttctcaacatttatgagttagttctgctgagaacaacatacttcagaacatgtcaggatagggcagttttttcttgtttttcttttttctttttttgagacagtcttgctctgttgcccaggctggagtacagtggcacgatctctgctcactgcaacctttgcctcttaggttcaagcgattcttgtgcctcagcctcccaagtagctgtgattacaggcatgtgccaccacatctggctaacttttgtatttctagtagagacagggtttcaccatgttagccaggctggtctcaaactcctgacctcaagtgatttgcctgccttggcctcccaaagtgctgagattacagatgtgaaccactccacccactcagggcagttttttttctgataccatatcaggcctaggcctgggctgactcaaatcttctcaggaataagaggtaagaaggaatgttaaacagcagtagttacctggggtacatggttaatttgatttagcagattctttggctaaaccctagtaaattaaaatgtctgagccaggtcatgggaatatacatgtttttaatacattccttaggtgattttgatgtagccaatctgggccaacatttggggacaactgagtaggacctaatacaggttgaatagcccttatccaaatctcttgggaccagaagtgtttgagagttcagatttttgtgaggttttgaaatatttgcattatatacttattggttcgggattccaaatccaaaaatctgaaatccaaaatgccccagtgtgtgcttcctttgagtgttatgttgttacccaaaaagcttttgattttggagcattttagattttggattttcagatttgaaatgctcaatctatattaaagatcaacacaggctgagcacagtggctcatgtctgtaatcccagcactttgggaggccgaggtaagcagatcacttgaggtcaggagtttgagaccagcttggcc

SEQ ID NO: 55409 - DNA, 1085 bp, Homo sapiens
gctagttccactttttaggaccccacatctagatccccctcactgggggtctgacatctgggcacaaccattgctggctggcatcccacaactgggggcttgactgtatctatcgtttgctatttgctcattcctggtctatattgtgagcctccttaggagtatggggtgtccttggtcaggtccgtgcagggttcaggctggggctgctgcccgcactgtgtgtgcttctgcaccctttggttcgtctctcactctagtaagcatctctgcatcatttggagcaggcagtgaggtgcggcagtgcctgtctcagtgagggcttggctgcctggctctgtgcttgcagagggatatctgcctgctgtctgctcccaggccttgtggctaaggaaagacccaccctgactttgatgaccagatcatgccgactgcccccacccttgcagctgtctgtagctatagcccaagtatcaacctcctatatttttttgtttcattgaagatgactggtgcaaggtctctactgtcctgagggtgttctctgtgcccaggtctgtgccatccagaaagggtgtcccctgggtggggcccttcctggccctgtttggttcagcaatagggcaactgatacggatctagcccagagctggagacccttcggtggtcagatggtaagagcatctgatacttgtggggtcaaagccgtggacacccctgtgcctactgaggcagtcgtggcagtgtgtgaggggctcctggtcgagaggggagatggggtgctcagaatctcagagttggtgggagtggctctggagcagcccactctggcttttgcttgacttctccgtaagtgtgggtgtatgtgtgtggtgctgacccctagagaaaggaccagtaggcagctgagtcttctaggcctggcctctgagaacgtagcggttactgcccgtgtgccaccttcagtgagcctgcggcagccctggagagtggtctggcaggctggggggatggcactggctgttggaatctgtcctgctcaccccaggattgctgtggagcctgagacccccctgctaggagag

SEQ ID NO: 55410 - DNA, 1012 bp, Homo sapiens
ttccccagggccctctgtggtgcccccggtccagatcctggggcctgagtggcatagactgtttgtggcagctccttttggaggggcaggctaaggccaggccacattttggcagccctggggccctgggggacagggcgggcctccagggaggaggtagggttcccttgccaaccaggccctccacttcctctcctcttcccttgagggctcgtccctaggtcagagctgagcagcagctgcggcttctcttgtgctgcacaggtctaggatgtcaggcacagggccctgcccctttgagtggagaatctgctagtccaggggcgggtctgatcctgggttgcctgccctgggagctgcaggctgggggtccctggtgtggccgcctggtccttaccaagcacctggtgtgtgtctctgagggtgtctgtgtgcgtacgtgcatgtgtgtgcacacgtacacacgtgcacctgcctctgggaggtagtcacgtggagattctcatggcctgagggatcaggctctagtctcatttgtggaggtaatgaatctacttgttctaggggcagactcagaatccccaccccaagcctggaatgggtgaggggtccctgcgttagaggtgagggtgagccctttgggagccacacacacaggcctactcctcagctactgaggagggactgccctctttcccgaccctgggctctctcgggagctggcctaggcagggcaggggcccagggctttcaggggctgcccctccaccctttgaccctggcatcactgtctctgcagaggctcggggtggtctgggggcccctccgctgcagtctgcccgatccctgccgggccccgccccctgcctcaagcacttcccgctcgacctgcgcacgtctatggatggcaaatgcaaggagatcgccgaggtatcacctggcaccacccgcaccctcaccccgtgtctccatgccctgcctctgctccccacacccctcacctcaagctgtc

SEQ ID NO: 55411 - DNA, 1029 bp, Homo sapiens
ttccagaccctttcagagccccttttctgcctctttccctcgcaccctgccttggggggtctgcacagggagcatagagtgggctttggagtcgggctgctgggttctgttctgtcttctagccgccggtgtggctgggtcatgttgcttaacttatgggtctgctttctcatctctaaagtgagtgagaacagcacagggttctgcagctctgcctttgaggatcacatgtgacaacatgtgcacagcacctagtgcggtgctgggacctgggagcaagggccgtccctcgggatctgcctgacttctcacccctcttgcctctaggctggagccagacatcctgcttcgggccaagcaagatttcctgaagacggacagtgactcggacctacagtgaggagggcagaggggcacaggggatgcggagctgcagcctgcccttctgccggctctaaacccctcccttgaatgcaccccctgcaggctctacaaggaacagggtgaggggcagggtgaccggagcctgcgggagcgtgatgtgctggaacgggagtttcagcgggtcaccatctctggggaggagaagtgtggggtaagtatggggtgtatgttgggtgagtcgccatcacctatgtcttagtgggttcccccagcctggagagctgggggtgggggctggaaagggcgtttctctttccagcagctggaggggcggaggggcagaggggctgcctaggagccacttgatgtgctggaccagggtgatctgagtgttcctgggggtcagggcctgtgggaggtggggatagtttgggttctaagataaggccttagggaggaggtctctgagtccaagactgaggagagtgatcgcatatcctcatctccaggtgccgttcacagacctgctggatgcagccaagagtgtggtgcgggcgctcttcatccgggagaagtacatggccctgtccctgcagagcttctgccccaccacccgccgctacctgcagcagctggctgaaaagc

SEQ ID NO: 55412 - DNA, 1025 bp, Homo sapiens
cctgtgtctgctggtgggactccccatctctgccccatgccatgtgccctagcctcctgggcttctcagcctggtgcctgggcacctctgccctgcctgcctctccctacaacccaggctcattccaacctcttggggtacaggggtggaggttgggcaggagctgtctgacctactgggtcttcaacatctcttgccctctgtggggcctttgggttgggcagtgggtggcttggaagagccctgctctgactttaccctcctcacccctgcagatgccccggtgcacccccctgcgctggagcagcacccgtatgagcactgtgagccaagcaccatgcctggggacctgggcttgggtctgcgcatggtgcggggtgtggtgcacgtctacacccgcagggaacccgacgagcagtaagaggggtgtggtgcatgttggggggatgcagcgtgggaggttgcgttggcttgggagaggccacagggctcggcttgctctcctcacccaagctcccctccatgccagttgctcagaggtggagctgccataccctgacctgcaggaatttgtggctgacgtcaatgtgctgatggccctgattatcaatggccccatgtgagtcccctgccatcccagacacttagctcccctcccagcccagattctccagccccagttctgccccagactcccatcacctggtgtcttgcccttcctagttgctgagccctcgacttccccgcagtctacttccctcttggcagcctccatccttaccctcccacctgctccctctgatctgctacccaagccctccccaggtgcctcccttcagggcctaagtccctgccttgttctcctcatgcccagaaagtcattctgctaccgccggctgcagtacctgagctccaagttccagatgcatgtgctactcaatgagatgaaggagctggccgcccagaagaaagtgccacaccgagatttctacaacatccgcaaggtgggccctcaccccgtggcc

SEQ ID NO: 55413 - DNA, 1170 bp, Homo sapiens
caatgtaactacccttccccaccccagccttcagcctggggccccaacttggattttgactaattcaccctttgcacatcaggccaagcctggattcccctccccctgccctctgctgtggcctggacccccagaaccactgtgccctgcccagcctcggggccacctgacaggccctccctccctgttgcctgcccaggcccccgtcctgcagtacctgtactacctggcccagatcggcatcgccatgtctccgctcagcaacaacagcctcttcctcagctatcaccggaatccgctaccggagtacctgtcccgcggcctcatggtctccctgtccactgatgatcccttgcagttccacttcaccaaggtcagagcccagcaggcagccaggcgggcgggcgtcccaggacgctggggtctcccgggttgggtggggggcggtggggggggcggtctctcgggttggtgctgccccctgctggtagagcatagctggccaattgacaagtcttatggagttgaggggttggggggttggggggatgggggggcgggggtggggagagtgagtgaggaggctggggaagggaggcaggggcagctggccagggcgcactcgtctgagggaacctggcccgtgcaggagccgctgatggaggagtacagcatcgccacccaggtgtggaagctcagctcctgcgatatgtgtgagctggcccgcaacagcgtgctcatgagcggcttctcgcacaaggtactacagcgcctgcctggaccttggcatggcatcactcctcccctcctctgcatttggggtcctgacctgtccctgggatggcttggggtggggcatgacccctcagcactggctgcagccctgcccattacccccgctccttgcaggtaaagagccactggctgggacccaactataccaaggaaggccctgaggggaatgacatccgccggaccaatgtgccagacatccgcgtgggctaccgctacgagaccctgtgccaggagctggcgctcatcacgcaggcagtccagagtgagatgctggagaccattccagaggaggcgggtatcaccatgagcccagggcctcaatgagcctggtccatgaagtgcccaccacatcgcagcacttttaccacgttttgt

SEQ ID NO: 55414 - DNA, 1070 bp, Homo sapiens
gaatctcacatcagctgagacacagcgacatccagccaggatacggctgagataagcggccttcgggttttgtcacagggtagcaggggaacctgggacaatacccagcggcccaccaactgctcccttgttggggaatattccttgcctcgtagcgtgggtgagcctgctcctagctggtcctcctgccttcctgatggcttcctcgctgcctccctctctctacccacctcttccttctccccagcaggccaggaggccaatacctgctgcaggtgcctcgcctttccttgcagctctttcctcagagcctggagtcaggatggaagttggttgggagagaagcaggtgctggggcaaggtggaaggaggaggggcgagaggaggagaggcttctccatggtgttcatcgaaagccctgggtggacagatgcaagatggaccagcagctggtgttcaggaggccactggtcaggccctcactccgttccctcatgcaaatgtgactgcccatagaaaccaactccctctaacccagcacacaggagctgataagctacttatcagcttacaataaagactgaaaacaacaagcacaggattttttttaaaaagtcaaccagaagtggcttgatgagcaatatattggaaccagggtttcgaagagtctgggtcagccctgggcctccttctcctctgcacccatgtgcacttgagcagagcccttctgcccagaaagtgcctttgtgggtttagaaaaagatgtcccttccttgggtagacacagcctcctgatggggagcacagcttggccagcagagcacaggctggcttgcagtctctgatcacccagaggctctcgcgcagcatgtaacccacctgacatctgtgtcagcctggctgggggtctctggagtgcccacagcctgagggtgcacgtgtagctgcattctcactgatgccactagttcttgtgcctactcttggaggatgtcacctatccaggtctgaacgttccaggcagcatcctacatgagtctgtaaatcaactgaagctccagcagccccca

SEQ ID NO: 55415 - DNA, 1049 bp, Homo sapiens
tccttgcctgtgttgtccttcccacgttaggtctgtcatgccacgtatgtccgcagtttataacaatctctatcatacattgaaaagttttgaaaacttatccagtgaatccctgagcaccaaatgttcttttgtgttatttttctttattaggctattattactttattcagaatctctctgttttagagagagcctttctttcttgcctaacctagagtgcagcggcgcgatcatagctcagttcagtcttgaacccctggactcaaccagttctcccccgccctgggcttctgggcgtcctgatctctctcctgaaacccacggggctgggaggtgggaggagatcctactcctagccccatgagcgcgctccaggcctccagattggcccgtttcgggggcagggcgggccgtggggcggggtcgcagcaaggcttcccctctaccctctctgggcctctcacaaacgctgagccccgccccgctgaggcctgtctgcagaatccacagcaaccagcaccatgcccatgacactggggtactggaacatccgcggggtgagccagggtccgctgggcggtgggacgggggtgcgtgggggcggggaagtgtggagcagctgcaggacgggctctagggacggttcctcttcagggctgtccctgacagcggggtctgtgcttgccgctgtctgtgcgtgtggctgggcgtgcggggtgggggcgggtgaggcaggaacgagaggaggagatggggctccccttgtgcagagtcgtcacaaagtcagggaccctccatctctgacccgagctgtgggccatctctcccagctggcccattccatccgcctgctcctggaatacacagactcaagctacgaggaaaagaagtacacgatgggggacggtaatggcaccctcgagtctgggccctgccccctcacactaagttggcaccaagcaaccgatagtggccacctgtggctgactctgcaggcctcccttgctggaactgcaggctgtcccttccctgagccctggtgaggg

SEQ ID NO: 55416 - DNA, 1106 bp, Homo sapiens
acctgctgtgtctgcagtggggttgtgccagccctcatgggcagctgaccttgagttctggccttattttcccccctctcagggcttggagaagatctctgcctacatgaagtccagccgcttcctcccaagacctgtgttcacaaagatggctgtctggggcaacaagtagggccttgaaggccaggaggtgggagtgaggagcccatactcagcctgctgcccaggctgtgcagcgcagctggactctgcatcccagcacctgcctcctcgttcctttctcctgtttattcccatctttactcccaagacttcattgtccctcttcactccccctaaacccctgtcccatgcaggccctttgaagcctcagctacccactatccttcgtgaacatcccctcccatcattacccttccctgcactaaagccagcctgaccttccttcctgttagtggttgtgtctgctttaaagggcctgcctggcccctcgcctgtggagctcagccccgagctgtccccgtgttgcatgaaggagcagcattgactggtttacaggccctgctcctgcagcatggtccctgccttaggcctacctgatggaagtaaagcctcaaccacatttgctgtgtgtcttgtcttatttgctcctggccatctacccagactgtctgtctgtctgtcactgcctcttccaagggactggctggtgatcctggcagtggctgggttctaaaggattctgctgggcatagtaaggcgcttgagaattcttgctcccattcctgagagactcagagcaggaagccccatgaggcactgtggaaaggatgtctctttcttggcctggatctcccattcattcatccagccgtattgagtactttccataattgcacagagcttgtgtctcattgaataggaccccaagggggtggaatctccatcagagagaaccagggtcccttttaccttctccactatatgactgcatcacttctgttaggtctccaggacccaatctctattgtttttctcagatggcttccaggtaccctctccaggcttgctgcacagctgtcatcaggacgttctctctgggttta

SEQ ID NO: 55417 - DNA, 1036 bp, Homo sapiens
atttggggccaggactcttgcattcctgcacacactggtcttaagtccctggtaccattcatcctccaagtgctttcccatactatcagcagttattctcacgactccaatgtcatgtcaacaaaagcagaggcaattcccaccaaccttaggacacgatccaggcatcccagggtagaaattcagttcctgtatggtaaagtttgtgttcagaatctccttcatcagctctggcctctgacttctgtcctgggtcatttctgtcagccagttcacatcacctgcctgctcctagaatatgcagactcaagtagaagactcaggaatgtaatggcaccctcgaattgcatcttctcctcaacagttttctgagtgctgtcattgacatgcacagggatctgcgcattttcataacagacagctcagaggcagtcagagggcctttattcctctccctccttcctttcaacttgaacttctcatctccctggaaactagtcaatgttcattgttttcttctgccaccccattagaaggaactttctactttccctgagctcccttagttctttgcatccttgattctgctggtctggatccagaggctgccaggtgcttgggcgctcctggggctgacccagaggctattgggaggtcagtgaggacagattcagggacagcatctcattcctctctgccttctgatcagtttagatagggtctggcactcagtcagagtctaataaatgctgatgtatccaattgaagcctgggcactgccccagttccagcttggggaagatggctgcttgcccatggccagcctgggccgtccacagccccggggaggccacgtctgtgcagggagcttttgtccgagggtggtgacagctgttttctgcctcaggagaaactgaagccaaagtacttggaggaactccctgaaaagctaaagctctactcagagtttctggggaagcggccatggtttgcaggaaacaaggtaaaggaggagtgatatggggaatgagatctg

SEQ ID NO: 55418 - DNA, 1055 bp, Homo sapiens
ttctcctctgcatgaggcagggtgtgaggcacagtgggagttgcatagatgactgccccatcctggaaatgagtgcagtgagaggcctgcaggcagagcagcctgtgaggtgtgtgtggcaccacctgggtaccgggcctggggcctgcccctcactcacggggaaccatccctcacctgtgttgaagttgtttgagagcagcaaatcctactttagtacagatttggggatttgaggcattagtccaacaggcttctgagcctagaatctgtttccctttcccactccccatcaagaaatctgcttgctcagctagttcccatcagctctggttctggtccagcctgagcagccttggggttatgtaagaggtggtgggaggggagcggtggggaacagccgagggctggggcatggagcctgcctgggcctggccctggccctttggggagagggagccctggatctctttgaattctttagaagttacatggtcattgaatcctggtaagattgtgtgcagcacacctgagtgtcatgtggcctggctagcagtagtagggctggagatgtgatgggggcacagggacatagggagatttagctcaggtaccaggtggagaagtttggactttatgctttaatgggaatgattagagcctggtctggccttcctttggtggttcacccttaccctattcagtttcatccaggttttgctaagtcattgggtgagatctgtgctctcttcttggctgcacaggtgtgttctgagcccctttgttctgctggaggtcctttctgtgtgtgcaatcctaggcaagccaagaacctccctgtgaaaaaggagaatgtttgtgccgacaaggagtgacaggatctggcatggggtgtggctgggtggaagaggaggagaatttggcaaaaacatgctagaactgaagacagaaccaggctatattccagccctgtcccacttactagctatttgagtgtgaggaagttgctgaacttctgttcttctatatgagaaacggtgataatagaactgacc

SEQ ID NO: 55419 - DNA, 1002 bp, Homo sapiens
tgggtatcaaggcagttttgcatgaggcataaagatgaatagatgtggaataatgattggggggcaggtggaaaggcatgacagtcattggaaagagcttgtgcaaagatgggaggcaggaagaagcagggaatggggaggtggtatagaggcttgtgtggtggagaatggctagacctggtgtaacccagactagacaaccttggctttcttctggagtgatgggggccctgatgtttttgggagaaggaggtaaaggcagcaggttggcgtttcagaaaatttcccccagtggtaagatgaggagtgaactagaaagcagggagacaccagttaggaggctcttgaaattgtccaagcaactgattgaggggtgaaggtggggatggaggagacagaacccagagatgctgagaggcagaaccagcagcacttggtggctggttgggtgtggggcaagtccaggaagggctggactgcctacctgcctgctggttggcctggtgaagagaagtgacatccttaagcaaagcttgtgacctggaagaagtattgatttgcctcaagccctacagccaaccttcctggattcaaatcaggcctctagcacctactagctatgctcctttcacctctctgtggataataaactgtatttgtgtaccacatagtggtactgtcagaactacattagcaaagtgcttggtacctagtgagcgcttgttatgtatcaggccaggagaagggaatggcaggggacttgagccctggatcctggcaccccagagttgagcacccatggatcctcacactctcaccctttccagcagtaggcattctgccgctttcatgctcccccacacaccccaccctgggagttgcatgcaggctggtgcatggattttgtaaaaagccatcactcaccaactgttcctggtctacaaactcaaatgtaatttggcacgaggtctccatctgactgtcaatctgtaagagagagca

SEQ ID NO: 55420 - DNA, 1051 bp, Homo sapiens
aatcaccatgataccctggctccagaagtccccaggatgccttgggtgtttcctcaagggacaaggctggatttgaagtctgagcatcattggaactcccagggctggctcagctgcatacatgtgtacactgcgtgtcctcgtctctgcgtctcgtgccacacgtgccctcctacattcaaccttgcttcccaaggcagggtctagggccctgcaacctgccagtggccaagtccagtctcgttgcttcaatcccaagtcctcaagccttggctgcattctagccccagcctgttcctgcctgtggctgtggctgtggctgtggctgtgtggctcctggctatgcatgaaaccagtgtctctggggcttgaagttgtcttgtattggtctggaaggcaaccgttcagcctcctgacctgactgctgctcacccctagcttggcctgtggccagtgggaacccctgcatgggctgttctcttatcttccttctccccaacccccagtgtgtgcatctcaaccctattctttgtcactgctcatgagaccctgcatacggcaccttccctgtgtcatgagcacccactctagtcccatcctcttctcagccccagggctgagctaggagatgagggccccccagactcacattcccctcttgccccgctctgggaaagctgtgctggaggctagtgactctatctcctccccatctttctctctccttctctctgtggttctttcagatgtggtgaccaagcctgattgcaactgcctgtaccccaaagccatccctagcagtgacccggcctctgtctcccctcatcagcccctcgccccctccatggcccctgtggctggcttgacctgggaggactctgagggaactgagggcagctccctcttgcctggtgagcagcccctgcacacagtggatccaggcagtgccaagcagcggccacccaggagcacctgccagagctttgagccgccagagaccccagttgtcaaggacagcaccatcggtggctcaccacagcctcgcccctct

SEQ ID NO: 55421 - DNA, 1030 bp, Homo sapiens
gcttctagtgttgctgccacctgtgacctcagagcaactaaacccccctttttcaaatgtggcctttataaggtctttaccctcctggagaatcttcagtagctctgtgtggcagccactgcaagccctatattcttggcttggctgccaagccccttcgacagcagctgcttgccagatcgccacccccgcaccagttaaccctcctccccagctgaggtcagttctgcttccttgcttttaggatcatgttgacatagaacctgagtcttggaagggctctcaggggtcatttggccctggttcccaccccaaagggactgcccctctccatgtccccaacagggagccagccagctggctgtcacacactcccagatccagcccagctccctgcctagccacagcccatgccatcttccagtcagactgggagaaacgtcttcctcatgcgaggcaaaactggcttccctgccccctccatactgctcctccctcctgttctcatgaaaaccctcagatatttcaagtcaggtatccatgtcccctttgagaattctctaagctaagtatggccaagtccctcaaacgttccttatatgatatggttttcagacccctcaccatcctggacacactcgtttgtcaatgtccctctgaaaatgtgacgcccagccccggacacagtactccagatgttgtctgaccagctcagagagagtacagtgggactgttaccttccttgatatggacagtattcttctatttgtgcagattaagattgcattagtttttttcttaacaactgcatcatactgttgtcatatgttgagcctgtggtctattaaaacccctagttccatttcccataaacttctgtcaagccagaccatctctaccctgtacttggacaacttaacttttttaaccaaagtgcagtttatgttcacctttgttaaagccaccttgttggtttctgcccatcacctgaacctactgaagttgtgtgaaatcctaattctgtcatct

SEQ ID NO: 55422 - DNA, 1075 bp, Homo sapiens
acctctaaccaggcaagccagggtgggagagcaatcaggagagccaggcctcagcttccaatgcctggagggcctccactttgtggccagcctgtggtggtggctctgaggcctaggcaacgagcgacagggctgccagttgcccctgggttcctttgtgctgctgtgtgcctcctctcctgccgccctttgtcctccgctaagagaccctgccctacctggccgctgggccccgtgactttcccttcctgcccaggaaagtgagggtcggctggccccaccttccctgtcctgatgccgacagcttagggaagggcagtgaacttgcatatggggcttagccttctagtcacagcctctatatttgatgctagaaaacacatatttttaaatggaagaaaaataaaaaggcattcccccttcatccccctaccttaaacatataatattttaaaggtcaaaaaagcaatccaacccactgcagaagctctttttgagcacttggtggcatcagagcaggaggagccccagagccacctctggtgtccccccaggctacctgctcaggaaccccttctgttctctgagaagtcaagagaggacattggctcacgcactgtgagattttgtttttatacttggaagtggtgaattattttatataaagtcatttaaatatctatttaaaagataggaagctgcttatatatttaataataaaagaagtgcacaagctgccatgtgagtcgtgggaaagttgcttttggggtgtgggtggcaaacatcagggtgggtgggcagcagttgccggatgaaccccagctcagagaacctttttccacaaaacacaggggaggaaggttctctccaagtttcagtcttggtaccaaaacctcctgtattattgctgtcccaaacacattcatctgcatatctgctcgtattgggcagaaagtggccaaacatcaggcctggtcactggcccctgctcctgcccagcctagcccagcctgggaaaatggctggttgggctctgtccaagggccccggcggcctgcaaggataaggctccttg

SEQ ID NO: 55423 - DNA, 1992 bp, Homo sapiens
tcaccctgggaacttcgctctcgagcgggagaggaacggcttctgtggcccagcccagcgtggtgacgtcacgacagagtgccctttctccccgcctcttccccctcccgggagctgccagtacttgacgtggcgtcaccgccctctaccctcgctttgcgtgcgtgtttgcgtacagcggaggtggcggcgcgggcaggtcggagctcggagctgctgttctggttctcttgtggccgccgtcgctgtccggctgccttgggctgccgaacagacaaggcgtgggccacagcacctcagaagccgacgcagctcgacgcaggggccggcaggagggtgggcgatcgcgtgtcggagggcgccgcgcgggcaggcgggcgggcgccagagggggaaagaggcgggggcggcgggtcagccgctggccgggccggccggggaatgtcgatgcctgacgcgatgccgctgcccggggtcggggaggagctgaagcaggccaaggagatcgaggacgccgagaagtactccttcatggccaccgtcaccaaggcgcccaagaaggtgcgggggctctgggtggcggcgggggctcgggctccggcctcgcggaagggacgcgagcaagcccgggctctggctagtttgggacttctgggggtgactggggacggcggaggtgatgtagggggtggcggctgtgcggccccaggcctctcccgggctgaaaggccgcctctgacctcgctttcctttgtccctcggcccaagtcctccgggatcgttttgaaacccgacagggccaggccttaaatttgcgactgacttttcctggatgaagggcctcgaagacgagagtgggagggggtgaaccaactcagctgacccttgtgaccagtccgggggcatggggtgtacagaaaatctcccttcaggtgagtgggtaaatctggcagaacttccatcaaatctttgggagcagtggccgctttatccaacaactgcgtgatagctgggaggcaagagaaaagaatgcgtgaagctagctctgatatacaggtgaaagcgatgagggtaacatgaaactgaaaatctatgattttcactttctacagcattccaattacttcgaaatatgtaagaaattgacatttggaggttggtgacagcagacactgtcatggatacaggtggatcctagagtcatgtgaatagatcacttaggcatccctggagaaaggagcttgggtgggttggagtagtgggtggtaagggaagattgctcactcttgactgtacttttgaggcagaacaagtttgatctattgtgctgtaggttgactcaaaggacacccttcgaattctctcataaatggcaacctttggagattttagtctgactagctctccgagtggtggaattgggatccttattgctttctcatcatttactgccaaccacatcttgattttccatacacctggcacccagttagcagtagaccagagaacctttacaaagaggtgaccttcctgaagccagtgagaacccagataaatgtctcccttctttataaagacagagtcttacaaagctgtctctgcctgcatccagtgtttaatgggatgcagggctgaacaaagcaagggctgcaggaatagttaagtccttgaggcttcaactagttaagctgtcttaagtgggagagatggctcttttttttttttttaagtgaattaacctgccactccagaaatcaaatgcaagatcaaaaaagacgagtcgccattgtgtgctttcgctgttttctcacaaaattaagaatttaattcctttaaaagattgtggaagattccttgactctgaggcatctgattaactttagtgctgagagttcagttgactgctttgttgggacaatgaccctttgcaatctgcactattctttggagaaacagtcacagtccttataagcagaatgattgagggtggga

SEQ ID NO: 55424 - DNA, 1021 bp, Homo sapiens
tgaggatgttcttgatgccagaggatataggttacttcagggtgaccttgatggtcctcagttagatcagatcccagtgtcactttctggtcagcttttattcattttgtttgctttgtttgagacagagtcagcttttattcattttgtttgctttgtttgagatagagtggatgtccatcaattaaaagcataaatatctagattcttcagctataatcatgacttactcagttttgtatgccaaggtctatcacactgctatgaacaaaataggacttgttggtttgattgaagatttgagatgtctgggtgtcgagaagtcaactaaagggatatgaccttgagcaaattaattagcttttgtacctgcatctcctcatctgccaaataagtgcctattttttttggaacaggtggagataggggcatgttggggagttaagatagcagtgtaattttttaaaagtctattcgtatatttatattctttcttcaatgggcatttgaagtggcttataacacagaacatatatgtgatataaaaggaagtaaaaactatagaaagaatgaaaaaaatattgttaacctcgagggctaagatagttgatgaggttgatcacatgcaacttgaaacttttagcagccagaggatgaaaagaatcatagttacagtctccttagcaggcatgggaaataatacatgtcaattcctcaaggggacgacttttcctgacacagagttctaaaataatttttcacgggaatgtcttaatagctgtagtgtaattcacattgtaaggcttgttcacgactgtcactggtgatttcagatggtatggctaggaaaatttgaggtaagaaaaggaatccttgagttttaagagttaagtgtaccacaactgaagaagatccttgtttaatgttggcagttatcggtcaaaccaagtaagtaatctagttccccataaccactggttatttatccctcttttgctgctactttgtgtaacaggagtgg

SEQ ID NO: 55425 - DNA, 1021 bp, Homo sapiens
ttacaagtccacaaactgctaagagatttaagtttccagcctgcagtttgtccttatggcttggaacaaagctgaggttgttggcattgtcagctccctctttgggatgctcctcagcttcccaaaagactcattataagtgccttgagagttcagctcaggaacttaacacacattcgaaccggcatttcggccactttgggggaatttttggtattatctcaactctactgctcttcatatgaaatgcagatgcccctgaagctccagagctgattccgtaggagtgtttgaaatagtagctcacatagtagattatcaaaactaaacaaaataatttgcttctgtatgtctctcaaaaataggttggatttcaatgtagtacttctcaaactattatattttaaggactgacctgatatttgaattttactcatcatttgacttttctagatggaatatgttgagggcaaagaccgtatctcacacatatttatatagtacctggcacataatactgtcaataaatgcttattgaataaaataatgtgagataatcattccttggagaaagtaagttggacttatgtggtggctttgactcactttccctttcagttggctggggtgatttttctaacttagagccctctcacataggtataaggaagtaccaagaactgcaggtgagaaattgatgagaatttccaacttaatagatccctttataaagccagaaataggaggtcagggagaagacatctgaatatatgcctccagcttcttagcccagtggcagtgggcatagggatatccttagacaataatggggaaggtaacttgaatttctcaccattgaaacaacttttaaacccttagcattagggagactctgtccaaagttgaaactggtatcctggtttatacatgctcttgatttaaagaacagggaggctttcacatagggtatttgaggtttggggattagcgatgagttgaatagtttgattttggaaagtac

SEQ ID NO: 55426 - DNA, 1941 bp, Homo sapiens
cccaagtagctgggattacaggcatgtgccaccacacctggctaaattttttttggtgttttttttgtttttgtttttgtttttagtagagatgggatttcatcatgttggttagggtggtctcgaactcctgacctcaggtgatccacccgccatggcctcccaaagtgttgggattacaggcatgagccactgcacccggcaaattttgctattttggaagttgaaataggtgcttcctagagatagcagatgtatccagttgctttggtaactaattcagtttcttatgggtggccaggtggtatcccacttattattcaatacttgagggttcagtgcccagcttctgagcaccagctttcttagcaagcaagacatgaagattcccagtgttcatttatgagaagtagcccagctggcttgtcatgctggactagatgaattgtgaatgttaattatattgataatacagtggccttggtaacagacttgtagctgctgtagaatctgtttacttcaggtttgtaacagaaaagagaccaagctggttgggaacatggtgttctcagtgtaataagatgtattgtaagtccaaggaaaatgcatcttggtggggctgaccttattgcaccccttccccaagatttcccggagagaaacattattctggggatagtttctgttcttgtttgccaatcaataatgaattgaggttggcaaaggctgggtttttagtggaagtggggtaaagcatgtttacaaatcataaagtttagaaggagaacacctgtgttaagcaccttatttctctacctagtttataattaggaggggatggttgatgagattagtttcggcccttgcattcaggaggtggagcccctcctatttggggagcagggggttcataattctgtacattcttttcttactccgcagcgaggggattagctgagcactgggcatgtctggaatgagagcactttgccaatttttactgaatttggaccaaactaataaaaatacaatctcggtcttcctcagacagtctctttgtcatgttctcctaacccctaggatccatctgatggattgtctgttcctaacagatggagttggcattaaaggtagattctctacttcctttgccttattgttttatttctgaacaaggcatatctaatgcatttgttccctgtattggaagttgctttatcaagagcctagtaaactcagtgtacttgtgtttccttttcagatcctgcttagattatttcttagatcagcacttctcattctgtggaaggagaagaaggtatcagtcacatagagggttttttcgcaataactcattacctggctctaaactagagctgtgtaatcagaatgggggaggagctgagagtaagagaacagatggagaatgggttggcattttgaaacagcttcaccagataaacttgaaatctcccagatttagaaccattcttttagattatctagcaagactggccaacattgttcggaaatctaacattgagatggtaatggcccaggcacggtggctcacgcctgtaatcccaacactttgggaggccaaggcaggcagatcacctcaggtcaggagttcgagaccagcctggccaacatctctactaaaaatacaaaaattagccgggtgtggtagcaggtgcctgtagtcccagctacacagaaggctgaggcaggaaaatcgcttgaacccatggggcggagcaggttgcagtgagccgagatggcatgactacactccagcctgggcaacagagcaagactatgtctcaaaaaagaaaaaaagatggtaatgcagctaccaactctcctggatgattttgatcacgaggagaaatcttggtcctccctcatgtgaaaggtcctgaaaatagtctaccgttgctc

SEQ ID NO: 55427 - DNA, 1070 bp, Homo sapiens
gagagtacaggtgtttattatactatgcttttgaatttttttatgtgctgaaaatgattataataaagttggaaaagtaaagtacaacaatggtgctagcgagtggggatggagggtagggggtgggagaggagactttaatgttgtcactaaagtagtgggtatgttccaggaaccaggatttcttcagtcacctgtactgatttttttttttaaacctagaattgatgataaatcaatatcgggagaaacagagatgactggcatgtgtttatataatattggtggtgggactgagaaaagaagtatggacaggtcaggcaactaggtaggtagtagatagctaaataggcattgaaacagtctgggtgtgtgttacattctgttgcaaattgtggtgttcaaaagattgggaagcccttttctgtcctacttactgccttttttctaacttcttatgtttacttctagttggcagttgcaggcctcgattactcattgactggagcactttaggagataatagtgaagtgaagtcagtgaagtgtttagtcttacaggaagagaggggagtagctcacaagggtcaaactactctttggcagagtttttcaagctgtgtgttccttaccttttaagtgactcagcagtttggggcctggtattgcctcacctcttctcgccgcgagcattgacagaagatctagttgagtcctactttgaaaggagtattgcttctgactgtggaattggattctagctgtgtgtgtgttatatcctgttactgttgagacacagaggcgggagtcggcgggggaagatatgtgctgagattagtcagcctgccctccctctcccccaagaaactcaggccccatctggggagagtgagaacttaagaaacttgagacagggaaggagagccgggagcagccaaaacctgctaagtctcagaagactggtttctgcacaagggaatggaagaagtgactggaggtggctgtggattcaactctggcctgagattgattcccttgagataagttgttttctggtgggtgtgtctggga

SEQ ID NO: 55428 - DNA, 1036 bp, Homo sapiens
tcttaatgatttgttttcctagtaattgttgtttatctttgaatctagttcttgacacttaggaagaaacctttttgaggaaattaaaagctgttagattggtatttgaaataacgaatttgacaagatgtctaagttaaacctaagttaaacaatatccagataaggctgtgaagactataatatctggcatgttcctcatggagcagtgaaattccatgccaaagccacttacattactatactgtgggtcaaaacatgtctacagattttaagggaccgtgtttccttgcatagaactttcctggagtagcactggatacttagttggtgcctagcaaatgtgatgactaaagaatataatgcatcacagatattatcctgatcaccatttcttggctaaaatgttgtagtggaattctggtggctgttaattctttctcattcaggagatagcaggcaaaattgggtgggccctgggaaggagtgtagctgggctatttaacatctgagaatataggatgtgtgtttatgaaagtaaactcagcttctaatggtaaaaaaaaaaaaaatcaattaggatcaactaaaggaatagcatacaatttttcttctcttgaggtatgtaacttttttggattgtctctgatccccttctcttggtaaggtctgcacaattctttcagctcactttgtcagcagacttcccactaggtagtgcatataccccaaattattcgtttggtagagcttttctttaccattctcagtatcacatggaagaaagtcaaccattgtacctgctaagctatttgaagaggtgctttaaatagcatgttaaactggcctgatatttaattgggtttttaagacacagcaagtagacttctgtatttgggtgtgctatttgaagaatgggtcaatctgaccttctagcctttcataaatatgctcttagtgtaagaatggaacactggtatgcttgttcagttgtgggtaaggctgtttatggggtggtgagttactcaagcataac

SEQ ID NO: 55429 - DNA, 2069 bp, Homo sapiens
agagcatgtattagaaaattagcatggaaaagaatatagaatcttggcagatgaatacaggagaaaacattagggacatctaatggggcatccaatacaaccttgtcattgtttaactgaagactcattgttaaaagattaagaggttacagattgctattaatgtcagcagagatatttgtaccaaaagccattcattgtcctttgccagaataccttttgcattgtattatcaacattaaggattaacataaatgaaaagctgttatatatgatcctggagtgacagataaaaagtggtgtgtgacaagcaggctaactgtagccaagaaagaagaaaaattaattgtgaaaaattgagttatgagaggaagaacgataaaacgactgaagaaggcttttaaaaagtcttcaaagatcttgacggccatgttacagaaatgtattagagccttttaaaaagcttagtgatatggttaaaatgtcatagtggggaagataatctttagtagtatttgtgttagctggacaggaggaggacctgtacatagaagtcagtcagtgagagagtccaggtatactagcagaaaccgtgatgaggaaagtactcaattcagagaggaaagaagtgatttgagaggtaaggaatgattgttgtatatcctcttgcatatctgtcagataagtggtatttttagcttttatgtgaaaccactttttaaagttgatcattttgacagactttcccagggctatcagtagaaccagagctgtttgccttttgtgccatttctttctttctctattccttgagcacaacttagtgtaaaatcccttgtaagactatcttatcacttttgtctatatccatggttctcaaagtgtgatcctctgactagcagcatcagcaacacctggtaacttgttggaactactaatgcttaggtgccactccatacctgccagatgggaaactggccacagggtctagcaatatatgttttaacaaaccttccatgtgatcctgatagatgcttgaatttgagaaccagtgatctatagaaatagcattccttatctgccctaaattattcttctgtttttgccaggtctggttccaatccagatgggaccaagtacctctattatctgggattactatagctgcaggtttataatcagtggtcccttgtcataggcactaatagcacagtattgttagggtgggtgaaagagctgcaacatggaagtacccacaacagtttcattcataccacctattagaacctagaggagcagaactgagagcgttgtaaaaggtagctccaattaagggtgttcccttaacttaaatgaaagtcccttggggactgcactctgtagagttggggaccactgaggtttttctatccttgtttttttctttcctggctctagctgcatcctacacagatagctctgatgatgaggtttctccccgagagaagcagcaaaccaactccaagggcagcagcaatttctgtgtgaagaacatcaagcaggcagaatttggacgccgggagattgagattgcagagcaaggtaaagaaagggagtgggttaggggaccagaaacaaccctcttgttggccatcagaatccacaaacaacttaagacttgaaagctgacttgaaagtgtactgggaagaaagacagtattatggactttcggataaacacttctctctctatggaacttaagtcttgggattttgttctctcttccttctgttctcagcatgtggtgattacacacagagtagtttctgttttcctccttgccccaccccaccactgtattcaaagatctacatggcagaattgacaagtcctagatcactacgtggtagttggttatatgggatcttactatagctgccaatggcagagacccagattgcccagaagcagctgatgaggaagggttttaaggtaaggatgtggtgacctagagtcttgtttggtcctgagcaccctctgctggagcagagtaaaagtgactgacagttaaatcttggtttctctaccc

SEQ ID NO: 55430 - DNA, 1524 bp, Homo sapiens
ttatgttgtgccagctaacttggtttttgtttgtttttgtgacctcttctctctttaggctgtatcagctctccaaagctgggaagctctgtgttccggccatgaacgtcaatgattctgttaccaaacagaagtttgataacttgtactgctgccgagaatccattttggatgggtaggttgaatgtatatatattcaaacttctaggggctctggtcttcctttggctttaaaagtttattagagggaccatttcatactgagctcaaccagcttccaattgatattctcatgggcattggcccacacttttaactttgtgaagagggactgagtttgagctattaacgtttgagttgagcccttgtctgtttccacagcctgaagaggaccacagatgtgatgtttggtgggaaacaagtggtggtgtgtggctatggtgaggtaaatagctgggtctcagtgtctctttctttttgtgtacttattagaaatattgggtaaaggaggcttgtgctgtcaatctagagtcactgatacaaggtttaaatttttttagataatgtatctcaaacaatagcaaaagccttttattcagatttatgaatagaaacatacaaaatgaattgagttttcagattttaccattttgccttgtggaatagatactagtatcatcttccccaattataacaataacctttaatgagacttaattcaagtgaatatatagcattttagccccacaagtgacttgcagtagaattaagggtggaatctgaaatggcatatagttgaatatctccaaactggaataggtcacatattttgttgtcttcagcaatgacccaaagaagttcctgagctacgagggtatccttgagtagattcttctcaagtaagagaataggaaattagaggttgcttagagtaagttgcttttgcttagtcttgtttccctgatgaaaactgctatgcaaagccccagtccttcctatgacatgtctgctaaattacctctctaactgaggttcacaacgtaatctgggtctgtttctgttctgcttgggattggagcgtctgtgcagctgctcaccagatgacaggctatttcatgaaggttaattcctgtctcacaaataacctacctaccctaaatatccatgacttaatgaacctaacgacttgacctttcttttgttctgcaggtaggcaagggctgctgtgctgctctcaaagctcttggagcaattgtctacattaccgaaatcgaccccatctgtgctctgcaggcctggtaagaacagagtgataatactattagattcactctaggtgctttatgttattgagagttcataattgagtatattaatcatttttgcagaaatcacctaggggaagagaaggctaggactgctctgttcttctcactctaaccctagggctctctgagagcctcttggcatttttccttcctagagggagtcttggggactctgaagaggccagtgtatatagtt

SEQ ID NO: 55431 - DNA, 1255 bp, Homo sapiens
tcttgtctcatttcatgaccatcttccctcccactgccttcttgctttactcatagtgttcctttcttttcttccagcatggatgggttcagggtggtaaagctaaatgaagtcatccggcaagtcgatgtcgtaataacttgcacaggtaaataacttgcatagagaagtgtttattcagaggctaaatcttgaaagtagtctgagtgactttcatacaaaggaggtgagacctctgttcagtataaaggtctcagaactagaataagctatcagaaccttaacatgttttccagagtaaaaaacttttttccctggtgactttttatactgcttgatctgaagaccagatagcctaaggagcggttatgcatgtcttctctcagaatgtctacatgttctttaatgccagcaagcctctggtctcctatgttctacctgaaagccagccagtacctttgttgcccggcatctctttccttaaccacccatcttttcttttaggaaataagaatgtagtgacacgggagcacttggatcgcatgaaaaacagttgtatcgtatgcaatatgggccactccaacacagaaatcgatgtggtaaggcttctctcatttgttgctaggcatttctctactacctttcattaataaccatagtcaactgtgctttcttcctttcagaccagcctccgcactccggagctgacgtgggagcgagtacgttctcaggtggaccatgtcatctggccagatggcaaacgagttgtcctcctggcagaggtacacacagagaaggaccctggcagagcagcacaagcagagtagttagatctatgaggggggaggggagggaaacaaatattaggcctatgtttccctgaattttatctttggagagagagatatttcacaaattggtccccaaaataaaaccactttaaaaaaatctactttttactaagtaacactatttcctaaccacagctgattctttaacctttcagactcagatggatttgcagaaaataggaaaaagcctagagtcctgatctggaactgtaattcttcctcttccaactgagtctagaggggtgtaaagtcctctcccgctttggcttgacttgtatgccattggaatctgagacagagctcatcccagggctctctcttacctttccagggtcgtctactcaatttgagctgctccacagttcccacctttgttctgtccatcacagccacaacacaggtat

SEQ ID NO: 55432 - DNA, 1937 bp, Homo sapiens
ttagaaattcatgatcctaagatccatggatcttatcctaaatgagtgttattgacacagggtctttctagcttactggtgtccactttgattgctaatttgactataatctagttaaggaggttgctgcaggaaggtaggagtagcatgtgacatgtgggccactgcagggaagccccctgctttgccagagaaggatagagaggtaaaagcccactcccttttgttaccctggtaagtggcttttctgaacgcactgtacatgtgctgagagaagcatcctgcccagaaaggcagctttgaggttttttttttaattaagcaaatatttcaagttgtggattctttcagagttattccatcccttgtctgctttcttaaaaaagcttcaaatgaaaatgggaagttataacttgagagacattttgaaaaggagtctgctctcctgccactttgctcttcctagatgaatacgttgccagcttgcatctgccatcatttgatgcccaccttacagagctgacagatgaccaagcaaaatatctgggactcaacaaaaatgggccattcaaacctaattattacaggtaacctggggagaagcaagtgaaaagctctttttcccagtattaaaccaagcaggctagcctgcttctgacataaagatcaaatgttgtacctgattttgaagaatacaagaaatctgttccaggccaggcacggtggctcacgcctgtaatcccagcactttgagaggcctaggcggatggatcacttgaggtcaggagttcaagaccagcctggccaacatggcgaaaccctatctcttagccgggtgtggtggcgggcacctgtcatcccagttactcaggtggctgaggcacgagaatcacttgaacctgggaggcggaggttgcagtgagctgggatcatgccactgcactccagcctgggtgatggagtgagactctgtcttaaaaacaaacaaacaaacaaaaaaactgttccagttaacaaggtagatagagaaattgtgggagatatcagggagttagggtttttttgaaattttggagcctgggcctcaccctaagagattctgatatatttggtctgcgatgggaccaaatttacaaaacattattttgtaaaacctccccagattattgtaatgtttagtcagggttgaaaaaacactgactcattcctgggaacaggcggtaacaccagaaatggcattgtcagagaccctgtggaagaataagggagactggtgccctggggaatgactgcagggatcccacccaggctggggaggggccctggagaaggtgctctgtttccgattgttttttggaattctcatatggaagacataagtgttaaccaatcactctctctctttacagatactaatggaccatactaccaaggaccagtccacctgaaccacacactctaaagaaatattttttaagataacttttattttcttcttactcctttcctcttgatttttttcctataatttcattcttgttttttcatctcattatccaagttctgcagaccacacaggaacttgcttcatggctctttagatgaaatagaagttcagggttcctcactctagtcactaaagaaggattttactctcccagcccagaaaggtgattctttctttaccatttctggggactttagtcttaattaggtaccttattaacaggaaatgctaaggtaccttctctgtggaacaatctgcaatgtctaaatcgccttaaaagagcccatttcttagctgctgaaatcagtgctctttcacttcttcagagaagcagggatggtacctacccggcaggtaggttagatgtgggtggtgcatgttaatttcccttagaagttccaagccctgtttcctgcgtaaaggtggtatg

SEQ ID NO: 55433 - DNA, 1098 bp, Homo sapiens
agtatagcccttcctccactcccaccagacttgctcatttttcgagtttttaactagactacactctattgagtttaattttgtcctctaggatttatttctgttgtccaaaaaaaaaaaaaaagaaaagaaaaattaaggagaatttttggtgttaatgctgaggaattgcttgagtggttagttgttaccaatttctcttttgaacctttggagctaaggatgctgagtctagagaaatgctagtctcaagccctgttaagtccctctgtttctagcccgtagttcatagcatcagtgaactggagccacaacagcaaattctatcagctgtgtaccatacagcttgtgctgaaggcgaatttcttgagccattactcagtataaagcactgagttctatctttaggatttatctttaagagcaaatttctggtcagctgtgcttctgcaacctaaaatatttaaagggaggtaggtgtgggcaggaggaggaatgataaattgggccagggcaagaaaaatctagcttcatataatttgtctgggactatacaccctatataatgttagttttacagaagtaatatgacttttgattgctacataccacaaagagtttatgaactgagatcataaagggcaactgatgtgtgaagaaagtagtcagtacatcctggctcatgctctgaaagaatatccagagaggctctctcaaagatcagggagatgtattcccatgccatgcaccctgcttcccagcatttctgcatggtcaagtgagctttatgctcatgagctttaagtatataattatccaggattttaaatcctcaacttgttctagcttgtgatccctcaaagttgggtcatacgttagtgctagatactagaaattttcacttttccactgatcagagagacagacattaaaaacaaaaatagaagaaaggaaagctttcaccctgcagcttcttagcagggaacaattgtcttgccaaaacttttttcccttttctctcccattttcttttacccaatcccttcttactccttgccagtgtgaccatgctttcttctctgtagatgttaacagtta

SEQ ID NO: 55434 - DNA, 1101 bp, Homo sapiens
cctccaggctccccgctgtacaacaatgagccatttgccatcatgctgtttgggatggtgaccaaattttgcagtggtcacgcccctcactttcccatgaagaaagttctcttgctgctctggaagacagtattggtgagcacctccttggaggaggagaacggtgctatgggatgggcagtagggagactgttccttgaatatccttttgaatattgaattatgtgactgtaaaactgctttggtaaaaaaaattatttaaaaagctgctaaaaggagatgacaaaagaagggccactattgtcccattgcagccaacgaggacataggccttgagtcagagtaggctgttggctctctgaccccggaagctgttttctgtcatagaacagctctcccccagacaagttgcctctcagcaagcagctctggacctggagtttgtaaagggatttgaggcaaagttacagctgatgtaattggggccctggttggatatcacttaaaggggcaagagtgagccctgagccagcctccattttcttcagggtatggtgtcagcccgactctgtgtctaggtagggagggactgggtgccagagtgggccgtccagcacactgggcttggagcgttgttagcagccaggccatgccaggaggccttcccaggaggagtgacatggggaggcggtggaggtgagttgggcctctgctacactggggctcatccttcctttcagaatgggtcaactctggagccagggctcagtaagtataggatttcttaaaagtcattgacacattttatcttggccacacattctgttcttcataaagccttgctaaggctagagaggaaagctgaattgctcagaaacagtaaaactaagcagtctaaagctggatgttgctggcgtttctgcttcttgggagatgtttagatgaagctttttttcttcttctaaagttgagcaaccaacagtatttctaatttgactttgaaagacttgcatgtacaacttgtgaaacatgagtctcaccaacttttctaggaacttgcagggttaggctctttgcttctttttaaattgaagagtatgt

SEQ ID NO: 55435 - DNA, 1053 bp, Homo sapiens
tctttcatgtgagagtccagattgagatcatgttctactttgagaaggacctggaccttgacctgatcttctgcctgcctgggccaccagccctgagcccagctcctgggtggctgtggccccggagtatggcagtgatggccggctgagggaggaggcaggggttggctaacaccagagggaggatcacagaacactaggccatcatgtgatggtccttggaaaaaaggttctagagtcaaatactgtatatttgattcatggatttctcttataaggaggaattcctcttacaaagatgtacaatgagaagtcctgaattaagaaaccaatgtaactcagtgcttcctaaatttatcttactccaaaaccctttttttccatgacatgaaacttgccaatatcctggtattccacagaacacatttggagaactcaggttaatatggcagcagaagcttaggggagatcttggaaaggagaagaagttcatttttggaggaaaggcagagaaacagactgagaatgtatttgagggcatcatggggaagaaataaattgtgcgaggctacattgcttgggaggtggatgggggagccctcggctgacttctgagatgtccttggggtgagtggggaggtaggagtctttgcccagggaggctccggagtccatcttttctgtgggcacctagaaatgaggtactgcgcatgctggtggcttacccaggcaattatgtttccagcaccacagtgttgcagagcatgaagctgggggtggatgtaaaccgccacaaagaggtcattgttaaggccatttctgctgtcctgctgctgctgctcaagcactttaagttgaaccatgtctaccaggtacccacagggctttccctcctgtcctgtgggctggggcctcgggcactgctgctcctccagcccacaagaacgggggccttggcctttgacccacttgaactctgcatgaatgttctaagacatggcccttcagccaaggcctttcatccctggaggaaagagggcaaggtcccaaggg

SEQ ID NO: 55436 - DNA, 1069 bp, Homo sapiens
aatcagggttctgagaatcttccttaactctgggtctgtggatgcctttggggtggggaggtccttgaatcctctgataactgtgtgtacatgtacaccggaatgtttctggaaggaatccatagctttcttcagattccaaagtgacacatagttagggtgaccaaccatcctggtttgtctggaactctactggttttagcatttaaagtcctatgtatcaggaaactcttcagtccaagggaaactgggatggtttgtcaccctgacagtaacttccaaagggttaagcagcagtgtgacctgggatgtatgcatttatttttgtcttcaacttgggctgcttgcttgtttcccttcccagatgctggtggtgttcaagtcagcccccatcttgaagcgggccctaaaggtgaaacaagccatgatgcagctctatgtgctgaagctgctcaaggtacagaccaaatacttggggcggcagtggcgaaagagcaacatgaagaccatgtctgccatctaccagaaggtgcggcatcggctgaacgacgactgggcatacggcaatggtgagactctgcactcagccagatttgggtgggagtgtgtcgggaaaagtgacatctttcactccctgcccgtggtactcaggtacttctctgccctgagcttccccccaaggaacaggaaggagcccagctcctgcttttgtagcatcaggatgggcactctaggaaggactttgagaagctacccagccttggcatctgcgatcatccccatctctccttgtacctccaagtcattccttttctagaaattgtcataagactgtgtcccctcttttcatccccattttggccacctaaactcttacagctcttgactgacttccctgcctctaatttcttcccctccatcagtgtctcagatttccctagtgatccttttttactttgatgttttttaaagatagggtctcgctctgttgcccaggctagagtgcgatcctggctcaccacaacatctgcctcctgggctcaaactatcctcctgccttagcctcctg

SEQ ID NO: 55437 - DNA, 1069 bp, Homo sapiens
acagccccactgtgtcttccgcagtctgtcctgggcttgggtgagcccagcttgacctccccttggttcccagggtcctgctccgaagcagtcatctctgcctgagatccattcttcctttacttcccccaccctcctctcttggatatggttggttttggctcatttcacaatcagcccaaggctgggaaagctggaatgggatgggaacccctccgccgtgcatctgaatttcaggggtcatgctgatgcctctcgagacatacaaatccttgctttgtcagcttgcaaaggaggagagtttaggattagggccagggccagaaagtcggtatcttggttgtgctctggggtgggggtggggtgtttctgatgttattccagcctcctgctacattatatccagaagtaattgcggaggctccttcagctgcctcagcactttgattttggacagggacaaggtaggaagagaagcttcccttaaccagaggggccatttttccttttggctttcgagggcctgtaaatatctatatataattctgtgtgtattctgtgtcatgttggggtttttaatgtgattgtgtattctgtttacattaaaaagaagcaaaaataattcccgttggcttgtctacaggaaatatggcctctacgtatctcctccaggtctagaaagtggttttttctgctagcattgctggtcaacgcttgtccttgtcaagctgcctgcctttcccatcctgggggaagaggagagagagttggcatttatccagtgtaagttaaccccacagtaatctgggattgctctagcccaactccagggcactaggttactttactgacacattgtcctgcacccctgggtttgctgtaatttcagtaggagccccaggtttctctggatcacatcactgagctggcctcagccaaaccagtgtcagtgctatggagggaggggctaggtcaaagcaagggggtctgctgctctaggtcctccctggggcaggtggttgggactgaggggaaacttcagtactcagagcctaggaagcagaccatc

SEQ ID NO: 55438 - DNA, 1086 bp, Homo sapiens
aaagtgcagagctgcgcagctcgagggggcagggaggactgccactgcccccaccccatgaacccctgccccttccacgcttagtggagaccactgtgcccactcctcttgcacccaaggaccctggcagagacacctctttcctgcctcataactggaccaaggctggaaagaaacactcacatctgggagacagtgcctgggtgggcagtgtcctgctctgggcaagttcatccttccctccccatactgatgtaaggatgctgctttggggtggagtcagaagggcctcaccccttcccctcccctcccctccccattctaatctagcaccagcattcggggaagtgtcttcatctcaggctccgttgatgaccagcagttcacatcttctgcctttggttttgcatagttgctagatctgtgcagggcacccaccttctcccggggagggcctgggtctcctctctcctctctatcccccttaaggtcagcagggctactttctaagaactggtccttgagcatagaggctggtcacactcgtgtgtgatctctaccttgcttcctttccctttgcatctgtgtgctctctgtacccggagctgtgctatataccagacagaatctctgttcttggaggacccataatgtagcgggggaagcagactggaaaacttatataatagaggagagagaggctgtaatgaagaaaatgctggctttagggccaaacattcaccctataataatgtgagcttgggagatttgtcaatgtacacataacagcataccccaaatgagatattttatttagtctaattgcctcttaacaggtttggatgcagtagatacactgaatacatagattcaaaatgtaaattttgtatccctaatatattcagtcttttcctagatattgcatgtgtcccccacccttggcacagagcaggggctaagtcaaggtttgctacattggattggattgacttacctacggtggaggtgggaaggggagatgactcacagttgtaggagacactctgagaaatgagactggtctcggccaggagggactgggagatg

SEQ ID NO: 55439 - DNA, 1045 bp, Homo sapiens
caacagcctgatccatatcaccatcatcgcttacctaccctccctgtttcttcacttgtcctaccagcagccattgatccctataaaaacagtcaggtcaggccaggtgtggtggctgacacctgtaatcccagcattttgggaggccgagggaggtaaatcacgaggtcaggagatccagaccatccttgccaacatggtgaaaccctgtctctactaaaaatacaaaaattagccgggtgtgctggcatgcgcctgtaatcccagctactcaggaggctgaggcaggagaatctcttgaacccgggaggtggaggttgcagtgagccgagattgcgccactgcactccagcctgggcgacaaagcaagactccatctcaaaaaaataaataaataaaaataaaataaaataaaaataaaaatagtcaggtcacattactcctctgcttgaaaacctccaacagcttcccattagccttgaaagaaaaccccaactcctttccatgctccttgagtcctgcctgttctggacactcactgtcttcctagcccagcacctcccactcttccattgttcagggtgctctaggcacatggccgtctgtctgttccttgtactcaccaggcatgcaggtcctgcctcaggacatttgcactttctgttccctctgctctgaatgctttcccaggacatccacatggcccactctctcactccgttgaagtctttatgtcaccttatcggagcatacgtccttacccccatctctgttgtagcatccctgctgtgctccatcccctcatactctatattgtatgtgtttatttgatatatatactatcagatatagtgtatgtttatatgtacactataaattatatatttgtctgatttctatttgtccctctgcactagaaataaatccaatggagcagggacattatttgctctgttctctgttgtactagaacagggcctagaacataatgttcagcaaatatttgttgaaagaagtaaaggaaaagaaggagggaaagagattt

SEQ ID NO: 55440 - DNA, 1136 bp, Homo sapiens
aaagagtcacattataaatacatacataaataaataaaatttccatgtgggtagagctaaaccatatgcagcgttagggaaagggggaattttctggtcaggtgaccagctcaagcagagcttggacagtgtggggcctgggtgggcaataaccaggaattccatttgactgaatagcgggttcttggatagtgatccgggctagactgaattccttctggggtagggactcatccgttctgggcaacccagaggccctgagaggccccaagtgctggctcgtcggagggtgagcataggtagaggtgggttctggacactgggaccagaaggtcctggctcagcatggggtgggggcagggccaggtcctgttcctaggggcacccatggaggggagaggaggggatgtttctctgctgggacctaggccttagtgcgggccctcaaccaggagccagggatagctcagagatgctttgtttggcagaccttctcatttcctgcctcttacccccgggactgccccactgtcttccagcactgcctgggcacaaggatcttgcttccctggaaggctcagtccctcagtccctcaccccatccccacagatcttactctgccagtgtctttggctgtgttctcaattttcccttctcctacacttcatccttaatataggtttttgggcctgagtctccttatgtttatctgtccatctgtctccctggcccttcttcctgggctctcctcccctgcccccgctgattgtatgcagttcccaatgattggtgtctgtcacctctcccctcgacccagcctgtgccagattcctggaatgctctaggctttgtgctgagttttacaagtatcatttctttgcatcctcaaaacaactgtaccaggtagatactaccctcatcccctcaaacatagcaagcagattgtagcctcaggacctttgcactactcatcccttctgcctcgaactctccggttcttcgtatgactcactccttcactcttcagggctgttcaggtgtcaccttgtcattaaggccttacctgacctctctattggaaacaactcccctatcctcccacccgttatctcctttttctctttattttttttca

SEQ ID NO: 55441 - DNA, 1393 bp, Homo sapiens
tagtggtttaaaggacgggtttataagccaatgaaagggataaggaggtgggttgctgctgtcactgagcaagaagtaccgttacagggcagactttttgtccaatcaacacctcaacactttgggtcacgtgaccgcagagtgcgaggggcggagctacagtctggcgcgaggaaccgttaagatagacaacaaatgtaaccaatgaggtactccgactagggggttgggaacccaataacagtggttgggcgggcgccttcctggagcgcggggagatgtaaagatagacaaataattttcccaatgagactgtagaagagagagcaattggccaatgaggactgcggggcgggaccctgtgccgcggcggagtccaagatggcggcgtgcggttccgctgtgtgaaacgagcgcggggcggcgggttactcagctccgcggagacgacctccgacgacccgcaacaatgaagggaaaagagcgctcgccagtgaaggccaaacgctcccgtggtggtgaggactcgacttcccgcggtgagcggagcaagaagttagggggctctggtggcagcaatgggagcagcagcggaaagaccgatagcggcggtgggtcgcggcggagtctccacctggacaagtccagcagtcgaggtggcagccgcgagtatgataccggtgggggcagctccagtagccgcttgcatagttatagctccccgagcaccaaaaattcttcgggcgggggcgaatcgcgcagcagctcccggggtggaggcggggagtcacgttcctctggggccgcctcctcagctcccggcggcggggacggcgcggaatacaagactctgaagataagcgagttggggtcccagcttagtgacgaagcggtggaggacggcctgtttcatgagttcaaacgcttcggtgatgtaagtgtgaaaatcagtcatctgtcgggttctggcagcggggatgagcgggtagcctttgtgaacttccggcggccagaggacgcgcgggcggccaagcatgccagaggccgcctggtgctctatgaccggcctctgaagatagaagctgtgtatgtgagccggcgccgcagccgctcccctttagacaaagatacttatcctccatcagccagtgtggtcggggcctctgtaggtggtcaccggcacccccctggaggtggtggaggccagagatcactttcccctggtggcgctgctttgggatacagagactaccggctgcagcagttggctcttggccgcctgccccctccacctccgccaccattgcctcgagacctggagagagaaagagactacccgttctatgagagagtgcgccctgcatacagtcttgagccaagggtgggagctgga

SEQ ID NO: 55442 - DNA, 7357 bp, Homo sapiens
cctagacatcactgtaacggagagtgatttaagaagggcgtttgatcgctttggagtcatcacagaagtagatatcaagaggccttctcgcggccagactagtacttacggctttctcaaatttgagaacttagatatgtctcaccgggccaaattagcaatgtctggcaaaattataattcggaatcctatcaaaattggttatggtaaagctacacccaccacccgcctctgggtgggaggcctgggaccttgggttcctcttgctgccctggcacgagaatttgatcgatttggcaccatacgcaccatagactaccgaaaaggtgatagttgggcatatatccagtatgaaagcctggatgcagcgcatgctgcctggacccatatgcggggcttcccacttggtggcccagatcgacgccttagagtagactttgccgacaccgaacatcgttaccagcagcagtatctgcagcctctgcccttgactcattatgagctggtgacagatgcttttggacatcgggcaccagaccctttgaggggtgctcgggataggacaccacccttactatacagagatcgtgatagggacctttatcctgactctgattgggtgccacccccacccccagtccgagaacgcagcactcggactgcagctacttctgtgcctgcttacgagccactggatagcctagatcgcaggcgggatggttggtccttggaccgggacagaggtgatcgagatctgcccagcagcagagaccagcctaggaagcgaaggctgcctgaggagagtggaggacgtcatctggataggtctcctgagagtgaccgcccacgaaaacgtcactgcgctccttctcctgaccgcagtccagaattgagcagtagccgggatcgttacaacagcgacaatgatcgatcttcccgtcttctcttggaaaggccctctccaatcagagacagacgaggtagtttggagaagagccagggtgacaagcgagaccgtaaaaactctgcatcagctgaacgagataggaagcaccggacaactgctcccactgagggaaaaagccctctgaaaaaagaagaccgctctgatgggagtgcacctagcaccagcactgcttcctccaagctgaagtccccgtcccagaaacaggatggggggacagcccctgtggcatcagcctctcccaaactctgtttggcctggcagggcatgcttctactgaagaacagcaactttccttccaacatgcatctgttgcagggtgacctccaagtggctagtagtcttcttgtggagggttcaactggaggcaaagtggcccagctcaagatcactcagcgtctccgtttggaccagcccaagttggatgaagtaactcgacgcatcaaagtagcagggcccaatggttatgccattcttttggctgtgcctggaagttctgacagccggtcctcctcttcctcagctgcatcagacactgccacttctactcagaggccacttaggaaccttgtgtcctatttaaagcaaaagcaggcagccggggtgatcagcctccctgtggggggcaacaaagacaaggaaaacaccggggtccttcatgccttcccaccttgtgagttctcccagcagttcctggattcccctgccaaggcactggccaaatctgaagaagattacctggtcatgatcattgtccgtggtgcgtcctaaagtccatgtgtaacttgtatttactactttgacatggttcctgttttgtgatgtgtaatgggatacagcatcagatgcaattttctttttagttgttagttgtagcattttcttttttatatttttataaacgtctttaaaatagaaatcaggacagtttagctatttttttgtttgtttagctattattttaagtgaaagggatgccctaaaggtagcaggcaggcagacagatttgctttaattaggagttcccacccttatgagtaattttttttctctattcagttgttttttttttaatcttgagcttaaaaaatcctcagagttacaaaaccaaaattttgaaaagtcagaatttggagaaaggagtccactgaccatataaagagagtaatagccacctaaaaatgactcgattggtgtgtaggtaaataattcttttaccagaaatgtgtgtgactgaaatttgatcagggatctcaaagatatgctggtaaattgtatagcaatgtaattattttaatcaggtatttgagtatttcttaagatacagtttattcccagagagtttgctttaacatgcattttttaaatcatttgttctagagttctgtatcccatatatgcacttttggtttgtagcagtaactgttcagtaaaaattaaggactatgttacaaaccatatatgtcttatgcttacactagtatgcaagaagtgagtaggtgcttttaaaatcagaattctttggtcagttattggtgtgtggtggtgtttttactgactttttcagagaggtgtagcaggtacagttctaatcgtgcatatttcgaaactaagtgttcttcatcaaagatgagtttttgtttttgtatcaattcaaatttctggtttcaataatagaaagaagagttgtctgcaggctcatagtcatcttttatttcagtgggcatttaaatcagccatatttggattgcagaatttcttaaaaagtcatcataaaatgcctttgacatgctcttttaaaattttgcttgtctttttattttcatatttaaacagtagtgacattacattattgaaaatgttttgaacatcttggaaattttatgttcaatattctcactgctgtccagctacggaattgaaatgtcagtgtaggaaaaccttttttaattgttttattttcccagacacccggaattaatacaggatcatttaacttagcctcacagttttttttttttcaaaggtgagatgatatcaacctctggttctcaacaaggacttttgctgcttaacagtaatggattttttttttttaatctatcccctctgtcccacccctaatttgtcaggtcattagtaagtatatttttctcccttgatttaagtgctgaagacttcagctaaggcccttgatatttaattatgattagagacttttggaccttctggatcatggtcatgtttctgttctatgaaagtgacttaacttgaagcctggcagaacccaactgttttctttctgttatcaaagctggtagttttgaaatagcaccaataataacccagggaaatgtcatgtaatttttattttccattatgacaggtgtctaatgcatgtcagcacaaaagtgtcatcactgctgtgtcatccctcttggttttcactatgcatctataattttttaagtttgcaggttttgtgggggtttttgtttgtttgtttttaaactggaaaaactagccattttgagagaaggaaggttctaggctatgagcatgaaggtccttgtgcctcttgggaaaatacctgaaatcctataatgaagacttttgatgcttcttgctttcaaaaagctgtggttggtttggagtagacacctgttcagaaactaatgcaagtgtggagtctacatacgtgggctcatagtataatttgtggccagctacatttttccagtttaaataaactcactaaccattaatttttgaatatcttttgttgagatagttggacaaatgattttgctcttttggagagtgaagtccatgacatctaattttactgtcatccaaaatgtgtgttttatttcttttcttttactttctttttttttgtttgttttttgttttttgttagtgtgacagcgtacagaagagtactgtgtttttgctccatgtttgtttgaatctttacctgacattgccgcttttgttaggtctgggcaatttgtgcttcagtgtttttgaaacaatggcttgataccatttctaaatgtatgtattataaaaaactaattatgtttagttggtcattacctacagagtgccatagtccacatgaacctcatatttgtactgcccattcttttgtgcaggttcataatatccataaagtatctagttaaaccttaagaattcaaatgaaagcaaaagtctaaaaccggttctacttctcattagccaggatttaataatcccaacgttgaatgttctttgtaacaaccaatttttttctatctttcttctttaattattttaatgtagttgatttttctggaactcagttaaaatgaatggaaagaaaacttcaggatatcatttaatgactattaagtattattggtaaaaacgtgaagataagacttttagatcacagcttcaaattttatggaaaattaagcaagcaatacctagccaatagttctgcttaactttttggttaagtattttgttgggattcctataaataatttttcacacaaagttttaaatttctggtgtactttgactctcaactgagagtggatagagtttttcttttgaggattacatcttaaaatgtccatcgcctggctggttataagcatttgtcaccttttgaaggtaaaatatactctggcccttcttgactcagttacaggtcattttaggtccagtaataagagtcaggtgtttggttattgctttcagagtcagacattgtttaggtttatttaaaaactattagcaggttttcactgacaatgcttttttaaaaataaaaaatgtaaatccacttttttaaggcagattgttcattatgcatatacagcttgaactatagtttgggtccatataggaaccaatcaccaaaaactctggtaacagaattaggaaatcctcttgagaagagggccttaatgaccttttatgtgaaaaaaattttggagagaatttctggacatttttttttctgtctctctcacagggtttggttttcagataggagttaggtatgagaacaagaagagagaaaacttggcgctgaccctgttatagtggttatagtggtgtccctaaagggaggaaatgatttcaggtaaccacagtgaaatgttaagctgaatgaagagttttatatgtatggtttaaacagagttgaaaagtgagattcctgaagtgttctttggctgtttaacaattatttgtatgagtgttttattaaaataacggctgctgtctttggtaacatagatgagggtggatttttaaatggctttgtatcgacccctttctacaataatggagtagtctatgttgctccatataaattacagaatgaaaatagatggggcaaaagtttgactaaactttacctttttatagtttcactttttaagttatatttagaatatattgatagattataaattgattgtgaaacttttttctgaattttttcaacatgttttactcagttacatgagttaaaggatattttcagtcctgttatcttcaattgcagtctttaaaaaaacccaccctattgttctacttgttatatgtctattcatacagtaaattcatttcaaggtttatgccagtgggtattattggtgctttttgaagttgaggtgaaccatccaggaaggtcttgttaatgttatgttcatctataatggcataggggaaatatatatatttttaatattgtaaacatttgtactgaataacctttttttccccccctccgcaagcaaaactggttgaacagcggatgaagatatggaattcaaagctctaatggacctttttgaagagaagttgtggcttatgtggagtttacatgggcctctgatggaagaaagctaatctgtttagtatttgtgcattttactaaaatggcagcttaaagttgtgtatctgctattgtgatgccaatgccggtgttttaagtggaaaaaaaatgacctctttgatttgtgctgtgtacacaagatttctggaaaagtaaagaaaaaccctttttatggctcacacagcttaagagtagctgtctctcaaacgtgcgctcacagttgagctgcttttgttttattctaaataaattgtttcttttgaggaaaatgtttttctgcctggaagtgaattgacggcaaacctttgacccctttgtttgcagccgagggggtgcttgctgctgctcagatcttgtatgtcttgagcaagaagcagggagaccatcaatttcattttgactatcacggtgtgtcaattctgaaggatcactagtgttactgttgaccccctttgtttgcagtgaaggggatcatttgcttctcggttctcaacgtgatgaggaaatggtgctgtttgctggcacgcaagaagccggggcaggcaccctaagcctcaccacagtgcctgagtcgggggcttttgctggtttgaagagctggagttgctgaaatttaagttttgatttattttgttcacccatcacgtttggccttagtttcatttttaatttgaagaaaagtttgaaattgctttatcttgcacttaacatttgcaccaaattgccaaaagaaggagaaatgctccgtttgctttttaaatgttaatgatgatgttaataaagcctttcctgacacatttgaggagctcctccgtctccaggggcttcttaccagagttatgcagtgatgggtttagttctgaatggatgaagagttcctgagagctagcgtttgtaattagaaccgttacttggtatctgtgccttatttgacctttggttccacatgccttggatgtgcatgcaccgtgacggtttcataggtacgaacgcacactcaggcccagtcacttcggttggtagtacagattgtgaggaaaaagatggaggcatccttaaggaggaaaaatgtttgcctttagttcctgcattatcctgtacagaggggctcctgagttttggaagcctgttcccagtacaggagaacaactcccctgtttgcagcaggagacttcagtgcacggtgacaacgctggagttcaagaggaagccagcaatgctgcaccattggcttcagacaccattgttgttgtttgccagttttaaacttaactagttgcagacgaagaccaccttgaaatgcaggcttgttgggcttgttttgaattttaacctcggatggaagagccctagtgctgtctgtctccatgcgggatgatgattgctaggcaacaggtgattatcaacaaaggatgccacggttatactctgcaaggtggtgttccagtggcaaacagctgtataaactcttgtaaacaggtaagagggttttt

SEQ ID NO: 55443 - DNA, 1099 bp, Homo sapiens
tttggcaacttatcacaagcccagcttttttagtatataatacaacttaggtttccttgctttatttcaaatgggatcaaaatttttgaatagaattgttatttttttcatctcttctggaagacatccagtatctagtaactacaatagctgatctatactagctactttttccacaagatagagctccttggattgttttgctaggcagcttatgtacccatactttgatatagtaaaagggaaaaaatgaagtacagtggaatttttcaggttctcagtgtgtcataagaatttttaaaacagctggttatgagatgatggctgccatctgaggcttttctaaatggtctctcccctgcatttctttaaacattttatacttgttggaaatgtcagttttcagtgtgttttctttttcttgctagttcacaccatgagcctgctgagtggttttttccagttagtaagcaaatattttaaatcactatggagatttagaaagattatgttacactttctacatatttctatatgtctggtatctttttaaagtttcaagcttcatctctctagtaagaacaaggaaaaaaagttgcagacagggcatttgtttatttgtgtataaaaccatgtcatacaaaatgggaaggtacacagcatgacagttttttgaaattactcatgaaatcattttatttattcccagctgcactgtgaaaaaaattaactggactgagtgttagattcagtgttctggttttataaattggaaacttctcttttgaagtatttgtgtggtttcccagtgtccttcatatgatctaaatttagggttctgtaaaggaactacttccaggaacacctccaagttgacttgggctcgatttgaaaagctttgttgttagtactaaaattgaaaatgaggattaccctgatttcagtaaaacaacccaaattttataaattgccacttccatagcttaagttgtataattgtttataagctgtttatctgaggcaatatatttagtgtttacagcttatagagcatctatttttcttctgacaatagtatatctgattatggcttctgacc

SEQ ID NO: 55444 - DNA, 1672 bp, Homo sapiens
taagttattttgatcaatctattctcttcagcaacttgtactcttaattggagaaactattaaacaggtgaatagttaatttctaatgatttttttttcctgtcacccaggctggagtgcagtggcatgattttggctcactgcaacctctgcctccggggttcaagcgattctcctgcctcagcctcctgagtagttgggattataggtgtgtgctgtcacgcctggctgattttttgtaatttagtagagacagggtttcaccacgttggccaggctggtctcgaactcctggcctgaaacaatcctcccacctcagcctcccaaagtgttgggattacaggcacgagccactgcgccctgcctctaatgaatttttatgggtgatataggtgtatgaatgagcatatgaacaagttacttgaaactgggatggtcaagaaaggctttacaaaagaatttgttagagtaggacatggaatggtggagagagattgggatggacgtgtcaggcagacaagcataagtaagaatatagcagcttatggattgatgggaaagataagatgcaaactgaagcctggaatactagtaaaatgattgggtcaacaaaaatagggaatcctgaagggtaggccagtttgaggggtggagagtggaaacagatcatttggggcacattgatagcagtcatttattgactgtctacttcaagccaaggattctgccaagtactgtacacacattgtctcatttaagtctcaccacagaccataatttgacagtttagtgatagagccacagttctaaccaggcctttgtcccagctaaggctctcttggttaccgtactcgtggaggctaggaatgagattaaagctgcaaacctgaaaaaatgggcaatggatttcaaactatagtttatgaacattggcagtacttgggaaatgtacaggcccttggtacctccctagacattctggaatttgttaggaccagcatgacttaggagtctttgttcttttacaaacccctcaggtaattctgatatattctgtggtcagtgggccatgtgttgagcaacactggcccatagagagtagagtactaaggtaaacttaggataatgtcatatttgaggcatgggaagagaagatggtgctggaaaaaagcctagataggaaaaaaagaattgtgttgtctcagaaactgagaggagcttctagaagataactttaaagctgttgcagcaggcaaggagaacaaaactgcaattgccatggaatttattacttaaaattgccacttaagtaacataacagttttctagtcatgtaattatttctccaagaaactcaatctagattactatttaattttgcctcataacagtcctgaagatgggccactgttttgtttatgaaatgctaaagggacaccagaaaagttttgtgactaactgaaggatacacagccaggaactgattgaggtatctttgagttttcagatgtctatctaaaaatactgtgactatagtcttaaaattgaaagtgatgctgggattgagtgtgtacacatgaaacttatttccattaatggaccatcacctatatctactactcctaagttatcaataggattgagacaaaggcattataggtaaagttgagtg

SEQ ID NO: 55445 - DNA, 2951 bp, Homo sapiens
ctgtcagattgtaactatgttcctgttcagagatcagcactgttcttttatttaaatacaataataaagattttatttctttttagggctcatagttgttgaccattctgaactttcaaagcagtctcccttctgaagatgcctcattttctgaatgtgctgcttcatattttctgctttcaataaactgtcatgacagtttccactgtagtcatatatatgactgatataacacactgaccatgctttctatatttcataacttgcagtttttctagtgatatttaaccagactcccttgctaaaaaatagtttagagggtctttttgtgaaatggctgttatcctatgcaaataagatacatgtgtgtatacagtttttaagtgctgaatttatctgacctttctgaggtaaccagcagattcctttttacctaggaaaaggacttaatgaaaaatttttatgcataagcctaagtcattacactagtgtctgcaatataattattacaggtaaaattattaacactttgggatgctgtattcgtatatgttttttattacacagtttaagacctattgggaaaattaatgtttcataaaattgattttcattttagcatatagaaattgactatcagaggccaggcacagtggctcacgcctgtaatcccagcactgtgggaggccaaggtggttggatcatgaggtcaggaatttgagaccagcttggccaacatagtaaaacgtgtctctactaaaaatacaaaaaattagccgggcgtggtggcgcatgcctgtaatcccagctattcgggaggctgaggcaggagaattgcttgaacccgggaggtagaggttgcagtgagccgagatcacaccattgcactccagcccgggtgacagtgcgagactccgtctcaaaaaaaaaaaaaaaattgcctatcaggctgggcgctgagtcttgcacctgtaatcccagcgctttgggaggccgaggtgggaggattgcttgagcccaggagtgcaagacgtatctcttaaaaaaaaaaaaaaaaaaaaaaattgagtatcaatagttttacctagctcccaagataagtatctttctttctttctttttttgtgatggagtcttgcactgtcgccctggctgtagtgcaatggcgtgatcttggctcactgcaacctctgcctcctgggttcaagcgattctcctgcctcagcctccggagtagctgcaattataggtgcctgccaccacacccggctaattttttgtatttttagtagtgttggggtttcactctgttcactaggctggtcttgaactcctgacctcgtgatctgcccaccttggcctcccaaagtgctgggattacaggcatgagccatcgcgcccagcctacgataagtatcttaatatatgccatttgtgtatatttatgtacagaaacacttcagtaaactagaccccttaattgtaatttttctgcattctatggcagaggtctcaactctggctgtacaatggaatcacctgaggaactttaataccaatgactggggcccactctcagagattcatataaattgatgtagattgagtgggtttctgcaaaggcccagttttgttttcattttgttttaagtgctcccaggtgattgtaacgtgcagtcagggttgacaaccactgctctagagacacattttatacctacaaacacacacaatcagccttttaaggattgcttgaaaatcaaaacacaaaactttgagaatgtaatttgggttcagtacagtatgtatattgctcggtcttctagaatctgttattgaagtgtggtcctcagaccaacagcattagtctcagccggaagcttattagaaatgcagaattgcagggccttatcccaaacccactgaatggaacaagatcgtcaggtgatttgtacatatataagtttgagaagcagtactttagatgtagatataaatgttctatgtgataaaaactgataattagaatcttcttccatgtgcataggattctcagatttgtgcattagtcagtgacatttactataaagcatttttaaaaatactttcaacaagaaaagtggaacaaagtagttcttacttagtgagcctcaggtgaccagaaaattaccagaggtctctgtcaccaaggtaggggaaagggttactattttgcctatcctagttggttggttcttgattactttgctctgcttatctcttttcttgccttcccattctatcctcgtcacctgtcttctttatgagatagaaaatgttacttttttacaagtacaggtgcagatattggagacactctgctaataggtgccgcaggatttaggaaatttggtagtggtaggtttagagctttctgtgaggggatagatatgggcaggattgaggaatggttcctaattgcctttgtttcttaagtgtagtatactaacttcataaatcaattttccttacataacaagaatcaaatacctattaaagtacacagtgacaaataatgtattaagattcatatgtattgaatggttcagtatgaatgctcagagacaaataatgtattaagattcatgtattaaagggaatggttcaatatgagtgttcagatagtactctaaattgcagtgtatcaaattaggttcaggaatgacatttttattttattttatttattttttttttttgagacagtgtctcactcttgtcatccagactggagtgcagtggtacaatctcagctcactgcaacctccacctccagggcttaagtgatcctcccgcctcaacctcccaagtagctgggactataggcatgcaccacactgggtaatttttgtattttaattagaggcagagtttcactatgtcacccaggctggtcttgaactcctggactc

SEQ ID NO: 55446 - DNA, 1322 bp, Homo sapiens
gcagacttctggcactggcacttgtcctcctgtttctatagaaactgggttggaagtcagagctgcacaaagggaaagggtaagtttcttttaattccatatttataaacccatatcttattaactgtgacatgttttcagttttcacataagaatatacatcctcgaactagaactcaaatatgtactacttattttcacttgagtggaaactgacatcaagtcactaaatataataggagggtttaaatatggatttatttttcttgtgactgacttcacatttcttgaagcagtgaattcaatgtcaattcgcactttgagctatttttaatttgggggtcagaaaattgttttttattatcttagatcttattctcttgtacttctctggtaagtgaaaattggaaggacattttgaaagtctgcatggattataaaatcttgttgtagcgaagtctgattcttctttccattataaagtactatactactgatcagtttttttagtctctctactctcttagccaagcaagatgagttcgtctgttggggcacatacatttgttttcacctgggcagacacccattatttgtagaacctaagacacctgccagttggtgagtcatcttattgctatggcttcagaggactgctgtacagctggagtatttaggcttgaaattgtttgattaggtatgataagcacattcctctgatttacaggttgccatatataggtaacttatattgaactgtgactagttttgaggtagtggaaggaaggtaatatttgctgttgctctttaaaagttgtctcacttatttccttggtcctggcgtactacccttaagggatggacttacttttttcctgctaaaagacataagattggttgacagaagtcaaagggtggaacaccttgccattacttctgctcaatttgtcacttttaaaaatagtttaaaagctggaagcttgtcaataggaaaagtaaactcatttttaaaaatttattttcacaaggcaaataatgccttaaagtggcttcttttttaaaatttaatttaattaattctattctgatgaattctcattaaaagtgttgtatgcctcctttgttggtttctgttttgctcattagtgcttgcacgaggtaaaaatagaaatgaatttgtggattttttgtttgtttgtttggaaggtggctagaaaaaactttagtctttcgttgtgtgctatcaagtattcagatgtattctccactacttaataaggagtagccaactcatcctggctttaaaactgaaagttctatgt

SEQ ID NO: 55447 - DNA, 1026 bp, Homo sapiens
ctcaaagtgctaggattgaaggtgtgagcaaccatgcccggcacaagtatattttcatgggtttagtcctcacagtatatctgtgaggtgggttggtggtattttcattttacagagcaggaaattgggtctcagataagttaattttaagtaactttcatgagggcatatggtaacaagtggcagagctgatatttattattagttaactatttttgctgtttgtatgtgtaaggggtggttttttttttcattttttttacatgtaaaatgtaaaaatattagacatccacatctaaatgtaaaaatgatatttctttttttttaagtcagaaaaccagttttcttttttcttttgctttagtcagaaagccataaaaaccatatttaaataggatcaactactgttttttaacataactgagatttgaaccgagattaatttggttccaaagcttatgctaggccttggagaatacaaagatgaatgaaaccccattcatcttgttgatcttgcagactaatggaaaggattgacatgtgagttcatgtagtactctgttaaaagttagataggattccagatgagaatgacaatgctggggaagatttttccaaaggaggtagcctttgagtgagtcagatagtgaaaagtgaaatggtgcctggtagagaaggcatacataggcagtgacagggtatggagctaaaaccagtcttctagagtttttctctgtaagttgttaatagacattttaaagcagagaggaatggaagagtggaataacgatgatggtaatagtttaagaagcattttggaccaggcatggaggctcacgcctgtaatcccaccattttgggaggccgaggcgggtggatcacttgaggtcaggagtttgagaccagtctggccaagatggtaaaaccctgtctctattaaaaataacaaaaattggctgggcatggtggccgatgccggtgatcccagctgcttgggaggctgaggcaggagaatagcttgaactc

SEQ ID NO: 55448 - DNA, 1010 bp, Homo sapiens
agacatttctcagaatgctaaagcaagaaggaaccttaaaaacttatctggccgcgcccagtggctcatgcctgtaatcccagcactttggaggacaaggcgggcggatcacgaggtcaggagatggagaccatcctggctaacatggtgaaaccccgcctctactaaaaatacaaaaaattagctgggtgtggtggcgtgtgcctgtagtcccagctacttgggaggctgaggcaggagaatcccttgaacccaggaggcggagattacagtgagccgagattgcgccactgcactccagcctgggcgaaagagcgagactccgtctcaaaaaaaaaaaaaaaaaaattgttttccttctcatgttacaaatgtagatgcgatgtgtttctttcaagcttttgtttccaatgacattagtttaggttttcttttgtttagctctcacttgattgcagtcttctttctttcaggtcagactgtttttccatctttcggccaatggtacaaaaaaaaaggaaactgaagagaggagatagcatatgccagagaagtagaaagagccattgtatgtctgggtataatcatataaccagcctggaaggaaggaatgatttctgttagggaaggaaattttgccattagtaactctcagccatgaatagctcctcaaagcaaggagcctcctgtattgtgacccatttgaacttagtgaagcttcttagctgccctatttttcactgatgaagttgaatcagctccacctgagttagggacttacaccatctccaatcttacagtggaagttggagaaaattaggaacacataccgttttattttaccatgaattttattagaaggccgctattatgaagaaaataatcataaattattgttttccagagaaaaaaagaagtgataataatcagttttcttttttttcctttactaaacaaagacttgagtacttactatattcctgttaatattgctaggtgttgaggataca

SEQ ID NO: 55449 - DNA, 1937 bp, Homo sapiens
aaataattacttatagtgttttagggagttttcagaagatatttgtgattaaataaatgattatatatgtatattagcatactgtatgcatttgtcagttgggaaagaggggaatatggagaagtggggaactgcattcagtttttattttataggcaactaatatggtcctttggttttattttaaaatgaaactgagccttgagcattttgagctttcatgtcaaatgccttgaatggaagagtaggaatttcatgtaagtagcttacatctgccctgtatgttggagaatgtgattagatatacttgcttttctgcccaaggcactatttttgtatttatattgctttttgcaggtttacttctgttaacaggggtctgtgagaaataaggcttaaaatatcaatacttctcatttttccacagccttccaaggcttccatctttgtgccagtgtgtggctctgggtgccatctaaccgcaaaagcagcagttgggtttggatgagctgtgtgacatttggcctacacgtaggtctactcaccaccctggtcagggaacctggaacaatcctaaaactcacctactctaatgcaggccatattttttaattaaaattgaaattgtcactgagtattggaataagaagggactttggggtggagtgggtgagcagggcattgtcttacagaggaggtgtggggaccggtaagttttaactttcatcctttcaatctctcagtttcagcaaagatcttataaagaattttgttgctttcttaaattcatgaaagaaatgtaagcaattgaggtgtgtaattttcttgcccgtattctctatattaaaaaaaaataagaatatggttctatgaatttcttgtgctatttttgctttccttgaattattaaaatatgttgcatagaactaatattgttttcttttttatttttatacaggaaggagagaaatattgttcatgtaatgtgttacctttttttgtctgtgtgatctacaagagcatggctgaaatgttaccatttttaactagtgttttgactgaagattattatgaaaagttttacttttgttagattcctaattaaaaatgcctatactcttttataggagtttcaacttttgcaatttggtaataacagatttaggtaagtaaaaaatgagaatctcatacagttctgaagatctaagtttggttgagaatttaatgtttcatcaccagtaaattcaattaaagacttttgattcaattaaagactcagttctgcctacacctgcaagaactgagttgatctgtacatcaacatttctgatgtttctttggtagttgctgctggagtcagaagttaggaacaaatctaatggcctttgtaatgtcctctgtcatttcacggaggaatgacttagaggaacaaagctttcctgtgatttctttcttcaacagatggctaatggcacagcattgcagttagaatcttgtttaagatactaggagcacgtcctggactaaaaatttctacataagctttagcaacaaccttatagcttcctttgacttttttgtagagcttacagaatgtatggctgcctaagtaatagtctctgaattaatgggtaaaaaatatattatgagttttttatcctcacgtatggtgctaggctatactggatttgggctaacaaaagcttgttaacttttttttgtctcattgacagaagtattttatatctcatattttacattacataggtgtgtgtgtgtgtatgaaataaaagtttgaaaataaagtgatatactcttttttaatctgctctgtggtagtctatctttttccataaaaacaatgagatcatgacccaacaaatttatttcagaactcacatatatacctgtagctttttcttttcaggtaatggtct

SEQ ID NO: 55450 - DNA, 1034 bp, Homo sapiens
aggatcgcttgagcctgggaggtggaggttgcagtgagccaagatcacaccactgcactccactctgggtgacagagtgaaaccctgtctcaaaaagaatatcactattaattcatattgtaaatatcatttcctaataagagaaaagcagcaaggtttggggaagaaaaagtacccatgaaccacctaaaaaattaaaatgaaaataaaaacttgtgttcttactaataaactgaaaacactgcctgcctagcatttactgttcgctattagtcctcagctctttcacaatattgggggcaaaaagccaaccaactcaccccagaagtcactgttcatagcttgagatgatataaatagtatttgtcccttttaggcataggtctctatagaatttcacccttaatatggctaacactgaattctaattcctacaggttgatctgtgtaggaattctacagtaaacaggtttttgggacttgccagtttctttgctgggatggctgtcctttctggaccacctatagcaggtaacaccttcaccacattctgaacaaatttcaatagcaataaaagagaaaaactgatccaggattaatggtaacatgtaatgatggtatcaggttaaaagaaacagattatttctgcttttcctatatctactcactccaccaccaatgcaggaaaatctgaaggctcagattcttgtattatcttaagatgtgccttaagcagattcttatattcttgggagttgtagggcagacactggatctatgtctacttgtctggggagacaatccagagttttttcagagcctcaaagacccatgatgctttaaaaaaaaaaaaaaaaggctgggagcaattgctcacgcctgtaattctagcactctgggaggccaaggcgggggtatcacttgagctgaggggttcaagaccagcctgggcaacagacagaccttgtctctataaaataaaaaacaaaacaaaacaaaacaaaaaaaacaatgaacgactagcatcttgtatc

SEQ ID NO: 55451 - DNA, 1038 bp, Homo sapiens
cgccttggcctcccagagtgctagaattacaggcgtgagcaattgctcccagccttttttttttttttttaaagcatcatgggtctttgaggctctgaaaaaactctggattgtctccccagacaagtagacatagatccagtgtctgccctacaactcccaagaatataagaatctgcttaaggcacatcttaagataatacaagaatctgagccttcagattttcctgcattggtggtggagtgagtagatataggaaaagcagaaataatctgtttcttttaacctgataccatcattacatgttaccattaatcctggatcagtttttctcttttattgctattgaaatttgttcagaatgtggtgaaggtgttacctgctataggtggtccagaaaggacagccatcccagcaaagaaactggcaagtcccaaaaacctgtttactgtagaattcctacacagatcaacctgtaggaattagaattcagtgttagccatattaagggtgaaattctatagagacctatgcctaaaagggacaaatactatttatatcatctcaagctatgaacagtgacttctggggtgagttggttggctttttgcccccaatattgtgaaagagctgaggactaatagcgaacagtaaatgctaggcaggcagtgttttcagtttattagtaagaacacaagtttttattttcattttaattttttaggtggttcatgggtactttttcttccccaaaccttgctgcttttctcttattaggaaatgatatttacaatatgaattaatagtgatattctttttgagacagggtttcactctgtcacccagagtggagtgcagtggtgtgatcttggctcactgcaacctccacctcccaggctcaagcgatcctcccagttacttccaagtagctgggaccacaggtgcgtgccaccacacctggctaatttttttattttttgtagagacggagtttcaccatgttgcccaggctggtctccaactcctgagctcaagcg

SEQ ID NO: 55452 - DNA, 2528 bp, Homo sapiens
ttttgatcagcaacccatccagaaataatctgactgaccgtctcaaggatacctggaacaatattgaaatctttttattttcctggtccctttgaaaaatgtgaatgcatacagcatcatttcccaagtaatatgatctcatcctgaggccaggatatgtgaggaaaaaaatgatttgatttgtgtaccagtaagctctattatatacttacctattccaaatacatttaataaaatagcaaaaaagtctccgctagagtagtgtagaagacccatgtagttagtgtttttttctgattgtgtttggaaagcttacgtcactacagtggtaatccctggttacagaggaccctgggcacagaaggccatgcagtctcttcgtctaagaggtcctgcaagtgagaaaatgaagtttctaaaagacaaatagaccttcaggtcagtgtcttggggaagtcatattgtagaagattggagtataaataagtcttctgttaaaaaaggagatgttgggactcataattgcatacgaagttttaggaagtaagtcctccaaagtttatgcttaatttgaaaatatgtaggaagtttggaaatgggagattgtattttggaccactgcacctggccaaatccctcttctagatcaagcattctgtctttaaacagttttatgagtagtcaactaaaatagttgtttttatttatttatttatttttattttattattattttttgaaacggagtcacgctccgtcacccaggctggagtgcagtggtgcattctcggctcactgcaagctccgcctcccgggttcatgccattctcctgcctcagcctcctgaatagctgctactacaggcgcccgcaaccacgcctggctaattttttgtatttttagtagagatggggtttcaccacgttagctaggatggtcttgatctcctggcctcatgatccacctgcctcggcctcccaaagtgctgggattacaggcgtgagccaccacgcccggccagttgtttttacttttaatttacattttaacttattttaaatatcagacagtccataagtgactagccttaaaagtcatatttatctgttttactatgagttcaaggggaaaattccttagctacaaataataaaacattattgaatgcttactacaggccaggcactattctaaactctacatgcattgcttttttgatcctgacaatcttatgagggtagatactattatccctatattacagatgaggaaatgaaggcaccatgaagcaaagtaacttgctgaagttcccacagttaagaaatacagagcaggaggttgagccagggaagtcttgctccagaaccaatccttgagccactgcactgtgctgtctacctggggttttctgctccttatagtggctattgccattgagcatcagctttttgaaatttccgcatttatccaataaataatgtctactgtgtcaaacactgttatatgaagatgaataagacttgatttagggtccactgtctagtaggggagcctgtgtgcagtgacagagatctcttcctgggaaatgcccaggtgctccatctagcctcaaaaattttactttctctggcccttctacaattcctcttttgtttttctttagctttttattaaaatgtaataagcttgtaaaattaagttgatctttccttttgggtaggaggctgatgtaggctttcttacctgctacagaaacaaggtaagaggcatccatgatgtcaatccccagtgttttggctctggctaccaggtgaaaggtagggatgaagtatgctaactgactgaggagaaaagaccaagtaaatatgtagaagaaaggatttctaaagagagaaatgtcaaacagttgtttgcagctccacgaaataaccttatcactttcttcatcactctttaataacagtctgttcctgttaggcccattgtagaactcttcactttgattttgtgagactgttaaatttttgctaggtagtccagccttctgcgtagtactgtccttgatggtagactcttctgtctcatggcagtgtgtttctgttgcatgtgcctctggaccatgtgcagacaaactgctgcctttatctttaataccagaattgttctcacttttgatatggatgggtcttaagagcatactagaaggcaccaaattcaatgcgatagctccaaataatataagggctcctaaatagggagagattgagcaattaaaaatagcctttcagttcacaatactgctttgtgttcataggctcagaagaggccccactggcatagcccattaattcttgaaaacattactttgtctccgatttgacttattagtcatatacactgctgtatccgtgtaataatgtagtgctttggagatagaaaaccagaaagctgcaccaatagatgggataaaaggagagatggtggttatttgtgttaaggggggtagggggggcaagtttttggaggga

SEQ ID NO: 55453 - DNA, 1817 bp, Homo sapiens
agtacagatttaggtacagaaaaaatagaataagatgaaagaaatcatttggaaacagccttagaagaggggacagctggccaggtgctatggctcatacctgtagtcctagcattttgggaggctgaggcaggcagatcacttgagcccaggagttcaggaccagcctgggcaacatggtgaaaacctgtctctacaaaaaatacaaaaaaattaattgatgtggtggtgtgcacctgtagtcccagttacttgggaggctgaggtgggaggatcgcttagcctgggaggtggaggttgcagtgagccggtatcatgccacagcactccagcctgaatgacaaagcgagagagcctgtctcaaaaaaaaaaaaaaagcagcgggagggaggaaggcatggatagcctttcatcccatgacattttttagatcttccttaaaagatgacagatgctaatcttgcctttggagctgaatagttgcttgcattcagcgtgtcctgatcaaagctatgatttgtatggtgcttctaaagatagaatgggctataggttctgctatcctatcatggatttgtcagctggtcccattcaccatgagactactgaatagttaggaaagattcaacaaaactgccatgtagatagcaataggcatatgaatacacacatatacatgtattttttccagtagtttaggattattttaatccaaatgtcttagttacaaagaaaattgtgagttgaatcattttttattcatttgtgaaaatttatagttgacattacataaactcttaaggaacatactctttttaccaaagtatttgtttcttttttatctatttcagtgagtccgatgggggaggagtttttttaaatgcagatttttgtcttaaagggaaaatgggaaaagtgagggtttttgatggggcgggggcggggggggaagggggaagccttatttccccagaagtatcgcttttactgcaagctgtttccagctgcacggaatgccctccatctcctcagacattgagccctatggtgaattctgagttgcttgtgtgagctggcaaagcctgcaagtatttcaagatctcttttgcgtatgtattctccagggaagagaagcatgtttactttagaaattatgctcatttcctctcttgcaataccttgtgaaatcgattgctctgaaagtcttaacttccatttctcaaagggagaaagctgaacgctaaatcttgcacagttgatagtaaataaacttagaatgacgtacctgtccagtcatacagatctatcaggaattttgtaaagggtgccaaaagaaaagtcagtcccatcccagaacgggcaatagctgtagaaagagccaatcgttttttgaagtatttggtagttaccacagcagccacttggtataagaaagcagaacccaaacctaaaagaaaaacgtaatagtttagaatcactcttacattaagtggcttggtaacagaaaagataatctcctggatccgagataatacagctaggccttttggacccaggaacagtagaagggaagagtcctgttccatcttctatcttctatggatggatgcatatatacatacacacacacacacacatattttgagacagggtctcactttgtcacccagactggagtgcagtggcacaatctcggctcacaacagcctcagcttcctgggctcaagcaatcctcccacctcagcttcccaaatagctgggactacaggcatgtgccaccactggcctggctaatttttgtatttttagtagagaca

SEQ ID NO: 55454 - DNA, 1332 bp, Homo sapiens
ttcccgtcccttaacttgaagtcttccaactttgtttcagttttgactcaaagatattaaaaatctctcccaaggtctaggtttttccttagttaatttagcagactacataaatctgcattattctacataatcccatgtcttagaccaagcttggtgggttttagttctgttaccagagtccacgtcatacattgtaaatggctcactccaaaataaagcaaaaaccctagaacttctccagtcccctcattttctttttgtttttaagagcagttaattgggttgaacctggcaggaacaccttaagcaggacttcccccacaccccacctccaataagagcttcctcactagatcattttaattattgtctgggaaaggagttggatcagcctcagtgacttattttcaatacaggcaccaggctttgtcagagttagttttatctaataacaacttcttatcctgcgtccttttctagtatcaccctagctcctcctgaccttcacaggcaaacttctgtaaaaaatggtctattaggtatctccactttctgtcattctgctactccactgaaaactaaagttcactaactttggcccccactgctccactgtactagctcttatcaaggttattagatttctttgttgctaaaccaatagagtcttgttatttctctcctatttgacctctcagtagcatctgctcgtcacatttctctgaaatgcaaatctatcacatccctgcttaatttttctcattagcttctcatagcctcaagagccattctcatctcttcagtttcatcaactatccccttcatccttatttgtttattcataaatgtgtgcagctatcaattcatccatccatctatccatccaccaacagtattttactgagtgcctactatgttccaggctgtatactggcactgggcttacggtaatgagcatatactcatgagcaatgcagacatagaccctgcccccatggaacattcagtctagtaagacagactgaatacagaaaacagtcatacaaatatataaagtgtggtaagttggttagaatgaatctctctctctttttttaagtaggaagctcccaaagaacattgttatttttcacttactaggagctcatctgttatagaaaagaacagttgtaagtcatacagaaacaaaagcacagtcattcaagtatccacattacaactgtgggggattagcccctgaatttattgttaacattttgaggatccagtgcattttttgtgcttagtaagcagtatcacaccctaaaagtgggacagtgtttattaatc

SEQ ID NO: 55455 - DNA, 1061 bp, Homo sapiens
tcctgggccacaaacagaaatcttcagtaagctcaacccattcgtgtggccttttgtatattgactaaagattctggttactaatttggggtttcagaccccattttaattgcatttttgagatctgattacctcaaccacctcctgcaaaagacgtatgctcgtagtaattttaatgagattttttttattatattttggaaatggttaaggctgagacccctagaaaattactgggataattcaactttctcttcccatttcctccctctaccctccacataaaacaaaacaaaacaaacaagtcaaatgggaaattgtctttcgtctcccacaccaatattccagattttaaaccagagtatattttagacgaaaggatgtgtttttagttttatctggaaaatctgcacatatttatgcatgttcctttttaagaagcaagaggcttctcagattcttaaaatcaaactctataatactttttgattaaagtgcttgcagaaggacagcttagtggtttgggagggtgccctgtaagtgtaagcatggaaggattatgcagttacatgatgctggtggcaaggatcaaataaacattcaacagaaggagaaaacccaaagagagaaggcaaataaatgcttttcagagagctgtttgtaattatgaatacactctagacaacttttttttttttgagacagagtctcactctgtcgcccaggctggagtgcagtggtgcaatttcggttcactgcaacctctgcctcccgtgttcaagtgattctcctgcctcagtctcccaagtacctggtactacaggcgcataccaccacgcccagctaattttttgtattttagtagaaacggggtttcaccgtgttgcccgggctggtctcaaactcctgagctcaggcaatccgcctgccttagcctgccaaagtgctgggattacagacgtaagccaccgtggccagcctgaaaacattttttagtaaacaagactgatttatttatttttttggtggcacgcttgttgctcttttaaagcagggctatc

SEQ ID NO: 55456 - DNA, 1097 bp, Homo sapiens
gcctaatagcaagaagaaagaattcttaagccacctttgggatattagttaacattttggcatctgtacccaattgtcttaataaagcttgtagggtctttaacgaaacataaacaattccctcaacttctaaccttttaactcttggccctaaagctattcagcaagaatgcagcatgatttggcaatcaccactattacccccatcccagtgtcaaacatagccagcccaggaataatttttaacacttatggatttagactttaataagctttaccaactagaattaagatactttatttttagttgactctctccttgccctcattcaatccttgttcagaaaagagttaacatcgctggcctgagattcctattctttgaaaggcctgtttacatggttggcctctggctggcaactgggaacttagatttcaggagggttcctaccattccttaaatgataatagtgaatcattgtgcttaaactatgtaaacaatacaatttttatgctgaacatttgcttttttcgggagcttggaattttgatatgtgctaggcagagagggtactttggtgaccagcccccttgggcactgagtctctactaagctttctggattggcaacatttcacacatgttgttacaactcattgctggaggaattaactgcatcctgtgtatcttcactgatagaagaattcttgcaagcttctgcctggtttcttctggactttgccccatcctccttttgcctttgttgagtcagctttgtatcctttcactttaataaaccatgtaagtacaacaactaaatgctcagtcctgtgagtcatcctagtgaattatcaaacctgaggggttgaatgagtctgggttctcgagaaagaatagaatattctccagagcaagaaccagtgatgggggaggagatattaaggttgatttactatgagaattgactcacatgattatggagactgaaaagcctgcactctggtcagcaagcgggacactcaagagagttgatggtgtagttccagtctgagtccagaagcctgaaaaccagaagtgctgatggtgtaagttttagt

SEQ ID NO: 55457 - DNA, 1035 bp, Homo sapiens
gagcttcaaaattgtacaccacccaccttgccgggttgttgtgaaaattaaagataatgtatttagagcctagcagtctcagcatatggcatacattcaataaatggttaacagctgttattatctgaagtcctttctagactcaatttaaaatgattcaaatattatttttagtagagacaactatttattgttataggactgcaaggaacatcttccttcataaataccaactgaaaagtttcaattttctgatactgttatttggagataatctctactctcaaactcagaaagacctggcaaggtaacaggaaataaaagctagaaaataatagcacgctaggctccaagtcaacatcagatgctatgcaattcatcaaatagttggtatgagagatacttacaacccagattaagtccttgtgaatctgtgcacaggactccaacaatggagggattcttcattctaattccaggaacacaagagagttgaagtacataatgggagaaaaaggatttaaataagtacaaacatacaggtgttctatgtaccaggcattaagtgctttaaatcaatatttctcaatcttttttcattgtcacaccctaagaaaaaaattaagttctagggccgggcgcggttgctcacgcctgtaatcccagcactttgggaggcccaggtgggcggatcacctgaggtcgggagttcaagaccagcctgaccaacatggagaaaccccgtctctactaaaaatacaaaattagccaggcgtggtggcgcatgactgtaatcccagctactcgggaggctgaggcaagagaatcgcttgaacctgggaggcggaggttgcagtgagccgagatcacgccattgcactccagcctggaagacgagcgaaattccgtctcaaaaaaagaacacaaaaaatttaagttctagttaattaattgaaataaaccagtttctctctgatgagagaaaaaaatgtgctaagtactgctgagttctggagggccacaaacactgcgtga

SEQ ID NO: 55458 - DNA, 1052 bp, Homo sapiens
agtgatagaagtgtttgccttatgatctcttgactccttttacacaagaagcagattggtagagcttaagcaggtgtctgtgctgtggtgctggctctgccaaaaactctcatatgccctaggaaagttcctttaacttctctgagcccgagtttatctgtaaagtgaagactttttaaatttagtaatctgtatgtctcatctctgagaattctataatgttttcacattgttatatgtgtatatgtacatgttgctcccctctagtcactaagatgccacatatttctacttgagtgaacagattgcaagtccaaatgttcttgtttctaatactaataattgatctcagcaagacataaaaaagtaaaaaaaaaagtaatcttaccttttattttgaccttggctttaaattattatgatttatcatttcatctttgaatgctgagtgaattacctaaacagaatgtctgttccagttaatcttctctttaaatttttgtagtttaataaacatgtaacaaatcagaagcaagtatatcatgcttatcgatgaactgtagcagattgtaatggtgcatttttgtcacattaaaaagttaatgtccttttggtcccagaagcaattactataatttaaaataatattcacaaaattttgtgaatgtttttgaatacaaaggaggcctaatacagccatattgtagttcattttgctcaggagtgagaaacaaaattcagggataacccaaacatgtctgtttggcaatagtggatagttaggtaaagaagggttatagcttttgcacatcacagataagaggcgactatacctattgaaaaacagcagtatattctggttcttggttttatgatggaaagatattagaatgatactaaaatttggatgcttgggaaattgaataatacagaaatattttgtcatactgagattatttgtccagaagtttagtcttatatcccttccattcagaaaagggggcagtttttaaaggcctctgtcataaaaggaaatgtatattttgactagt

SEQ ID NO: 55459 - DNA, 1215 bp, Homo sapiens
gtgcaaaggaaaagaaaaaaacaatcaattttatatctcaggcactttacaagtgctattatatttctgtggtgagtcagtatgccttctaatacttgacttgagcaagaaaatgtgaattaggcaatttcttcttactgaatatgattaagacattttggtaccatacagtgggaaatatttccctcttgctgtagttgtcttccataaattttgttaattgtaatagctagatatttgtttctgcagacgttgttaagtttggtagtacccggtgcatttagcagtaacatttcgtttttgttttggaatgttattcaatattgcagcagaattttgataagaaaagaaaagcaaaaactaataagaagatggatcacataaagaagagaaaaacagagaatgcttataacgcaatcataaatggggaagctaatgtcaccggttcccaactcctaagcagtattttaccaacttcagatgtgtcacaacataacattctcacgagtcacagcaaaaccagacaagaaaagagaactgagatggaatactatacccatgagaagcaagagaaaggcactttgaattcaaatgcagcttatgaacaaagtcatttcttcaataaaaattataccgaagatattttcccagtgacaccaccggagttagaagaaaccattcgagatgaaaaaataagaagacttaagcaggtgctgagagagaaagaagcagctcttgaagaaatgcgtaagaagatgcaccaaaaataaaatctcctgtaaagacttcagtgaaatagctgttttttaaaatatacttcagcattaataagttaattgtaggtgtgttctgaaagtgtctttgaatatgaagcttgttttttcatcagtcgattgtacaactttaaggaatacagaaaaggttgattcacatatgacttgtgaataatttacatggggtatctatacctttgtcttagatacctttttttggaaggataaattttatatttttctattattttaactagaattctccaagtttgaatatttgggcagggtttttgttattgtttgtatctttacctaaattgctcaggcattattccagcagtagatagtgactgtgtattactgaaattttacaattcaagagaggaaatcagctccaaacttagcttttccagtggatttgtatatgtacttgctttatctc

SEQ ID NO: 55460 - DNA, 1137 bp, Homo sapiens
ttaatacccagagtcttccagtgactgtgaagtctccagttttgccttctgggcatcatttacagattccagcccatgctgaagtgaaatctgtaccagcgtcatcattgcctccttcagtgcagcaaaagatacttgcaactgccaccaccagtacctcaggaatggttgaggcctcccaaatgccaaccgttatttatgtatctcctgtaaatacagtgaaaaatgtagttaccaagaactttcaaaacatttacccaaaacctgttacagaaatagcaaagccagtaatactaaataccacacaaattccaaagaatgttgctacagagacacaattgaaaggtggtcagcattctcaagctgctccagtgaaatggattttccaagataatctacagccttttacgccatctcttgttcctgttaagtcttcaaataatgtggcttcaaagattttaaaaacttttgtagataggaaaaatttgggagataatactataaatatgccaccattgagtaccatcgatcctagtgggacgcgatccaaaaatatgcctattaaagataatgctttggttatgtttaatgggaaagtctatctgttggctaaaaaggggacagatgttctgccatcacaaattgaccaacagaattctgtttctcctgatactccagtaagaaaagacacgttacagacagtgagttcaagtccagtcacagaaatatccagagaggttgtaaatattgttttggctaaaagtaaatcttcccagatggagacaaaatcactttccaatacccagcttgcttccatggccaatctaagggcagagaagaataaagtggagaaaccatctccttctaccacaaatccacatatgaaccaatccagtaactacttaaaacagagtaagactttattcacaaatccaatctttccagttggatttagtacaggacacaatgcccccagaaaagtaacagccgtcatttatgctagaaaaggaagtgtcctccagagcatagagaaaataagttcctctgttgatgcaacaactgttacttcacaacagtgtgttttcagagaccaagaaccaaaggtaattttcccatgtcagggtgctctttttatat

SEQ ID NO: 55461 - DNA, 1031 bp, Homo sapiens
aaaatgtatctcttgagaaatatcatttatgccaagacttgagctatgtgaagagttgagttgggtgaggcgtacctaggtagagtgatagtatgtgtgacatgaaagctcaatatttcccaggagctgaaaaatgttttagatataaataaggtaaggtatttacattcaagtaatctccaaataactaattatgcaaacagagattagtatatattgatttttcttaagattagacagtctatactaagaaataattcaaggcatgggggtcagaattgattcagttaaaaaaaattgatttccagtctgttccacattgattgaaaaccattcagctgaaattgcagtggtattatatgtatgggttgataggtgattgacaattgactaatataaataattgctataccagagactatgtagcactaaacctcaaatgtgctgaaacagtaatcagaagaaaatgattcctatgtaaacagttcagtgaaatctatagcacaaaaatgtggcaaactaaggtaacaccatgagagatagcttaggcaaaagaagaatggctggcagaacttgtgagttattgaaggaagaagacagaacagattgagggggaaaagagagaaatggaataagagtaaggggagagggaatgagaatcttcagttagagtagaggaggaggacaagaggaaggaattcagggaaagggggaagggaggatgctaatattttaagaggagcttactttagtagtataattttatatagggcaaaaccttagaaatgtctacttttagtcttaggaataaatgttattatctcatacccattgcctaatcatataagcagttgactatatcattatctcttctacttcaaaatatttgttttgcagtctttcactttaaaaactcaaaatggaaaattatatactttattttaatatttacaaatatttacaaatatttatttttaaataaaatgtatataccatgtagtatgttgtatttatttactcaatgttctttt

SEQ ID NO: 55462 - DNA, 1048 bp, Homo sapiens
ttgtgtatcccttttgttcctttattaccagtttcttccctgaactggctcacttgagtatttacatatgttctggttaatctaaccttaaacaaagaaaaaggaaagatcccttctttgattccatttattcctgtagcttcctgccagtcgttctcttccccttgacagtcaaagtttaaaaagagttgtctacttgcttcatacccactcctcagcaacttctttcccctaccacactgctcttattaaagccatcagtgatcttcacagcactgttttcagtgtacatttttaatccttatcctatttggcatctcagaaacttttagtataattgcccaattttcttaaaatcctctgttcctttggcttaacattgcatcagaagcaatggttttcttcctacgactctaagaataatggaaggccactgcaatgttttaagcagggaaagatcagttttagtgtgctgagtaaattgaaaggtagaagatatgattggagaaaaaaatcagtcatgaagctattgtagtattctaagccagagatgatgtttgcttggagtagagtggtaacagttgatttggagagaattgaacagatgaaaggaaatttaggagacaatatcaacaggattttgtgatcactgaatataaggaataagaaaggaggatttatctattctgacttaaggcacctaaggtagatgagatgctatttagcaaagaaaaccctgcagaagatggaacttggggggattaggatgggcagagatctgctggccatgttgaattttaggaacgtttgagattctgaatgaaaatgttaaaagggaatttggatgtataagcctaaatttcaaagaagccacagatagaaatattgaaattgttcatgcgtaagtgataatttaattgaagttatgcattgagaagaaagcatctaacaaaagagtacagaataggaagagaaggattctttctaagctttggtaaactcccaacatttgaaagttgattcaaaagtatgagttggcaaagaagac

SEQ ID NO: 55463 - DNA, 1041 bp, Homo sapiens
ttcccctatttaacaaatgaagaaacagattcaaagaggataagtacattttctagtcaacttgtaattataagaaccagaattagtagcctgtaatctttctaatatgttcctcttttctcttttaaactgttaaactgtattatttttcaaatgtagtttctcagtttgaacaccagctggtttaaagtaattactttaaagtaattaggtgaccagactagaaaatgggatgcagaatctggttctagttttagttctgacattagcccgcagaatatgatctttcagaaaacagaatctttgtaggactttaattatttaatctcttcaatggaaggctccttctagatatgaaaaactgtatattgatagaaggagtacgaatttcatcctgagttattacttcttagcattctgcagattaatttttagaactcattacattttgttgccaagaaatcatggatttttaaaaaaattataccttgtaggattcaattcagctaacattattgtgtgcaatttccagtttctgaattagatgcggagtatatagatatgaataggataatctaccctgcaggaatttatggtctgtggtagattatgtgactctcactgatacactgacatggaagaagcttaatttttcttccttttttttattttttggaggtgaaatagaggaaaagagagggaaaaatttagtgatcagattggaaaatagctcacacagtatagttttttttataaagcagaaatatagacatcatataaaatactatgcttggtattggaaggatatttgcaaaataaattataaagcctctcaccttaaggagtttcagtcttattgaatgaaacaatactcattttaaaaaattagctaatagattaaagtcaataaagaaagcattatataatttccaacattaatagcaccaatgggagtacattcgggattccaagttggaagaaattaagctggagtgactggcagatattttatggaaaagatagaattggaaactaatttta

SEQ ID NO: 55464 - DNA, 1029 bp, Homo sapiens
aaacccgcagaggaaaattcaggcaacgcctcgcgttggtaagtaccggtttcgaatcctccccacggctgcccctctgtccgtcttagggatgtggagtcggccgtcgtttccggacgctgtgtagttgagaggagttggagcccgcagagtgcgccacccaggcgggaagcgcttgtctccgcggcgcttaaagcccatagagcgctttcctctgggaaatgtaaaacctctttagagcctgacacagcggctccgcgggaccccagcgtctcaagtttaataggcggaccgagtagatctccacgggagatgaaaaccaagatggccgacgctcttatgtgactcaaaccttctggaagattctcacgcacacgcagaaacgcagcagtcagcacggattagcaagtgcagccctggtggcgctggaccttcagtgaaaatagattttaatagtgagacagaaagggtgtgtgattgaagaaaaagggctttagaatgaggagatcgaatatttaaaatttcaagtaatagttttatgtgaagagagagaagtaagactggagaaatcctcgtgtaaagtcagtccttttgaacagcctttttgaagtagggtgtaatgaagtgccatttcattggctatttatatttggcatgaggagagtccagtatttctaaggaagatattcttgtaaagttagaaaatagatgatcagtaacttagtttttgggtttttttttttaaattgtattacaaggaaatgaattggaaacaatgttagctaaagcagaatattttcacttgtactctcacatggttagtagattaagtgatgaggaaaaaatagggtctgcagactctaataagaaaatgaagaactaagatgcaaaactcatggaagaggattttcgtttgaagaaaatcaagctacctggggttaatctcaactttgctagttagcatttgtgaggccaggtacctgtttccagtctgtaaataatagcacttagaaatattttaaagattag

SEQ ID NO: 55465 - DNA, 1047 bp, Homo sapiens
gtacaggtaaagaatagtttacagatccctgctgaaattaaaaagaaaaaaatgctcatttggaaagtgcccagtgatgaactggtttgcagaataatctttgaagaagattaatcaggtttttatctttttagaagagatggttccctggccagaagaaaaggtggggagaaaacatttaaactgtcagttggagcaattcaaggaataatgcttatgtgatggagacctcaattataaattagttgctagatacaagaatcagtaaataatatttctgaagtcttctggactaataagacagaaagggaataaaatactatgcctatattaaacagcaataaacctgggagacatttccataagcattgattgactaaatgctgacattgctagaaataatttggatacaaaccataaaaaagtatcatgcctttgaaaagcacggtgtaacacacctgcaaaatgtcatttagtcctgattcccgtatcaaggaaactattatttaagttatgaagcatgatagtatggggagaaggaaattgacagagtcaaagtttataaaattataaaatttgtatggggaaagtggctcagggaaaaacatagactttgtccattcctagaacacgaggcttagcgatacataccaacatattaaataaattattttaagacaaaaaaatactttcataatatttgaatcccattagttaacttttacccttagaaataacataggctaaaaatgttaatacagttggcttgcattatccatggcttagctttctgcattttcagttattcgcagacaaccatggtctgaaaatattaagataatttcagaaataaacaattcataattttcaaattataggctcttcagagtagtgtgatgaaatcttgttgccctcctgcccaggatgtaaatcatctcttttttctgcatatctgtgctgtagacactacccattcattagtcactttgtagccatctcagttatcagatggactgttgcagtatctcagtccttgtgttcaagtag

SEQ ID NO: 55466 - DNA, 1030 bp, Homo sapiens
tttgtaggagagattcttaggttcacaatcctaaactaaagaatttgaaatatggaattcagattgtacatagtgcctcagtaattgagctaggaacaaaaatgttgagcctgatcatactcacttcaaagaaatgagggatgagtaaatgccctttctgagaaccattatctagttaaagattatgatagaactgctaattttctgagcaaagaggtggggtttgactgtgagaaccattttgttgtgaccctctgagcagcacatttttagttttacagtaccactgctgtgtaacattaagtctttaagaaaatgggtttagaccttagcaataaatgtgtgagtaatccttttagactgtaaagtgatttttgttctctgagatcgtctctgagattcttccttgacttatgtttttatagtgctgacttgctcatcagttttgcacagtggcaattttgggactgatttagaacagaaactccattggaaccccgaggacaaagtaagaacttacagtctataaacttagttttatattaaagatggttattttgattgatcttgatatgtttttcatttcatcagtaacaatgaaagtcttctggtagaataatcagttctgtattaaaattattttcttgatatggtagggtttatgtagaaccttccatattctcctgtcacctgtgatctgtagatattgtcaaaatatgaagagcattgcgatggcagaagagttttctgagaaattgactcccctaaatgtgggtatagtatataatatagccaaccgagatcatttatgttttgaatacttgttttctgaattgaaaagacatcttctcccactttttgttatctggaaattgattatggactctgcatttaggattcaatatagtggatatctgaatgtagatataacatctgggactctgagaatagaggaagaggaacatatactaaagaataaaatgagttcatctgttttcacaaaccacttggtggtgttttatataagaat

SEQ ID NO: 55467 - DNA, 1024 bp, Homo sapiens
agtaagcagaaatctgtattaattttctagtgctgccataataaaatatcaaactgggtgactgaatagaaatttattctgtcaaagttcgggaggccagaagtctgaaatcagggtgttggtagggttgattctcttattggaggctcagagggagaatctgttcctggcttctggtgattaccagtaatccttggtgttccttggcttatagcagtgtaactatatataaccaatcaagctagagccaagggagaatattttaatttcttgagtctttaaattttatttacagttaaattgaatttaaatggaaactccctattcccagcactgcagtccatcctaatcttttcttattgcactatgcttttcctatgacccttttcaccatcagacacactggaatttccttatttctgaagtttatatttattgtttatgtacctttactaaactcagagctggatttttgcctgttttgttctctaatggatctgaagatttagaacagtgcctagcacctaataggcaccaagtaaacatattattaaatgaagaaaataataaatgaataattcctattatattttcagtggaggtatatgaaatagtttggtattactataatccttaggtttaaactgagtattatgagagaaaattacttcagaaagtaatttgtttgtagaattggccgagcttctctactcagtgaatgtcctattgaaatctctgggttgtgcttttaaatgttgtgttgccaatgtgttctgagtttcttttattgacgtatttcttctctctatctctcagaaaacaaccctttttgctgcacatgtaagtggagctgtgcttacctttggtatgggctcattatatatgtttgttcagaccatcctttcctaccaaatgcagcccaaaatccatggcaaacaagtcttctggatcagactgttgttggttatctggtgtggagtaagtgcacttagcagtatccttcactgtacaatgtggctacact

SEQ ID NO: 55468 - DNA, 1019 bp, Homo sapiens
catggcaagggaggaagcaagggggtggtggtgccagtctctttttaacaaccagctctcacaggaatgaatagagtgagaactcattcaccacccccaaccccccacatcagtctattcatgagggatccacccctgtgacccagacacctgccattaggccccatttccaacattgaggatcaaattgcaacttgagatttggaggggtcaaatagtcaaaaccatagcactgacctaataggattcttggtgaaggcaggccagggtgattagacatcacttgagggatggtagaggtgatatatttatggtgatcagatactgagaatggatgattacggctaaactgaacaagattcttgctaaaattggacaatgcagagatgaacatggcaacccagaagtcaggacctagttgacaagaaagttcagaggaacctgagctgggtttggtgaaggacagaatttttgtcacctgacagtaactcatgtaattccactgacattcatgtttgctagatatgggggtgcagcgggtgtgcacaggtcagaaaaaatggaccctggagaaaatttagttttgctggacattagttcccagcagccactttatactatgaaaggataacaacaatttgggtggacaactagctagctgtctgtgccacaaatagagttctgccttccctaatcagtttctgtagctcattattaaaaaatgttttggagaatttcagtgtgaggatggtgattgtctgtctcttggtcaatttaacaatgtttctcatcacttttatggtaaacatgaatctccagtatttgtttacacagcccagcaaattccaatagcagttcttgatagcacccacacaagccgcctttccacttttatctcaattacttaaggtagcctatatactttctttattgttttgcttttagcttttattctaatttaccttcacaagagtacttatggccgtgtaattttgactaaattactttttctcttttgt

SEQ ID NO: 55469 - DNA, 1042 bp, Homo sapiens
aaaaagctgaaactagagtagtatactagcagtgtgtttcctttgggggcatttggctgatagcagaagtagagcacaatcagggacaggtgacaggctgctctctacccaaagcagagagatagaattcatatccctgtaacctcccaggcacatgcttcaatgtcaatgggtgccattccatggtagttgaggtaaatggtacctgtgtttcagggggtgatgttttcatagaataaagtttaagtatttccacttgaaattgtacaactcatggtattggagaagcaccttgccccacattcagccaggacccacaaaagtctacacagtcagtcataggtgggccagaaaaatgtctccctcctggcaaagggagatcacagagaaatttgttccttttcatcacagctccaggtgggggaataaagataccacctgaaaacttgaaactggagggtctgccatcactcattcaaggttcaaatttacatatctacatgatctaaaaaaccagaagccaagaaattaacataaagttggcccgggttggtaatgtgccatactgtctggaaaaaacaaatacggatcctctctgtaatgactcacccttagttaagccttttaaaatactcccagattttaagattgtccaatataggctcagagtcaaaaactgtaaaacatatgtgtaagggacagctaaactgacatagactcctaaggacttataggaatgatcagaaacaaattaacatttaaagagatgaaaaatgaaaaaattaaagatcttagaaatgattcaaaattatgtaaattaagaactcttgtcctggaaacctatgctggggaaagcaccaataggatttggcaaggacttgtcatgattaactgaatagatgaagaaaaaagatattgatgggatgttaaggactgacaaggaaaaaggaagagaaaagagaagattatgaaatgcaaatgtgtatatttagcaacaaatcagatggccagagtaaatgacaaataccaataaaaaatggct

SEQ ID NO: 55470 - DNA, 1050 bp, Homo sapiens
ctcgcgcgcctgcgacgcgggtaagggggctccaggctgcgcccacttccccgagctgccagatcccaccctctgacgcacccttctagagggagcgggctgcaagcgctggggcctgtcccttctcccctacttcgacttaccttaccagaccgactagcgctggccgctggcgccgaagcccctatgctaaaaggagacagggctgggccacggggcgcgctcccgagcagaccggccggccccggggcgcgctcacggcaccgaggagcgcgcctgcggcgctgctcgttcaaaccttgttcccctttacggcaatcgcgaaagtgtcgtgaacgtgctgccgccgatcagtcacccagtcggctggagtcggaggcgatatttctaggggtgtacttgttggggtcagggtaaggctgcggagcgcggtcaccggacgtgaaggatttgaagggcgttgtaggggccagtggagagaggactggatgctctggggcgggtcattaggatatagctgtgtatggactcgcgcgaggcgaacgccgtccttcttcctggcgcagggtggcctcgcgcgcggggttgtggggaggcgaggggcgactgcccccttgcccctctgtggagactgcccccttgcccctctgtggagacattggggtggcggagcgccggcgcgggagccggggggctgttgtgtgggagcccaaggtaggggtgggaagaaccgtggagggccagcgctgagcgggccgagggctgggagcgctacccgtgccgaacggaccttgcttgtcaggtccacaccctcctgcccgaatgctggcaagtccacacaccgtgtggcatcctctgccgggtttgtctccccttaggaatgcggtgctgatgtttgtggctgggacgcgcttctggtcagcaacttttctggaaatttcagcctatattgataagctgtgagattgctagctggcgtttatttcagcagcattcttgcaaggagaaataaccaaaagagttgctggtgtttgccagtattcccagaaa

SEQ ID NO: 55471 - DNA, 1044 bp, Homo sapiens
aacattactttaaaacagttttaatcagtacctttgtgatacagttgtgtgaaagaattcctcaaaatgtaagaaattagctttgatttctctccttgatttgaaatattaattttttttttttttaagacagagtctcgctttgtcactcaggctggaatgcagtggtgcgatctcggctcactgcaaccttcgcctcctggggtcaagcaattctcctgcctcagcctcctcagtagctgggattacagatgcctgccaccacgcccatctaatttttatatttttagtagagacggggtttcaccgtgttggccaggctggtctcgaactcctgacctcaggtgatccgcccgcctcagcctcccaaagtggcgtgagccaccgcgcctggcgaaatattaaatatttttatttcagggcatctcagttggttaaattgtggcactgatgagtctcttgagatttttgaaaatttatttaagggcattaacttgactataatgactattttctaaaccaaatattgagatacgtgattgacagaggttttggatgccaccttaggtcattagtaacattgaaattttggaatttgatatttatagggatataggaaaaaagtcctgttccattgtgttcacatgtccataccaggctgtggggtgagtgtccccctggctggtacctacttgtccatgtggttactcatgagctgagtgcctacatttcatgttttgtggcatgtgaccctgtgctccacttcccagaatgcacatgtggcctgggttcatagtcctctagccatggccgggtctcagttcagtgccttccatcctgggcagcaggagcaccatgttgcagtctaccacagctgcctctgggccttggcctggcttcactgcattccagcgctgcctcccctccaccccagacaggggggaacctgccactctcaggaccaccctgcaaaggcagaataaaccagatcctctcacagcaaaaaaaagttaaaagggacaactgagcatgttttgatagtag

SEQ ID NO: 55472 - DNA, 1291 bp, Homo sapiens
gtgcttaagttttgtaatatgaagggcatgcccaataaatgttagctattaccattaaataaaaatctagtttaagactcattgaagtcattcctctgatactaatactaatttgctagccttgggacctcagtttccgtatatgtgtaatgatgagatgatttctaacatttgttgcattatacaactgaaagcagtgtgggatggaaaaagaatatgagcttcaaagtcagacagactatcagataataggaagcatactactattaaagtctcttactattttttgcttaaagttgaggttatacactttcaataagaactagaaccaaaatcaggtccctccttttctggtcctgtttgatacttactactttattgacaatttgattttttgtttcctaatttgttaatattggcataagatgtaaatagtggccaacaagtgtattttttaatttttattttattttattttttaggtaagcaccagccacaaaaacctacaaaagaagggaaattactgtctttaaatattaaaaaaaaacaagatccatgagtgggcatcgatcaacaaggaaaagatgtggagattctcacccggagtccccagtgggcttcgggcatatgagtactacaggatgtgtattaaataaattgtttcagttaccaacaccaccattgtcaagacaccaactaaagcggctagaagaacacagatatcaaagtgctggacggtccctgcttgagcccttaatgcaagggtattgggaatggctcgttagaagagttccctcctggattgccccaaatctcatcaccatcattggactgtcaataaacatctgtacaactattttattagtcttctactgccctacagctacagagcaggtaagagtttcttaacagatctcaacatttgctatataccaaaaacgttgtaattgggatcgtggggtcattttaactaaagataaagtaatctgacagctgtcaactattttaaaatatcacacacactgtgataaagcttgtaagtacagcctacacacttgcttattggaaaccagaagcaaacggtagactgtgatcctagtgcttaaattaatgttagcagggattaacatgtaaaatgttccttttaaagtcactaaatctcaattttttacaaaaaagtttttcatttttttaaatggtagaataaagtcttagcaaaaaaaaaaaaaacagtgagaaaactctctggtatttagtatggcatgactgtaaactagccttatcaaaaggt

SEQ ID NO: 55473 - DNA, 1040 bp, Homo sapiens
gcccaggctggagtgcagtggcgcaatctcggctcactgcaagctccgcctcccgggttcacgccattctcctgcctcagcctcccaagtagctaggactacaggcgcccgccactacgcccggctaattttttgtatttttagtagagacggggtttcaccgttttttagccgggatggtctcgatctcctgacctcgtgatccgcccgcctcggcctcccaaagtgctgggattacaggcgtgagccaccgcgcccggcattcttttacaattctaattgtttcagtgagttcttcattatgtagcacttggatcttctctcccatagcttccaactagctttccaacctgcaggtaaaaatatgttagtcaaacatggtaactgtgtgtctgaatactcttgcctttcttattttatttcacaggcacctctgtgggcatatattgcttgtgcctgtggccttttcatttaccagtctttggatgctattgatgggaaacaggcaagaagaaccaatagtagttctcctctgggagaactttttgatcatggctgtgattcactatcaacaggtattgttgatttttttaatgttattgattattaacaatggttaaaccagtgtgctaagcagtgttagaatacatgtttagtcatgagaataagtaattttgtattaaattttagtatttctcaaaagactatgaacctagttaatatttgttcattattggtagtgttaggaaatttagaaattactttctgcttgttatttttagccccaaatattgttttggcatcttttgtttttaaaagcttggggcataattgtcaccatcaaaactcttatgaactaaatgagagtacagtggtgggagactagttaggtaatttgtggtcttcatatatttaaatgaatgttatgtagacattcagaattatgttaatggacttggattataactacgtcataagaagctcagagaaagactatgacaaattaggagtatcgttaatattgcattgtgtactggaaa

SEQ ID NO: 55474 - DNA, 1623 bp, Homo sapiens
catttatatatatggcatgttttacacctcatatacaatttttaaaagaaacactaaagtgctagcaataactgagttactctgtttggattataagtgatatctctttatttgcactgttttgcaagtttttaaaatagtagtttattatgtttttagagaggaaaaagacacttaaaatctaaatgacagtttttcagctagtctttctgacaggaactcatccctcccctcttttatttttgttttatttagtttctcaattattttcttgtttgacatggcacttaaaatatttaaaaagaaactaacaaaaaccccttatagttttacctcctgaatccacatttacaggtataggtgcatatcaaaatcattgcttcattgtatcccaacagcagcttatttagtagaggaggagaagcaactaaggtcatataattttttaagagtcaaatcaagaaatactcaaaacttctgttgaataaatggtagttggctgtcttgaaaggcaacaaccagctgactgcaggatggcaggatggcaggcttcctattatttattttaaattgcagtcatttttgcgttgtagtttgaggtctagacttttataggaagtctttttctatgtatgtcacccataacaatatctgtttaaaaaaaaaaagacagttatcaatctgaagcaagtaagtcggtccgtctggggattatatagcccctttgtttttcttttttggctgtctgccttgtaatgatttgctgatcattagtactagtgtctctaagtcaggaaaatactcgaagaaatgttgaagtattttagttgccttcaagaactttgcttccactaagtgatttggtaaaaaaaaaaaaaaaaagagagattgaaattatggggtaagagattatgtaacagattatatcctacttttctgttacaatagataactgagagaagattatgcatttacagcatatctttttgtctcatctaaaatcatttccagctcagttgtttgctattcatattatttggttttcatcgtgatctttcttctgcagtttttgtggttcttggaacttgtattgcagtgcagctggggacaaaccctgattggatgtttttttgttgttttgcggggacatttatgttctattgtgcgcactggcaaacgtatgtttctggaacattgcgatttggaatgtaagtaatacttaatggtaatttttgttttctctttcacatatggagaatgttgccttataagtatttgagtattagaaattgatcaaatcactaagttagtttaataaattaaaaaatttatgcttcattattatagctatttcctaatagtctctgcatatgtccctctattatacttttttaaaaggagatatcagaacctcccagccagtattttaaaagcaatacaaaaagcagtagcccctcatctttgtctttcccacagaaaaattcactttttttccccaccattatttaccttaattccatttttattttcacatataaaaatgcatttccaggaaaaagaagatggtttctgagagcagcgccctaatccaatattaatttttagtgtttctactattttcaa

SEQ ID NO: 55475 - DNA, 1282 bp, Homo sapiens
gttttaatttttttaacttctatcttgatttggataagaactatgtatgtatgtataaggatagtatagtactgtataaattgtatcattccatctttaggtgtctttgcaagaagaatgctactttttaaatctatttttgttacctgtgttagtagggctctttagcaaaagttctgagtaaagttattttgaaatgtttgtttccttatgcatagattcgatgttacagagtcccagatcataattataatatgccagcttctcacaggaaccctggggccttggttctggaacttcacggtaactgctagaatattcatgctatctgatgtacaatggtgtgaattcaataaagacagcacctttgtcatgcacagaataattaaaacatgaaaaatcaaaagtcttcctgttggtatgtcacaaacaggttattagaaaacataattttaatatattagggcaataaaaatccaccctattaaataaaatttttaaaaagtggtatttctggtgatttgatgctaaagtcaattctcctgtttgcctattgtgcctattatttttattctatgtactattttttaaaacaaatacctttccaccagtaaatagaattttttttatatttctattttgaaaacagaataaagcaagcagagtttttcttaggtaaggaagttgagatgattctatattaatgtaggaaagattctgcttattctgttaacttctttagcatatactttaagcagtctagtactagttctgcttgagtttacagcagtcttggtgttgtataatatttatgctggaagctattctcatttctgtttgttttgcttaatgtttttcactcttagttgtgcttttgaaactaaatatccttagcttttcatgttactatagtcattctttgaatactttccttttttgttttgttttcttttcagtaaatacatatttctctaatgtactgctaaaagtaatgtatctttttccttttttttttttttaattgagatagagtctcattttgtcacccaggcaggaatgcagtggcacagtcataggtcactgcagccttgaaactcctgaactgaagtgctcctctcacctcacctttctgcactgtcacacctggctaattttaaattttttttttgtagagacaggtcttgctgtgttgcctaggatggtcttgaacttctggcctcaagtagtcctcccgcctcagccttccaaagcactggaactacaggcatgagccactgcattc

SEQ ID NO: 55476 - DNA, 1552 bp, Homo sapiens
tacaatgtcagtattagaatggttaagaaaattctgtcaaaagtttcaaatgactattctataaaacttgccctaagaatcccaatttgagactttgtaaagatcttttatgtttcctgttctcttttatattcatccatggtacaaagattaattgcatgaggttccctccatttttattttgtaattctatacttctggcccttccccttccaaaaggctacttcatatatccagcaaaatgttctaagatgtctaccctcctccacccaagacagaatcgatcatctttgacacctacctgcttagtctcctgaatctgctactgagtgtaattccccttattggcaacaccactcaccaggtcagctctacagattctttttagcctaattcagtccattttttttttcaatgtgtatatcaagataactacatcactgtatgtttgcagctaaataagcttctgtttaaaaaacattcttgggcaaacaaagacccatttttttttagttgcaagacattagtttcaacccagttatttatcacagcatgacagcttatgtatcttaaactcacattacagattatctgctttacatatttttagaaatggaggctctgttctgttctgggaattgaatccctttgctgttgttacctacttttagactaattacttttaatagataaattattcactttgttgaaaaactagcattataaaaaggtatacagtgaaaagtctcctcattcttatttcccagctccccagtttctatactatactccccaataggtagccaccactcttagtttgtaatgtgtctttccagaaatttgttatgcaattactggcaaaaataaaagtagaatattatttgtctctttttttacacaaaaaatagcctgtacacattctgcaacttattttcacttactatatctttgctactttttatatcagtatatagagagctgccctactctttttaaaagctgtaaaatattctattttatggaagtaccataatttatataactattccctctgagggaatttttttaaattatgctattataaatttataattccatagtgaataaccttgtacaaacatcattttgtgcaagtatatctgtagggtaagttctcaaaatagaaggcatttgaatccagtaatctaagaatgataatctcaaaattgtagaaggtgctaagtttacaagaggaaaggaaaaacagcatatgttttgcttctcaatctttttgcccatgttcttttttttcacactttcaggcttctaatttctgctgccctgttgtgcatgaggtttgtctcttcttgactgtaaaattattttcagcaaccccaaagctaattcttggctgctttcagtatcttctttgcagaagtctcagagtagttaacctagtaagaataggaatttgagaactggaggagttttttttttcacacctatacaatggcagacattaaatgaatatatctaaagaacagtaagttttacagagtcttagtgatttatg

SEQ ID NO: 55477 - DNA, 1028 bp, Homo sapiens
tctcataaagttattttatgcattaaaggagttaatatattgtgtaaagcacttagaatagtgcctgtcaaataataagcactcaataaaagttgttgctgctcttatagttttaatgtattctttcagatttgggttgtcatggtatgtactcccctggtcatcagttaattgccgatttctaccatcaccccttcagaatacagtatttatcattcatttggtgaaatcttaacaaagaaaagatttactagacctaaattaatgcaattcttaaaaatcagattaattttaaagtataagggaaatttactgagcaacatttttcccttacctaactcactttatgatggaaaattaggtgcttgaggaagtgtaattgatacactacccacagtatttattgccagaaatgaattgttaagtatcttttgttgggaagatgaatctgtgaagggggaggagatgaaggaataaaaataatccacagtcaactgggaaaattctgaaactattcagttatgtacataatatcattcagttatgtatcttagatttcactatagagaccctattggcttttgagactaatgtgtaggaaatacgaattttattacttttgctcttcagtagactagttcttttttttaataacagttttgccttatgggaaggaaataatagtttttgttttcctgaaagcagatcataaagcctaaagcttacccccattcctaaagtttttatatcccttgactatggtgattattatttttataagccttgtataccaaagttttccccccaaaattatttgtaatatgttgtacataaagtttcagcataccaatatccaaaaagtgggatttctggcttgattattggaaaacaagtcagtgtttggtttatacaggttaagtatcccttgtctgtaattattgggaccagtatttcagatttcagatgttttcaagttctacaatatttgcatatacatgatgagatatcttggtatcttgagataccaa

SEQ ID NO: 55478 - DNA, 1078 bp, Homo sapiens
atactttttacctttttccattatgatttatacatataatctacacatgtacatagtagatataattttttcttttataaagatcaaatgttttgtcctgtcttgtaattaatataaacatcctttttaaattatatgttttatctgaggaactctcagattcacatctgaaatggagttcccagacccagtaaactagcaatctaatttcaggattcatgaggtgaggttgcaacgggaaaacagattctccccctgccccttcatcctattgttagcactttggtcctactgttagcatcattaaaccaaaagggaacaacccgacttctctggtgatatatttggagacttagtgaaatattctgttttttcttttttaacaactcccaatacggattcccataattgaccccagatcactatattatttttttctttttacttagcattaagggttcattactgaatatgctgttttgaattgcattctgttaatacaggaacaaatactacatattgagctctcacatttttgtgtgccaaatggagaaaagatatttacttagggttcaggtatgaaatttacatctcttctgagattgaggccataaaatggaaattgccttccaaatcctcattaagttagaaggcttttactgacatttagaaagcaagtttatggtcagaacaaataaaaacagtgcagatgtcttcataaggctgattccagaagatcagctgttttgtaaaggtaagtgatttgcatctattacatatggattacccattctttcccaaattttttccccaaagagatgaatttttaccaaagattatagttattgttgttgttgtggttttccttttttttttttccaaaggaaagcagttgtcttcatgcataaaagtcagtgcttgttttatacattgcaagaaacaaaaagcatattttttgtttgttgcttccccaaaagacattccttttagaatgccttggaactatgttctatcatatcactctttaaaaaaaacaaagaagaatatattcttatttggaagagacttaatataatca

SEQ ID NO: 55479 - DNA, 1001 bp, Homo sapiens
tggtccaaaggaattcttactcttcccaactcttaaagacttgaaacttcaagcagacctgacataaagatgtctttggtatagctctttggctatttctaaagagtggatgcactttggccacctttgataagttccaagatgatgacagaaagaaaaagattgggaaagacagaatgtgcctgttctttttgacttgagggagagagagaatgtgccaccctccttgatcttaagcgtggggtgagaatggcaacactttgtgttttttataagtagtgccaatttttaaaggatcacctggtgagacttgggattcctttgactcgagcttttccttcactttgcctcatattttcttggtagctcactttctttttcattgctaatgtgggggctagatgtttcttcatactctcccaaaacaggagttctacatagaaaggaagagaaagggagattttaatcttcatttaacaaatgtgtattgagccacctacaataaccagggctctagagagtgtacaaaatcaattcaaacaaaatccaacactcaggagcttatgttttggtgtatatagctaacatatatgacaaaagtgatgaaaaccttaagaatctatgatactttgcgcctaggtcaatagcttgcttccttactttgtggtccaagccatgtactaattttcctggcttttctaatgtttgtgtttattcttctttcaaagggcaacaatttttatgatcccaaagcaatttcaccaaattttaaatacagttatgactctcattcagttcatttatgacacagatgactattatacagagatggtactcatttagtaccctggccctaatacagggctgtccctgtaatagaataatgctttgcttcttttggaatctgagggaagtatagtattttcccttttgccagagagatcttttgtctctatggagtcaaaagtgggaggggtgggaagagaggttgggaaccagga

SEQ ID NO: 55480 - DNA, 1054 bp, Homo sapiens
aaatgatagatattgtgtttgcaaaaatgcatgacatcaatccactctgtcccccatacttcaggtaaataaacacattttcagtatactttatgaatatattattcacttttctgaaaagtacatttaaacttcaaaattttgtatgcacaatagtagaatctgtttgaatgtacttgacctgttttttcttctgcattgtgaatgccttcttaattgccttctgcttttactagctgcctgtatcctaacaatttggagttgggaactcttctgaatagaaattttatcttccattctctatactctgcagatttttatatctagtcgcaacatttctattatgattcatacttcctcacaacaattatgaatgttctacagatttagaggtagaattcaaaaacatatacaaggaaaaaggcagggtgcactccttttattaaaaggccagaacacatcctggttcactgttgcaagaccactgggatgcattaggtgaatctaacttagcttgtgacacaagttaataaagttgaatctggtttttttgttttttttaaggttgatggctgaagtgagattaatttctaaatagtctcaactcttgagacttgctatattgcttataatgaagaggaaaaggacactttcattactttacgtatttatgtaattggagggaatggaaagtttttgggaatatgaatcaaatattagactgttttcttattttagtttgtatatgttttaattgttttctctctctacccattaaagattccagtgctgaatattcaaatgaaaatttttcctgcactttgtactgtagcagggaccatattttcctgtacaaattacttccgtgtaatcttcacaggtggtgttggcaaaaatggatcaacaatagcagtaagtataccttaagattttcaacacttgtttacactaggacttggttttgttgtcattttgttttttatttcaaatgtataaaatcatttgttaatttataatttatacttagcctttaaagaaactaatgttcaaaact

SEQ ID NO: 55481 - DNA, 1540 bp, Homo sapiens
cttattttgatgacccagtcatgaaagatcgttcatataattgtaatgatttggaatgtcagaaatccacataaatggggctgtgtgagagttctatggctttatatttgagccttttattttttgcattaatcttactagtcctgcctacatcgggcagggctcataaattgcaaatttctgactgagtagaaaagcatgaatcagcatactacaccctgtgggcccatagcctgttttggtaaatacagttttattggaacacagctatggccactcatttatatattgtctgtggctggtttcatggtacaatggcagagttaagcaactgtgacaaagacaataaggcccataaagcttaaaatatttgccatctgtctctctaacaaagagtttgtatgtgaaggaaagattgcaaggaaattgaattattttatggaatggaaggtgaatctgtagagagaacagagtccagtcctctttactttcaggaagcttagggagagcctaaacgggtgctgagaatgtctcttttctttccaggttttctctttctttgatttgatccgctactgtgtcagtgtttgcaatcagattgcgtctcacctgcacatacatgtcttcagaatcaaggtctctacagctcattctaatcatcattaatgatgtaattggtatataggaacatcatgttttctgcaggaaagaaagtaacatattaaggagaatgggggtggataagaacaaatataatttataataatcaatgttgtataacttttattctttattattggtaacacgccctaactatcctgtgtgagaatgggaatttcaagtcccatcttgtaaattgtatatgttgtcatgcagggtttgggccaagaaagcatgcagaaaaaaatgccatgtgattgtaattatcctggattcagaataatactgtgatggggagccagatccgcagtggtggagagttctaatgttgactgtttgcaggccaaaagatgattgctttataattttaacaaatcattgtcttttagtaacatccttgtttagtgtcttctcaagctttctttactgaggaattcagcttgtgacacagatacatcccactagcttgtgaggtggaactagtaataaagaccttgaatttggattgaaaagtttcctatctttacattgttgaggaagtccttttttttttttttttttttttaattgctcaagaaatgattctctcacaggcttgggaaatcctgttagcatgcagaataatgtggtaactttgtcaatttcccattttatttttttaaataaatatatgatctaaaagccaactttttctcagttttactcagtggaaagataaactaagttttaatgttatttttttaaatttaagcaaaatttatttctgttctttaataaataagaaaatgtggtccactgcattgttgtgatgtgtcttgtgacatttctattttgtagaaactttaaaaaggagaactatgttcatttttcctgtcaatgg

SEQ ID NO: 55482 - DNA, 1114 bp, Homo sapiens
aactggttgccagatgccaagcattgggaagatacaaacaggacaaggtccttcacctgaaggggatgcggaattacatactggttgaaagcacagggattgaaatcagcagaattaggaggtttaaatccagttcttctacctttagctatgaggttcccattaagttagtttgttaacttcttaaaaatggaaataatgattgtgattacctcataaggttgtggtgaggattaaatgaaataatgcacattaggtacctaacaccctgctgagcacatattgctgagtgctagcttctgttcttaagttcacagttgagtatatccctgtgtatagtggaagcagggtactattgtgccatggtctctaccttttaggggcttcagatctgagaaggacgtggggagatgtaatagaatggagaatgaaagaagtcataaaacagtaggggtaggggtagaccttctattcatatctggggagggagaaaaccagtgattttaggttgacaaccctgcttttatcttttagggaagaagaaaaggatgttagggactcaacagaagtcagaggggcaggtgaatgccatgggtttcagaggaaaggaaacttgggcaagcagtggggtctctgtgttgaagattctgtaaaaatgggtgataaccaaagaggaactagttgtaggtaatccttgaagggagtggcatcatcttttgctttggaaatagctctttcactcccagccttgaatggaaaccagaaattcctgtgtggctagagctgggattctgcctttcctcctcagatcagtgtttgggaagtggaggtcggcaggattcacctctcagacgtttactttcttcagggaaatcccaccactccccacttccttcccacactgagtttttcagctccctgaagctcggacagggaggggacttccagtcagctagcctctcagagactcaattttgctaattcaggaagtgccagcttgaaacccagaactgaaacaaggattcccgcatctgtgcttttattggccttgactttgaggcaatttggctggagtaaagaagagccatgaaagccaggggataaaagagaaaga

SEQ ID NO: 55483 - DNA, 1056 bp, Homo sapiens
atggacaggaatgactagacgggaaggacttcccaggtagaggacagcaggtacagagggacagggtgagtactttaggcagtagtggaggtgctgcaagtctctccaatctctgctctgcgctggatggatgagggtgtttttctaacccaatgaagcatttttatgagtgctggcatagttgaaacaatgttcttgaagggcaaagaagctttgatagacagaccctttgaagcaccaaaggagaaaaggaatggcttagacattaacttctgcagcacagcttgcgtacctctacttttttgcagcatatagtttttagcacaatgctgggcactcagtggacactcaaatgcttaattatttatagcaacctagttctccctgccttcaagaactttaaatctactagaagttcaggtgctagtttgagaaccacctatatggggcagtctgtgctgggatctaatgaacaggagagacttgtttatgaaaacactttgaatgagatacagatttggtcaaggatcatgtatgttactcttactattttggtactggcattatacccctggcttggtttcttaaggatgtcatccactctttggttcccttttttccatcatggacagtagagagaggaaagggtaacagtaggaatttattcaaaatagagaggaactcatttgtgagtggcctctccattctctctttggtttaccttcttctcattcgctggttagggattcttggattctttatccttgggcaaggaacaactgtctcttggtgcttatctccatggcacttcccagaactaacctggtggtcctcttggcagatttgttcctttgtctggggagcgaagaagcactggattgattaccagtatgtcccgtatgccaacaaggggaaagagtgggttggctatgacaatgccatcagcttcagttacaaggtgagaccctggctctttcatgctccagcacatggtttcctaccggtttctatggggtccttatttgtacaatgcatgtatgtgtattgggtggagag

SEQ ID NO: 55484 - DNA, 1057 bp, Homo sapiens
aggcctgggttagaggccgtacttgccttgttgccttaaaggcatgagatacacgagagggaggcctggtgggctgggagtgtgtgaggatgcactttacaagatggaggaaagattcagggcaggggggtgagaactagctctgcccagcccaggattcacctcttcccatctctgaacactccctgtgctccagatgctgggctagggctgtacacgcattatcccgtgaacacttgcaggaagctttacaaagtggttgtattcaaaattggtagagcagaaagcacaagtcacagttattaaggaacttgccagatttgtcacaggtattcctcagagattgcccagcaaggaggtgggaaactgaccatggaacccagatctatttatgagtctggttaattttttaatcatggctcatctcaggattaccccagagttgcttaaagttcaggtccaataagttagaatttttccaaagtgtcatcactacggaagagaaaacaagtaaaatagaaaaatatcaaacaaaaaacgaacaaaagaacacaggatcaggatcccgttatcagaacacaggcctcttgtgccaagttatacagcccaggcccagattaactcatagatgtttctggacatgctggcccttgactcatgttctctcccctaatccagtcaggtagaaaatgtcagtgctaggacaggttgtgggaattgagtagttacctatgaggagacagcacagagaggggcagtgccttgccagtgggcataccatgttttgggggcagagctggactgagccatttctccacaccccaggctgcatgcttggttctgtgcctgctgttccctgtgccgtctggccttggggcagtacatggttttcaacttcttttagctgcctgaattccctactcctgggtattgagctcctggtgctgggagaggcatataagaaggtgggagagttttggaaatctgccttcctttcctccagccacatctgccaggcccaccacagggaaccaagcttgcaaggggccttgtagga

SEQ ID NO: 55485 - DNA, 1002 bp, Homo sapiens
gaactcctgacctcaggtgatctgcccgccttggcctcccagagtgctgagattacaggcatgagccaccgtgcccgaccagaaagcatggtttttgaaggaccatattttattgtaaaaaaatgttttggttcagatagatgtgtgctgatgggagtaattcacatctatcagtgaccaccaccaagatatttataaaccttatcaaatacagtaggaagagcaaccagcacaattttggataaatgtatatgttgcagtgaacaaagaagatagtttaaaataaaagatgaccacagaataattagaaatggtactgtcacatatggagtgatttgctacgtccttcacttgaggatagttctagtagagtgagtgcagagctgatgacaagttgaaatgagatcaatctatttgtttaaaaatatacaaatattttgcatttaatttcatcggttaaaatgtctaaacattagagtaaacccatttccctatctacatccttactctgaagtccactaatcaaacctactcttccacagctgttctctggtccaccaagggctatgaggctcaccccttggatggtgctcagaaccacaaggaatactgaagaagccttgcctatgatttcaggtggcatcagacattgggctaattttcaaggtgtctctccttcccaacaggacagtcggagtctggttctttaataaatagctatatggatcttacttactggttcacaatcatattacagcagcaaaaacacccaagctctaactgctctgggcctccagccatgtttcctccagatagcatgttagaaaggacaggagattttaaaaatcagattggacttcagagggctccaaattttcttgccacatctagacctgaaagtaaagagctctgattattaagaggcagattctcgttgcatttggacagcgtgagtaatggtcacactgaacacattagaatcagttgtgaaattgattttgt

SEQ ID NO: 55486 - DNA, 1730 bp, Homo sapiens
acacacccaaaaaatgtgccccagatgtgttgggttctctttttttctccaggtctgcttttcttgtctctactctgccccgactttttttctttcttctaggtttagaagccaagcccacagagactttgtgagagatgcgacttggtccccgctcaatcactccctgcttaccacagtgggctgggaccatcaggtcgtccaccacgttgtgcccacagaacctctcccagcccctggacctgcaagtgttactgagtagattggatttaagacaaaaagcaagtcccccatgagtgtccacttctttgccctgccctctcagcttgtgagacaacacaggagccttctatagtatgttgatatgctagatctgtgccgttaataggcatcgtctctcagcctgagggaggctggattctgggttcctgtagtcacagggaggaaaagctttcttaaaaatggacatgtatgtgcgtgtgagtgtgtgtgtagatttatagtttttggtagtggcaggaataaaaaaaatccatcctacatcttccctaagcactgcctctctctcaccccccaaaacaagttgacgaaagggttttatgtagctgtctatgaggaattggccgtgtctgggtgggttatgggatgtgggcatccctgggttcttggaagcagctcttatgctactcatagagatgggattgactttatttttttatagtgcttaattcaccattatgagaaatgcttccagtcacaaaaatgcagcccagctcactctgaggaagaagcaggacttggtacggttttacacaactccttaccattaaactgaatcagaaatccattttctggctgaataaaaagtttggcttgcctgtgtaatgcccactcccttccccctggctccctagtgatgggacatatatgagagagaagtgtttttctatcatagacaccataggggaaagtttggggatgaaggagagcttaaaggtgtttcaattaagttagaaaactgacacaggctgttgagaattctttgccacttttcccaccccaaaacagcatggggcctgacatcttctgccctggtcccctttctcttgatgtggaaagtctgaatgcagtatttatagacttctaaggttttaaaatccagtatcaagaagaaaatcagaaatactggttggtgaaataaagagtttaggcattgttggcctgtcttttttgaagcatgtgtgttatgtgtagttagatatatttcacttatgtgagtcatcatggtgttggtcttgtagcccattatttttcctgtgcttccccagcttcccaaagtagctagttagaacttaaggtaaatatttattcttgggttggtggagtggatattgccagttaggagtcatggatcaattactgattatattgaaagtaaatataatcaattatgtacttttgagctttgcaggttcaatttaggtaaaaatcacattatgaaactgggaaagtctgaaggaatatgggcaaaatatttctcagtaaagcttccatgcttcacccttgacatgattacccttgagtaaaacatgggaatttgtagttgtgtgatcctctggcgttgatgtggagtaggaataaagtcttgcatcatttttataatgtgggaggaaatagaatgggtaggtacaatcacttaagttctgcctctcgaagataaaactttaatt

SEQ ID NO: 55487 - DNA, 3009 bp, Homo sapiens
tcatattttttagttctcattattagacagaaacagagttaagtcacagagccatacttgtgtttgtggtgtgactgaaacaagatcagcccccttcattgaattttacctagatgctctttctttttgctctttggttcttatggaaaagccccttttgtcccttagtttagaacccttatatttttatacccctgagcattgtagcgtggaaagatctgggatgaatgacaggtatgtgttctttctatgaagtgggagaagagtgattgaaaacagaggcagttcaattttaagaaagagaacattagagaaattggctctcttaatactattagcgcccagaactccctcaaaagtttttgtatactacttggaggtgtgtgtactccagtatgaagactgctattctagaattatttagccctcacgtctaggatgcctaaactggaaattcctttgttattcttactaagcccctaatttctcattcattatcttcactaatacgttttttttttacaaggctttttaggttttataagtctataaacttctcctcttagcttttgtctaatccataatctcccacaaaatttgttaaattgcatcatgagaccagccctccctccctcctgccccttgattattcctgggctggccctctagtaatgcttcagcttgttttctatcatatttctctttctctctcctttatagctcatgctgctcaggtcacttgtgttgctgcctctcctcacaaggactctgtgtttctttcatgcagcgaggtaagagatagctccttcttccctaaacacactccagccatccataggccaaagtctctagtggggagactttctggcctgcaactgctcctttggattatgaaatcctttttctgttccaccttcctctaggacaatagaattttactctgggatacccgctgtcccaagccagcatcacagattggtgagtctgagattcattggtgggagaatagtacttggaaccctgatagaagagactgtctttggccagtgtcaaagcatagttgctagatgcccagtgtagttactgtgacatgagtgacataatctccttcttttccagtgaggctctgctaaccccattctgtgcaatgaataccaagaggaagggccagttcctgggtgggtgatttactttattagatggtaggacaaaggggccagaattgttatcgtcatgattcgtgcctgaaacttgcctgtgactcgtgtccagaaagggcaggaggctgctgggataaatggttatgaggctcaaggatgaggacactgctgccttagcagggtttgggaaatcaaataaaggtgctcccaggatttagagtgatatcatttgagaaactgcttcttctgtactctgagttttggtccagaccctcgtctctcctttgcaggctgcagtgcgcctggctaccttcctacctcgctggcttggcatcctcagcaaagtgaagtctttgtctttggtaaggcagcgtgtcagacttcatattgactctgggaaaggggaggaggaaaaagaaagagctgactccacaacacacaaggcccttgttgctcagtcttagccctcatggacactagatgaattatgaattgagggtggggaggtggggtgatgccaacgtagttttagtgtagttttggagaacatgattattttcccagtggatttgatttttgattgattgatccagcttctgtattctgggcatggctataagtcagtgatccacaaagcaagtggattgctatatagcgaattctgtcctactgtgggtaggtgtagcgctatcgtggtcatgaggctgtgtatatggtgacatagtttgtggttaaaataataactgcttcgttcattaacttaattttcacaatgatccagtgacttattattcctactttgcaaaagagaaaactgatgctcagaatggttaacttttacaagctcgaggaactaggattcaagtctttggcacaaaagtccatgctcttaatcactatgacatgttccttctcttctacaggtgatgagaatgggacagtctcccttgtggacaccaagagtacaagctgtgtcctgagctcagctgtacactcccagtgtgtcactgggctggtgttctccccacacaggtactgttctttgtcatcaggggcctgatgggtataaatgggaaccgtgagggtgtgtgtgtatgttttcaaagcattagctgatgaagtagttccttaaagcagacagtgttctagctgaggtttcggaacatcgaagatctcttaagtgtgaagtagaatcctttgggagtcaaaggatttttcagattagatggtttctgtctgaaatggctaaaatgtgatttcattcctgcccaacacccaaaatggttaatgttgtgggcttctaggactgtgagattggaaaagcctgtgtttctgggttattgctgaagctatagagagggaccagatggggtggttagttgccaggatggttgtcaaccctaactttgcttcatttccctcatctttacttgaaacttttagtgtggacttgtagtagccagattagccaaaagtgggaatcaggctgcctctcctgggtcactttacagtggcggcagggccggcccagttaaggttttgtcttgggatccaggctggacctttcacaaccctctcctccatctgatagtgttcccttcctggcctctctcagtgaagactgctcacttgctgtgctggactcaagcctttctgagttgtaagtgtgaagtggaatcctttgggaatcagggaaggggagcagtgggtgggcgagtcattttcctcttcagaaaactgtgttgtgcttttggagaacagattctccatctgtatccgaagggacttggtaatggaagcaggctggctgttgaccctgtccattcctggggcacattcacaaccccaa

SEQ ID NO: 55488 - DNA, 3467 bp, Homo sapiens
gccggaaagcaggatggagccatagaagcaattctcgcgagaagtagagttgcggttccctcgggagaggggcggaggctcagaggtgcaccacgtggggtttgctgccggagcggagtctccggccggcgtccagtttgagtctaggttggagttggaaccgtggagatgcggaaggaaaccccaccccccctagtgcccccggcggcccgggagtggaatcttcccccaaatgcgcccgcctgcatggaacggcagttggaggctgcgcggtaccggtccggtgagccgagatcccgggcctgggagctcccttaccccggcccagggcgcccctccccggagactgaccctcccagcccatccccgccctgcatgttatcctgaccctgggtcgcgtcaccgagctgtccccagccctgccccgcgttcctgagctcagatccagacccggccggaacgctgttctgtgcggtctccatggaggcgaacccttctacccttcacgcgctgacagcttgtaccccccgtagatggggcgcttctcctcggggcctccagcctgagtgggcgctgctgggccggctccctctggctttttaaggacccctgtgccgcccccaacgaaggcttctgctccgccggagtccaaacggaggctggagtggctgacctcacttgggttggggagagaggtattctagtggcctccgattcaggtgagtcactatcccattatccacccccacccccgggtggaacggtagaatggagacttggggtaccgtagggttgagctcaatatctaacgtcctatactcagtgcttggaggagcctgagagtgttggccccgaatgcaaactcttgtgtaggtgggaaataccttttctaaaattctaaattgtctggtgagatttcctagaaaaatccgtaacaaaattaagcaacggattggaaccatttttcttctgtgtaacctgccccttaacccccacagcccagaccaagcataatcttgattttaagatgacattgaagccaatctgtgctacatgtctcttcccatttcttaccgctttcttgtcttcattctgctttctttttgttgactgttaggcttagcgatgcaggctttggctttttttttttttaaaatcagaatttggaagttggccggcattgcatggaagtttaaagtcccagtttttgatagatttaacctctctgacagttgagcttgaacactacataatcaagacaacttttggcggattctctatacttaaccagtcactgtgcaagacgttcaattattcaacatatttttaaagactctgcaagacatttattcaactagttcagcaaatacttactagtgtccaaatattggggaagtgttaacatcactggatagtgtgctgcttaaacagttgtggaaacttcatccttgtccccttgcagctcattttccatattctctcactaaaagcagataatgaattttacagactgttccatctttgtctttttctggaagctttctgcacctacttgtctgggctgtcattaggaaaacagtaacgcagaataaagtcaaagactcagaaattagctgaactctccaatgatgtggactttgcttttacaggaataactaacttactttgttaatttagtgacaatggctctttgaatcctagaagtgaattactgccttggtataatccaagctcatgttttccttaccctacccccaacaggtgctgttgaattgtgggaactagatgagaatgagacacttattgtcagcaagttctgcaagtatgagcatgatgacattgtgtctacagtcagtgtcttgagctctggcacacaagctgtcagtggtagcaaagacatctggtgggtccctgttctcattgctcctgtctctaagcctcctgtgggtgcctttcctatcctgttaacctcattaggtaacattttgggcttattctaagaatccagtgacttattttagcatgtctataaggtttccttagggattttgcagtccatcgtaagtagaccatagcagcagtccaagaggcaaagacttggggaatgttgattacaggaagttcttgtttgaacacgtttttatgttgatagtgtaggtcaagattaaatgtctgtttgcttttgcttcttagcatcaaggtttgggaccttgctcagcaggtggtactgagttcataccgaggtgagtattctttcatttttagccctggtgttagctgttgtgtttttggactttttgaactttgctttgatgttaggagcagcaattccatgttctgatagttttcttgtaaaacaatagtcaggctccggtatctactccttgtccttttctcaatttccttgtttctttctttctttttttttaattcgactagtcaagtgcagtagtgaaaagggaggaaagaatagaacaaggagtttaatctgtaactgactgaacaatcaactgagataactcactaccttcagaccagccagtttccctgtttctattgatggcctcaccaccttggcaacacagggctcaaactcggtccttttccacctcttctgttttcccaccatcggttggccactaagttctttttagtcttttccactggtcagtcaccttcctgtccatttctatgcccgtattcactttcaggctttaccttacacaggcagtggcactcatctctccactagcaatctagctcttttggtcttttattagtttcttgtggcctgtggattaaaatcccattttcttgtcatggcattgaagcccttttactccatttcctctcttcaagcttactagatccttgacattcttgagggataaatcttgagacttttaaatcttgaacttttgagtatttaccttcataaaatgtctgttttctggtgagaaccattacttttttaatgcccctctttctgctcactttcattaacagcactagtagttaactttatcttgggagccattctttgtgaagataatgtctagagccttaatgtgtacatggttccaaggtttagatgctgggggatcactgtggttctctcaatggctaagtgcctttccctgccatttctaacttcaaagtacatgactaagttataggccagagaaatcactgactcatatccaaggtccagtatcctggaccctcagggtcacttggaaatagttttacaataatgttgaatgcccagctgtgcgcagtggcttaacgcctgtaatcccagcactttgggaggctgaggcgggtggatcatatgaagtctaggagtcagagactagtctggccaacatgccgaaaccttgactctaccaaaaagtacaaaaattagccaggcgtagtggtgcacatctgtaatcccagctacttgggaggctgaggcccgagaagtg

SEQ ID NO: 55489 - DNA, 2291 bp, Homo sapiens
agcctgggaggtggaggttgcagtgagctgagatcatgccactgtgctcccgcctgggtgatagggcaagattctgtctcaaaaaaataaataaaataagcagagagaccaggttttgtattgttaaactaagcaagaggtgataaggacttgaactaaggtagctagttagggagacttgtcagcctaagcataccatttagtgctatgatttaaatcagtgcttcttagcctggggtggtttgcctgcaggtgacatttagcaatgtctggagatatttttcagtgttaccataggatgggtcggggagggaggggctactggtacctattgtataaaggccacaaagatactgccagacattctacaatgcacagaacaacctcttacaacaaagaaatatccagttcaaacgtcggtagtgctgaattgagaaaccttgatgtaaatgaaggaatctcaagcatgattctcagatttcaaaacctggtggggtagctaatatatttggaggcagaaataatattcaaaagataagcattgtaccaaaataaatgaaataatgtaaattcttatattacaaggagatagaagttgagagattggaggaatggagggtaggaagtgggacagaaatacactgaaaacttgaaggagactaaatgacagcagatataaagggactagattttatttcatcagaagcttaaggagacatcagtatgctgtaactgttaaaagtgtagtcttaagctgctttaatacaagaatagtttccaaatccactgttgataatagttcaattgttcaagctcagtactggcaatagtaagttctcaataagtatttgtaggatgaataaattggccagactatacttaaagtattatattcagttctgtatacctcattaaaaaaaaaaaaaaaagataaaaccagagaagtccttacgggcaatcaggattgtgagggaacagatgtttgacccaggtacatgtgtgttatcttacatagaaaagcaaaattagaactaagaatggattgaggttccaagaatgtatgtatcatctcaattcaaagatgaacataattagagctacccagtactgaaaaagtctgttacatatagtgtttagcactctcatcaaagagagtattcaaaaaggtccaggagcttacaacatatcaggcatataatagctaaccacttacgtagaacttttccatgtgccaggcatcattctaagcacgtcacatatattaactcaattaatcctctcaacaaccatataaggtattatcttctatttccattttactgagagaaatctgagattacaaaagcttaagttctttactcaaagtcaaggagcaggtctaggatttgaactcaagatgcctatctgaccgccacgtccacattcttacatatttcagtgctaatgatagacatacaaagtgctagacagatgatctgcaaggctgatagaagggattccagtattgggtagaaggttaaatgtctgtgattaattctttgctgttgtcacagctgattactggaccctaaccttcccattcccagtccattctctttccattatgagagttagaaaactgcctcaattatcaaccctatttattgtttctgctcattattcatacactgtattctccttaaagaaacaggctttacatttgtacaattactacctgtagggtattgcaggcaacaaggacctttcatacagggcagccacaccttgtccctgtaccacctcttcctgaatacggaggaaaagttcgttatggactgatccctgaggaattcttccagtttctttatcctaaaactggtgtaacaggtgagcatttttgcctagtctctggtaatatgttttgatggcaccactaaaatcaagttaggtgggttttcttctttggtttttgttgttgttgttgttgttgttgttgttgttttttgagacagggtattactctatcacccaggatggagtgatagatcacagctcactgcagcctccacctccccaggctcaggtcatcctcccacctcagcctcccgagtagctgggacttggcgtgcacccggctcatttttctatttttttgtagagacgggctttcaccatgtagcccaggctggtctccaactcctgggcttgtgggatccacccatcttggcctcccaaagtgctgggattacaggcttgagccacccgcctgcagccgcaagtcagctatttttaaaaggaaattgtaacaattg

SEQ ID NO: 55490 - DNA, 2653 bp, Homo sapiens
ttgtaattaggtgctacaggaattgagaatcctaatatttattcatccttttatatacatatcactttgtagttgttttttgcttgtttcttgtgtaaattttatccggtctagtgtcccattcgataaatagtatattttgctggacaaattacttcagaaagttatctgacatctttgtagaatagtttaatttactgtgcggggtattgtgcttaacattatttctcaaatttatcagactgaagaaggtactgtccccattttacaaataaggaactaaattcagagattatttagattgctcagtttctttaaaattgtagagtcagtatacagatttccctgagtccatatctttgttctttcaactctaccatactgcttcccaatccagtgttttgtctttgaatctaattaagtcattactttgccttcagctaatcaaatatagaagtacctttctatcttccctcttttaggcatagcatatcccttcataaaataactctttcttcttttaggaccctatgtactcggaactgggcttatcttgtacgctttatccaaagaaatatatgtgattagcgcagagaccttcactgccctatcagtactaggtgtaatggtctatggaattaaaaaatatggtccctttgttgcagactttgctgataaactcaatgaggtaagaaccataaactttatttcctattttagactagcagaaacatgaaggtcatctagtgatatttttgatatgagtgttaggggagcaacatatagaaatgaatctaatgcttcaaataagtgttaacgttagttactaatttgagataatttttttatatctactaaacactttagcttttctatagtttaatcattcaaaagatattctatagttattatgggcaattctttttaaggatttgtgcgtttctttctatgtttctttgtgggtgtttttacaaatgagatatacaactttgaagaagcatgaaatgaatctcctttttttaccctttgtgctttcactgatctttgttgttgctatcacaattgtagcaaaaacttgcccaactagaagaggcgaagcaggcttccatccaacacatccagaatgcaattgatacggagaagtcacaacaggcactggttcagaagcgccattacctttttgatgtgcaaagggtaggtttcagaagtttctaggaagaatgaagttacttgttgtgtgcatttttttaattcagaattttttatgaagaatggttaaatagattgaacgtattttatttagaaaagagaagatttgtgtaggagttggcattcacggctattcaaacatttaagaactgtcaagtggaaaaatagttcaaattattataaaattagaatctatagaagctattaaaaaaaattttggatccacacaaaatgaaatagtcattaagttaaagctgatttaaaaatggcatgcactgtgtaaggaagactaggtaaaatacatcctgtgtatttcatacacacttgctgcaagaacatcttaacatctttgctgtaaggaaatctgatactgtacattctaaatccacaaagcaggcagggcacagtggctcacacctgtaatcctaggacttgaggagggtgaggcagcaggactgcttgcacccaggaggtcaaggctggagttagctgtgatcccaccactgcacttcagcctaggcaacagagcaagactctctcaaacacacacacacacacacacacacacacaaacaacaaattcagatagcagtagagctttttatcatggtcagaacatgattagattctaaaatatgcagcttccaaaacaatctttaggaatatgttcaagtattttgttattactgtttttattttgagccttgtactttatggctaatatttaaaagtgaggtgctgttatgttgaagttttatattaaaatgaaatgaaaaatgagatgctaaggtagagtaagcatctgaaatagttaggatcttggccaatatttctcaatattggccaagatactaagcatctgaaatgtttaggatcttggccaatgtggtcttggtaccacatggattagagttatctttggtgttaatttttttgtccctttccaagacttatggaatcagaacctttcttaggggctatccagaatctgtattattttaaacaagatccctaaagactcttaagcacatggatatttgaaaatctcagaaaatgttaattccatgtatatttaggttacaaagggagaatgcttcctgcttcttgcatagtatatacacacacgtgaatgcatgcatacatatattttggcttttttaaaaaaccatattggaaaatgtagctttttcctaagagtcaaatgatagtaatttaggtttttatttatttacatttacttgatagatatttattgagttcttcctgtgtagatattctgatcaaggcagagtgctgaaaatatagtggagaacaaaaagcttctgccttcatggagtcttattttctagccagcctttgggagaagcacagaaaataaataattgaacagatgcaaatgtcaacaggtaataaatgccagatagaaaaataaactagtattaaa

SEQ ID NO: 55491 - DNA, 2643 bp, Homo sapiens
aaaaaatgaattatagaataccagtatagtggaatccagtgtaacttaaaattgaggtaggtttgtgtgtcataattaataaaagtgatgtgtatatgcctatattttgatgggtatacctatatttttattaaatatttctgggagggaatacaagaaatacaggaagttaatggcctatgggggaggctgaaggagacttatttcatacagcatcacttttaaatatgtttttgccatatgctgttataatttctaggtacatattacctattaaataaaagaatttcacgtaaaatacaaaagaagtgggcattctcactggcagaatcttcagagtagaagtattccttcaagtatacaaacaatatttatcatttcttaattttgccccagaataacattgctatggctttggaagttacttaccgggaacgactgtatagagtatataaggaagtaaagaatcgcctggactatcatatatctgtgcagaacatgatgcgtcgaaaggaacaagaacacatgataaattgggtggagaagcacgtggtgcaaagcatctccacacagcaggtacacaacatttttgtaggttctgatgttgtactggtatctcttaacaagtatctgctgatgttttgttaaggtaggaatagctggcaaggagtctttagcctagaagtagcagtgtaaccccggtttgtttttctggatagtgataagcaggaagatgctgcatacctgtcaggatggcttttctctttccttaaatttgggtaacattaactgatatatttaatttctctataaaatagactgggctgggcacggtggctcacacctgtaatcccaacactttggaagggcgaggcaggaggatcacttgaggccaggagttcaagaccaacctgggcaacatagcgagatcctgtctctacaaaaaatttaaaaagtagctgggtgcggtgacaaacgcctgtagttcagctactcaggaggctgaggtgacaggatctcttgagcccaggaagcataggctgtagtgagctgtgattgcagtattgcactccagcctgggtgagagagcgagaccctgcctcaaaaaataaataaaagactgaacaaggctatttctaagccccttccattttctaattccatgacattccatttcttcttttcacctgcataacttgtctgttttgaacggaaatgttttctatttgcttaaactgaattaattttttttcatttatatttttgctttaatatgacttgattttttttttctttctcgagtttataacatttaagtatttctggttgttttcagcataacctatacaggattagaaaaacagtgtctatcaaagttttttttttttttttgataaacttttacataaaagtaatatatatgcttacttaagaaacttagaaaatacaaaagaagtctagaaaagagattaaaaattattttcattcttaacatttatatattactaatatttgttgaattggtctttttcaagcaactgttggttgtacaagccaacatcagtggcagatggttacaggaatatctggcctcaaattctatacaggtttcacccataaaggctgtgagccagggaattttaactaaccccctggatttgcttaaaataaattatatctcctctgtgttaattaattttacttctaaacctgtctagtagctgtatagtgttaagccagtaatcatcttgaggttctggtctggtaggaggtgtcttttagaataatggtgtttatactctatacttttctatgttttggaaaggtctaaccagatttctctttccttatcacaggaaaaggagacaattgccaagtgcattgcggacctaaagctgctggcaaagaaggctcaagcacagccagttatgtaaatgtatctatcccaattgagacagctagaaacagttgactgactaaatggaaactagtctatttgacaaagtctttctgtgttggtgtctactgaagttatagtttacccttcctaaaaatgaaaagtttgtttcatatagtgagagaacgaaatctctatcggccagtcagatgtttctcatccttcttgctctgcctttgagttgttccgtgatcacttctgaataagcagtttgcctttataaaaacttgctgcctgactaaagattaacaggttatagtttaaatttgtaattaattctaccatcttgcaataaagtgacaattgaatgaaacagggtttttcaagttgtataattctctgaaatactcagcttttgtcatatgggtaaaaattaaagatgtcattgaactactgtcttgtttatgagaccattcagtggtgaactgtttctggctgataggttatgagatatgtaaagctttctagtactcttaaaataactaaatggagtattatatatcaattcatatcattgactttattattttagtagtatgcctatagaaaatattatggactcagagtgtcataaaatcactcttaagaatccatgcagcaggccaggcacagtggctcacacctgtaatgcctgcactttggaaggccgagacaggcggatcacttgaggtcaggagtttgaaacc

SEQ ID NO: 55492 - DNA, 1036 bp, Homo sapiens
tcttgaaataccgctgtttccttctgtggctcctcttcctccttcttgccctttggttgtatctttgatcattgtctaatcttttatccccccttgtttttgctgccaccttcctaaatatctcccaaatccatatatatctcttcatctctagtgctaccatcctagtccacattactattaccctcctcaactgtatcactgcagtaatctctcagccggtctattcatatctattctggctaacttccaatctgtttgctccagttttagtgattgttccgtaatgcaaacctgatcatgtcacccttgcttaaatatctttagtacagataaacccacttctcttaaagacaaaagttgtgacggactggccccttcctgcctattcaacctcatcctcatcatgctccaccctctgcccacaacccagtgccacctcacatacttcctctttcagcttttgtcaaactagtcttttttttttttgcccttcaacttcctaccttccttctggcacaggatttttaaatgttctgttccctctgaactttcccttcctcttgttctagtggaactgcaactcacatttcagatttcagcttaagtgttgggtcattttgttatgttttttggctctaggaaggcttccctggtcctcttcccctctgttgtaggcatccatggcacagggtcctgatccttcacagcacacttaacaatcacaatttaccatttctttgtgtggtaagggcctcctttactagtctgaaagttccatgaaggcagcccctcacgctcgtcataatatccttaaagcttagaatggtacacagcacatagtaaatgttcaataaatgttttggagtaagtgaatgaagaaatgaattatctcagcaactgaggttcaaaaacttgaagtaatcattgactcatcctactgttttattcccaatatccaggtcccaagttatatgtcctccaattttatgatccctgtggtttcagcctatacccttactacacaatacccaga

SEQ ID NO: 55493 - DNA, 1326 bp, Homo sapiens
cggcttggtaagagtatctcttgcccccttaatcaggaagttaaggacggtgtcttcagccgagttgtgtaatttactgctacggggagaagatgagaggaagacatttgtgcctacaaaatgggatctcctcttagggctgagaaccagagtttagggaacctttgacctcttggaaaaagaactgccattgaggagtaatgcattctgttttgggagggaaaatcattttgttacttctttgaagggaggaggtataagaaatgaaatagaataatagagcagaaggtcaatgagccacagccctacaggtagccagccactcttcttaggtggcggatgatgtttttgttttgattacagtaagaataaagtatcagctcttagatttaacttggggctcctaccttcaaaagcatgaagggccgtctcagaagagatgctgctggaaacaggatttggaaactttctttgggtttcctgtcagaatgtgtgggggtggacatgcctatgtgtagtttttctttccttgtgatgtaatttatttctgtgatactttgacataataagcattaaattaggccccagactttctgtctttattatgctttcctataacattgttgttttgaaatcatatagttcgatattcttttgtagcgtgatatttcagtgaatcctgtctagttttcttggtgttttaaattatggcctacttcagatacgattagctgttaggtattgaggatcatacgtgttaagtatttgttgaatgaattgaatgattacaaagatgagtctagttattaaatcttctgtccttttgagaggtaccctatattaggatactgcagtccatttccagtttgtaagatagtaattcttaaccttttctaggccactgacacctttgagaatatgatgaaatatataaactctctccccagaataaagttaataggcatttattcacaaaattttgcattagttttagggaccctctgaggccaaccatgaacttatgtcttagaagtgaactggatggaatccctcagtgttacacagttccatattaaaacagctcaaaagcctttgttcactttttgtatggcttcaagaaggacagtatctacacttaatataccccagaagacaggtatattcatatacgttgttcctgtagtccttctgaaaatgaatcccaaggaaatattccaaaagaaagaaaatgttgtatatgcacatgttcatttaattattttaatagatgggaagaaaaggaaactacttgcccaacagcagaaagatacacaattttgcaatcac

SEQ ID NO: 55494 - DNA, 1054 bp, Homo sapiens
ctgaggtgtctgcacttaatgtcctctctgcctgtaacctttttccccaaggcagtatatatccctcacttcttcaggtctctgcaccagtctcaggtcttcccttactacccttccctgccactgtttctatcctctcaccctaccttatactcttaagactaggttatactgattttgacagccacagttgttgacaaacattccatggtaatgtcgcttgtatacttgcattggacattattgtttaacatttaaaaaataatgtcagtcataaaaagataactttcagattgttaagttgaatttttcaatagctcacatttaaattttggatgttagcttacctctcttcaacatttaactacaggatgctaattgttggatacagagatgaattagacagggtctctgccctcagggagtttcacagtctgtcattgtttgtattgtaatagttaagttactccagatcttgccagtgtttagttttacccatgaactttagtgtatggttgatgatattttatataaaatagggattagacatccagattttcatgttggtaattgttttttttccttacaaagggatatgtttaaaaattaaattttttttgagacggagtcttgctctgtcatccagcctggtgtgcagtggtgcaatcttggctcactgcaacctctgcctcctgggttcaagcgattctcctgtctcagcctccccagtagctgggataacaggtacccaccaccacgcccagataattttttttttttttaatcgttagtagagacgaggtttccccatgttggccaggctgatctcaaactcctgacctcaagtgatccagccaccttggcctccaaaagtgttgggattacaggtgtgagctactgtggctggcaacaaaggaatttttaatggtatctgtaatttgtttaatttctgttttgtatgatgcttttagaatattatagctgtgaccgccccatgttttgttctttgagacagagtcttgctctgtcacccaggctggagtacagtgatgtg

SEQ ID NO: 55495 - DNA, 1050 bp, Homo sapiens
tagctcatttacattttgaaacttttgtaatagtggtatagatttgcactgcataattcacattctctcagtctcctgcacacagttgtgagatgactggttaagagggcactttgtttcaaagttaaatgatccagatgagtattgaacctataagcttagctttgttcattatcatgaggttctgatcaacaaagcagttcaacagagaaccatgccatgctgtcatttctgcttgaaaataagccttttagaggtagaaggtacaaacatgcatatacacatgcaccaataaaaaaaggaaattgtgtatggttattaaggtagagttgaaacaggaaataacgtgcgtttataagtggtttaaaaataattcttttaataaaattttcagaaatacttgatatacgcatggaaaattaaatgttttatgaaataaactccaatcagtagacaagttaatggcttttttaaaagcactaatgacttatttacttaggctatataaatttaggttagataaatctgaaaaaaaaattctttataaatcactcaaattttcccagtgtttcttacctctaacctatttagtttacactggtagagtggttcaaagtgttaaagttaaccaaatttaaaattaaatgtgtaatcatatgttttagtgtccgaatgtatttaaattaggccatatttcataagaatagcagtatattaaactaaaaaagctaataaaagatactattgggttaattaaaacttgaagtgccttaccttgaacacctaggtgtatacgcctataacatgttactccttcacggttttttgcagtgcagtgctgtacccacttattctggaggtaaaagataattttgttcatgataggactgtggttagctgtctttcgttttttaactgttttcttttttttttgttttgtttttgtctttagaaaagacaaaactataaaaagaggcacaaagaactgaatacaactatttggacatatcccaaatgcagtttatatgactctaagttagtagtggaaat

SEQ ID NO: 55496 - DNA, 1019 bp, Homo sapiens
aaaagacccttgtcatcacaaggctaggaaaagcctggtagatgaggttgatagggaacagctcactggatatcattatttctctttatgggtaaatatatgcaacttgtgaatttgaagatggtgttactaataatactcatttaaatctgtagggtaaccagtagtttttctagacatacagaatcactaattcctggtccataaattatgtttttcccagggatctgcagagataggaaggaattatgattagtattacaaaaagtcaaatgaaaattgtgcatttaccctaaatagacttatacagataaaatattatgtatcttttctttgaccagtgattatattgactcaaatcattatcatacattgtagcgatttgcagattgttaaggaaataaaatattgtacttatcccttcaagatcctagcactgggttttgttagtttttaagtctttggcaatttgagaattttgattagcttttacttatgtgattaataagatgtcattgcagttggtagacaaagatctttaaacacgtgaaatccatggaatagaataaagtttttttatagaaaggttgggagccattgattaatgtcctatctgtaatggacctacagggagaagggaactcatatgtttttgagtgtagaccccttacatcctatttaatttgcacagtaaatctacaaagtagatattgttattgtccagtttttttacaggtgatgaaactcaaagtaattatgtaatttgtgaaaatttacacagctctaattatagagaatcacgtgggtagtaaacttccagaagaagggacttttgcaatacaaagcagaaaataggtgatcaatacatatttgtatcttgcttaaatgtaaacatgaatgaatgagtaaatgacaggagactgcctctgtccctatactgttttcagtgagtcacaccatttttctcctaaatgagtctagaaaatttcttcagaaataaagtgacttaacctgtcttt

SEQ ID NO: 55497 - DNA, 1051 bp, Homo sapiens
agggtgctgtggcagggtcacggcttatccactcaggtgattcccccaccttagcctcctgagtagctgggactacaggcgcatgccaacatgcctggctaactttttgtattttttgtagagacagtgctttgctgtgttgcccagaatggtcttgaactcttgggctcaagccattcacccacctttgccccccaaagttctgggattataggtgtgagccaccgtaccctgtgttttctatttttttcattcctttatttgcctactctggtattggaccagatgttaattacttttgtatcaggaaatataacatgttctaataagtaggcagataagtcacagttgaattttggctaggtgttggtttttatcttttttttttttaagacaagtatatgtattttaagtagtctagaataatacagatttttgaggacttttaggtccaggcagtaattcagaactctaaaggcacatcaaagttgcatagtgaacaaacaagctattgagctgtgagctttctgggaatacttggaaccataacatttctgtcaaatatgccttttaatctttggtttattgattgaagtattttggactctttctgctatcaaggttttattctttttaaaggagatacactatcttttttacatttctggtaatgtgtttagtttaggtacatcatactgtgttgtttctgcttatttctgtagttctctacttataccttcagagttatacatagattttcctgaggtttattaatctaatatagctcaaaatatcagaatagatgttatagtaggtaacacttttctgaattagaatccgattttttaagagtctggtgttttggctggatttatgtaggtttctttatgagaaaacagtaaacattgcagaagaattacactttgctttttaaagtagaaatgtgtttagtttctaaaaatgctaatttttttctgagactattctttctttaaatgtagccactcacagcattgttaaaatttttaaatgttgattctgatactatata

SEQ ID NO: 55498 - DNA, 1035 bp, Homo sapiens
accaaaagaaggaggaatactagacatgcacaaataaaagatatccacttcgccaactcttgatatctcacatagatggtcagctggtaaaactaacatggatcagagccagattatgtagaatgttacaaggcctgataatgagcttgggccttattctctagaataatgaaactttttttggggaagggggagggtcatagatctctttgaaattttgaaattttggggccacatattgggccctcttctctcctagaagattatgcttatgctttaaaaaagatttgtttttgttttgttttgtataacatttcaagagtttgttttacctcttgaagtatatccatagttggtgggaaaaggagctagtctcaacctgaaaaacaatcagaatattatatctctctcagcttctgatatttgcactgctgattctccttaatctctttgatttctcttggaggaatttggttaagagatgatgagggtcttattaacacagtgtggaaatagggataaaaataatttgcaatttaaagaattatttaggaaacaatatgcagaactagctcgactgttgattatatatggggagtacagtcaagtatgacttataggtttttagcttgtaggaattgcaggggaaatatatagggcaggtagaaaggttgaccttaaatgtgagaagggacagcctcatcctttgagtgggactttaggaaaaaagatcatagtaactggacttaagtttatcaagaaggaaggtaatgagagaggaagtggagtagagattggtaaaaggattgatgtgcagtactgagggtccaggtgagatttcagaccaggaatttgaagtagtgacatcagttatataataatattttctccaccaatgaagagaaagtttaagattcactaacagttgatgtgtactggctgatttgcgggtgaaacaacaggaatacatggaatagaggaatctgagcaaagactaactcaaagatggtggtgtataacttatagaactcccat

SEQ ID NO: 55499 - DNA, 1045 bp, Homo sapiens
gggtctgtggtttggtgtctatcctctctttattttttagcagtcttttttttctcccaacttgtctcttcgtttggccctgtcttcaaaatgtatgtggaagttaaccaattcttactacctgcactgctactcctttggtcaacattcctatctcttgcattatttcagttgccttccagttcttcctgattctgcccttgaccttctcttttacaaccagagagaccttttaaaaatttcagtggaaacttgacatcctctgctcaaaactgtccagtggcttcccacgcataccaagtaaaagctgaagtccttaccgtggcctaaaagcctgtatttagctctctatttaatatcttaccttctcttctcctaatgacttcctcattgtcctccaattatagtgccctacttgttccttatcgaagtcaccaggcatctcaaggcttttctgcttccctcagatgtctgcccaactctgtcctctaactgcccatcatctttagttgtttactcaaacatcactcttctagattataaacctacatgccatatggactacgatctccccattgctttttgttttctggaacactttaccagctgacttgtttctggcaggagagtgcatgatgcattggagaagatgtaagaaagccagttggctggagtgttgagaatgaagggagcactgttgtgaaataaagccagaatgggagttagggacccaactgtgcagacccttgtaagccatgttaacatctttggtctttatctttaagggaaatgggaaatcactgaagtatctgaactggagggattcggaggaggtcactaagtgattaaatttgtcattttacaaagttcattttagcttcattatgaatatattggagggggaaaagattggatgtagggagatcagatgagaggctattatagggatccaggtgtaagctgatggtagcttatttagtctgttatggttgatggccatacaaaaagaatgattctctgaagtaatgtatttatatacatctgt

SEQ ID NO: 55500 - DNA, 1086 bp, Homo sapiens
aaattgcagaaacaacaaagttgggatcaatttaattcacaaagacaatcaagtcatattatttttgtaaatgttagaagtaggcttcctgaaggaagaatgaagagttagattataacttggaccataatgttagggactcagaattgacttaaaatttaaacatagtgtaatgtttattcctgtcttccatatttgtcagggaatcttaaccagagtaagaaattttctggtgctgtgtcgggagtgcagggcacaagagatttccataaaaaggcatgggatttgcttggaagaacatagaggttttctaacttggcagtaatgagttagaactaattccccttagaaagaaaaattaacttacattcttattgggagttcatttgtgtgtatgctttcttgtgtgacctatttattatatttgtgagtgtacctgtgtgtatacattcgtgacccatggtgtttgttaggtgtaaataaaattttctatacatactctgtgaaaaatggctttggaacttgaatgtcttgccattttagttgaggaacaggggccaaatattttgttgttgcagaatatccaaaataatttgaccatctctgagttctttccctagtttctgttgctgtagaaaagctggaggcatttggggaatataaatgatccatgctatattaggattctgtcttgaaagatacgcatttttggattagagagatgatgaattcacatcttgttaaaatgtcagcgatccccagactggaaagggggtagggatgtaggcatccttttacgtgaaatatatgctcttgtgtttagctgtcagtatttttcttttcatggacatcacttttttttttttcatggaatcacctaatacagatagaggtataagatgcctagtgtcccacacaaaactctcccacctcactctaccttttcaaaaatgtggtggttatttttaaaggctcacccagttcttaccttgcttctctttctcattggttgacctcatccactgctatggtttcaatgctaccatcttgaccaccattgactcccgagtctgtacctctagtcca

SEQ ID NO: 55501 - DNA, 1026 bp, Homo sapiens
atgagtgaatgtttttaaacagtacataagttgtttaaatgatagctttgcaaagaattgggtttatcattgtagtcataaggttatcaactgttggatttaatcatcttgttttctaatcaaagatttttagaagtaatatgaacataattgatgcctagtcaaagatgatcttcggtgaattaaaatatctgaaagtaatcctataaacttatgttaaaatctgtatggattttgccatgtagcttctgttgtccctttgatagtcttacaaggaaaaaaacaaaacaaactcctatgtttgatgcagtagtgtacattattagactgttagcatgtttcttaatctttgatttttttgtttgtttttcagatcgtcagtatttaaacagatcacatcatgcgtgagtacaagctagtggtccttggttcaggaggcgttgggaagtctgctctggtaagttagccacctaactgtaactgattaatataatacaagaagaattttgacatttccttgctttcagacttctagatgccaaagagaaaaggtggcattattatatatctgatatctgtcccacaaaggacaggaaatcatttaataaccacagatgtatatagttttataacattggctcatttattcttatatttaccaaatatttattggctatcttatatgtcaagcaccagtgttgatgatgcagagaggagtaagattgttctctttttaaggaatttacattgtattgggggaaactgattattacagattctagtgggataattcctcacctgcttccaccctagacttagatggaatgaaggtcattttttgtgttcatgctgtttttatttagtacatagttactgagtttctatagtgtcagattctagggtcacaacagtgaatgaaaacagtcatagtttcttatggagcttgcattatagtggaggagatgtaataaatacacaaagaactacttggttctacttgtgagcgagatactctgaaagaaaaat

SEQ ID NO: 55502 - DNA, 1094 bp, Homo sapiens
ctccagggcagaaatttttgcctctcatgatcactaacatatccatagggctacaactatgtcagtggatatttgttgtgaatggatgaaacttgtagaatgtccttaagaaggaggttggcattctcaataggagggaacaccaaccacagcagttctgtaaggacttttcttaaactggattttcagaactcaggttgcctgtatgtttattcttttgatttaataagaagcagagaccatgatctctagagaacatcatagaaatagtgttgctagtatttgtagcacttaacatttgtaagtaaactcatttattatataaacatttggacagtggcagaatttaattggttaccatagtggtgcaattctggaatatgcaaactttatcaatgaaaaatccaggaaacttccagtttttacatctttcccagaaaatacactggcagcagtataggaagctcagccatgttcctgtggcacaccttagacgaatttgaagctggggaaatggctgagtggtagcatagctaactccctggaatacaagaaagagtacatcagccagggtagaacaaccagaactattttagatgtagtagacaaaatagaggtagtggtcatggggaacaaggaagccaaggcacaacaagcttaagaaactttgtggatttatcttttacgtttaatgcatccagaggtaaaaagatccaaactgtatagttatttaatataaagacccaagacatacacatttttaatattctgccatatgtgctttttaagtaatatatatatataataccaaaacttttctaaaagaagattttgtcttatattaacctccatagttacaacataaagtaatgattgtcaccaaataaaaggaagtttaaaattaagtaattttaatttggcatgactaaagctcagtaactaaatgttaaccattagtaaatttaactaaaggggatagatagtcattgcactattctcacatcttttctaaaggtttggaatgagggggaaaatgaaaatacatgaacaagctcttttttttttttttccgagacagagtttcactcttgttg

SEQ ID NO: 55503 - DNA, 2143 bp, Homo sapiens
attgcccctgaccattaacaagctcttataaagagtttattgactgtcaagatgataaaaatattgctatgccatgggaatagaaaaagaaagatgataaaatctgccagtagagatattgattctggatgatgaagtcatagtttagtattgggcttatacctcagattgttagcacttgggcagtagttgtgtcataaatttgcaaataaaattatttaggatcaaaagatctgtttctaaaaaattatatacagctctaaatcacacaaaagcaaattaaagtggttaagaattcctttttaattctagtttactgtcattgtttctagtcacctcagttgctagaaacttgtgttatgtcttgttttctgtcaggatagcaagtaataaaaaatgttactcacttgtaattatgctgttttaaattgttgcagtatacattcaagaaatttatatatttataattgcatattttttaaatcataggagcaatttacagcaatgagggatttgtatatgaagaacggccaaggttttgcactagtatattctattacagctcagtccacgtttaacgacttacaggacctgagggaacagattttacgggttaaggacacggaagatgtaagtattttttctctctgtaagatgttatgccatctctctgtggccaaataaaaaagtgcctgttttctctattagtagaggatttggaagctatctaccacatgcctgaaagagcccctgtgaccaaaagaaaaaaatttaactttcaaaattaacctcaaaattatgtggtgagatgtttagaaaatgaggacatatgtgataaagtactcattgtgctataggttaaaaagtgcagtagaggaaaaagaggagccaaagaatacttcatagaagtgggacctgagttgagctttgaaaggtgatggttgtgtcagaaacagtgttcaaagaacattattaagatccatagtggtgtgtttttatttctaaaattccattggtataattcacacatcacagtctacctcccgggctcaagtgatcttcccacctcaaccccctgagtagttgggactacaggtgtgtgccaccctgcctggctgattgtttttgaattttttagtagagaccaggtctcactatgttacccaggcttgtctcaggctcctgagctcaagcagtcctcctacctcagcctccctgggattacaggcatgaaccattgtgcctggccaggattatattcttaaaataatttggcatatctatgtagtaggatctcttccattttttttttttttttgtctcttccttcttccttcgcctcttcccctcaacatatacttttcgttagtatttgatgaagcttgcggtcccaactaatgcatttcagttggtggcagataattgcttatttatttttttaaaaggctaagtaatgagtatgttattgttcattttacgtttttttcttcccacaggttccaatgattttggttggcaataaatgtgacctggaagatgagcgagtagttggcaaagagcagggccagaatttagcaagacagtggtgtaactgtgcctttttagaatcttctgcaaagtcaaagatcaatgttaatgaggtaacctacaactgctgggcagcacaaacaagtgcctttttagtttgctttaagttaacagccagacttttaagaaaaaatttttatcttttaagcaatcttgattccataattttataggaaacactaagtaattcctggaaactatattttttagcttgcataaggtcactttgatggctgtatgaggatacttaaatttaccttattgtaaaagaggaagctaaaattgaagaatgtgtgtaaaatcctgctaagcctctaagtgatatgcgataaagtggtgtgtaaaaattgttacatcaccttatattgtaataattatttacccaaatgtatataaataggttgtaaagtcaagttggaaaataatatgtttttatggatatcacagaattgtgttctgagtcttacctcacctttggtgcatgactcataagtgggtaatctgtgtgggtatggacatgtacctggaattcactcagtcctttaggcctgataca

SEQ ID NO: 55504 - DNA, 1052 bp, Homo sapiens
cttatagactatttgacttttaaaaatgaccaggttactttaaacacctggcaggtaaaaaaaaattaagcttgcttcaacttctgtattttacagataatcaagaatgccaaagcttgtttttttatgtgaaaccatttttaacaagtacataaaaacaagaaatttataaattgtatttattcagcaaatatttattgactattgtgtgtctggcactgtgtcaggccctcaggtaacagtcactcagacagacactattcctgccctgaagaagtttgcatcctactgggggaacaagtctttcagcaataattaaagaaaaaaagtgattttgataaagaatttgttagaaattgtgaatatgtttggctagcagaacagtgacatgaggtcactatctacaagataattggccttacgggatgtggttccttgctgtccttgtccttacctccatgggacccaccaaccaagttcatcagactccaggctccggtggggctgggttgggcctgagtccagtgcataggacttctccctttgggagccagaggacagtacactacatgtttgtgagaacctacatgctattaaacttcctctggattagtttccaatgcagcagagatactttttcatagcagtcttgttaaagcagagagtttataaacgagggtttataaaaacaaacatagaaaaaccataaaatgaaatgcattagccatctcaagaatctttactttttggaaaacatacaaactttatgctcagttcttgagagtggggagaatggagcagataatttgagtttcttttaatatttttctctttataacccaataatccagctacaggatttctttggtagttaatagttcctcacacaacttttgccttgtaaatttttttgtgagttttgaatgcctgaagtatagagagatactttcaaaaattcacctcttggccttaaatttgaaaacagacaccaggacatactgcttggctaaagagccccctaattcattcatatatatatatatataattttt

SEQ ID NO: 55505 - DNA, 1091 bp, Homo sapiens
tcaaggattagcagactttttctactttttacgtttaaccaaaattaacatcaaaaaaaggcaaacaaaaatcatgcgcctccgcatgtgataccttgaaagggagacagtatctcttttgtcctattttagacaaaaatgtatataacctgaatctaatcacgagaaaacctcagataaacccaaatcaagggaagttactagcctttatttttcagaaatgacaatgtcctgaaaggcaaaggccaaagaactgttccagatttttaaaaactaaagtgagaggaaataaactgcaatgtgtgatcctgaatggatcctgtccttggaggggaaagttactataaagtacattattggggcagttgacaaaattggaatttgctctgtagttatacaaaataatgtgtcaatccttaaatgtctcaagtgcaataactataacgtgtttatgtaagagaatatccttgttcttaggaacaacttaactgttaaaggacttaatagttaaggtctactctcagatgattcagaaagtgtgtgtgtgtgcacgtgtgtgtgtatgtatgtgtagtaaaagtggcaaaatgttactaattggtgaatctgggaagaatagaaccgaagttgttggtactatttttgcaacttttccgttggtttggagttttcactatttttcactaccagttctttttcttgatttgatgtcgaatatctaggagcaagggcatttccttcattataaataggtaagtcctgctttctaccctgattgaaagtcagcagagccttctaacaaacctgactttaaaagaaagaagcagaatgcagatctaagaccagaatagtacttaccagaattgttttgtggaacaaagtctcaaaaactggtggagtaagtactttttttcttgtttttacttagatattttatgacctggtcagacagataaataggaaaacaccagtggaaaagaagaagcctaaaaagaaatcatgtctgctgctctaggcccatagtcagcagcagctctgagccaggtaagatgctaaaagcagaacaagtgcctttctcatgctcctatttt

SEQ ID NO: 55506 - DNA, 1010 bp, Homo sapiens
atcccaagctctggaagaagaaggcatatcccaagctcggcctctgactcttcttccttgggtgatggcatcccctggggtcagtctggaaaggctgttttgctggctcctctcttagtcaagaaccagctaacgctcctgccccaccactgtcctggccctcccaggttcccacaactcctccttcgcttctcatccctctcccagctgccttcttgcccttcagtgtcggcaccctggatgtggctgggctgactgaacgtggctgggagtgggcaggagggtgccaagacttcccttccttccctccccagcccctgcatggggcaggagtggggagggaaaaaacaggaccttctccttgtgcttctccttgattagaccagatataaggaatggaaccctgtcattactatgtgctaagtttcaccaaggaagaaatgttgtgaaagtacatgggaagtcttaaactaacagccagaattcacctaatgctttcttggtttcatgcagagatacacattacctcacctaatctgcacaatagctgtatgaggcaggaactgttattcccattttaaagagtggagaaatttggctgggcgcggcagcttacgcctgttagccgagcactttgggaggctgatgtgggaggatggcttgagtccaggagttcgagaccagcctaggcaacatggtgaaaccccatctctacaaaaatacaaaaaagttagctgggcatgctgacctgtgcctgtagtcccagctacttgggaggctgaggtgggaggattgcttgaacccaggaggcggaggttgtggtgagctgagatcatgccattatactccagcctgggcaacacagcaagactgtgtctcaaaaaaaaaaaagcatggagaaattgaaaaacagaatgtaaataacttgcccaggtcacacagctactaatggcagaactgagatttgaactttgttccattgtctccagaaaccaaattattaaccaatg

SEQ ID NO: 55507 - DNA, 1035 bp, Homo sapiens
acctgccacctttcttattccttcacccaccggaattcaggcaaatgttatgcacatacagccccatctctgctttgcccatctctccttccactaggctctctgttgtgtctttgccctcgtctctttttgtctcttttagtttgtctctcttggagtcgactcttctcagtctcacttttctgctctcctctttcttcttactttacagagccaggggcactcaggccacacaacagcaggcctggatctagaaagggccagcttatggctctccagattctgtgacagcgtttcccactgctgcctgcaaaggctacactcttcctgcttgggaaggaacttggcagtgtgttaggggccagctctgggggtagggggcagagtttgaaactgcaggtgttctcactgatgcttcctgaccaagtaaccctgccactcttcctgtcagtcctactccagggtcagcctgctcacatcaacgatcatttctctctctagtcctccctcctggagccctttctgtggtgacactcagatgcaaaagtcactgactcagagataaatttcttgagagacaggagtattcattgcttttcttctgaacttacgccatgtcccttcccatagtcgtttgcacatgcttctcatgccagattgggatggctggccccagcccacacgtacacaattctcatttttttccatttatgtgtgcagtaccagaaagaaagctcaaggtcatcacagataatgtctgaggtccaagacccatgcagagaaaagaatctaatggaatcctcctttttgtgcttcgaattggggactacaccacccacctcaggttctgccttaatggagggtttgtgggtgttcctggcatgggctcgaatttttaaatcctactgatttgcattttttatagcagtctaggtgggaggtggtgaggggaggaagacagagactacgagtgccaggagaataaaaaaggcaaataggaatctgcactgagctgagcttcacatcttgatttgc

SEQ ID NO: 55508 - DNA, 1051 bp, Homo sapiens
cacccccagcaccgaccgcgcgcggctagccgctggggaagcgactctgagtcccgggctcggagcgcaggctcagctccgcgctgcgagcgctacgggcgcaggggcggggagccggcccggagcgcagtttccagtggggccggggtttcacccgggccctctctgtttgaaccgaacccgacaaatgggcgcatgacgatggagagcagggaaatggactgctatctccgtcgcctcaaacaggagctggtaagagcgaagctggcgccggggcagggagggctgctccgccccgacgggcacctggtctccgccccggcccccggggagccgggacgtaagcagggcggaggagggccagggaagagaggagaggacgcgggcccgcaggcagagggcagggcttgtcctcaggaaaggggaccacgaagaaactttgagcaaagatttgtgatgagacaagaacaagtgacagagagacagagggagcaagccagccaggctgaaatgtgacacagagaaccccagagagaagatagggcacgcccagagacggccaggcacacggacgcagtggggcccccgcgccgccgacgcggaaagcgcgagagcgaaggcctggggagcgggacgcgggcgcctgggtgcggggctgcgcggggcgacctggagcgcggggaggaggagggtgctgggtcctgatccctgcgcgggcacgaggtcagcgggactgctcgctcgagggaagcgggtaccaccctgggcccccagctctgccgggcttggcagagctggcgcggctgcgggggcaggcttggccggctgtctgcctgggcttgtctgccagcagggagggggctggcagctggaaaggcgggggagggccctgcgctggaggaggggctctgcctggcaaatcgagagcgggagctgcggaggcccagccagatgtcaggtctgggcttggggagtgcgcagggagcgttcggaggccccgcggtacggggagggggagaagtagctcagtctgggggggtggaaatcaccg

SEQ ID NO: 55509 - DNA, 1043 bp, Homo sapiens
ggtggtggcgaaatttggaattttctatgcgtaccttatttaaatagaataaagctaccatatatgtcaattttgtcactacttggtaatacagacagggattcttcttttacttactgactagattaatgtgagacttaacatttgacttgattcatggtaatgtagtgctctggctattgttggtaactgcagagtttgttttttttttttgagacggtgtcgctttgtcacctaggctggagtgcagtggcggatcattgctcactgcaaccttgaacttctgggctccagtgatcctcccacccatcttcctaagtatttgggactacaggtgtgtgccaccacacctggctagttcttgtattttttgtagagatggggtctccagtgttgcacagaccagccttgaactcctgggttcaagcaatcctcccacctttgcctcccaaagtactgggattacaggcatgagccaccacagccggtatgcaggtggttcttaaagctctgtaaatgtatcatattgatctcccatcttccaggttgtcttagagtgtttctaagattgccttacccaaattagcaggaaatttgagtttggggatcatttctccaacaaaggtttgttgagtccgtattacgtataaacagtgtgccaggcattggggattcaaagatgaattagatgtgattctcatagccttacttggtagtttagttgttatggcagactgtatttcaagttctcaggcattggtatatctgatgatgaatcttcaacagtggtttttaacccagatatccatgttcatcacctgggaagctttttgagtccatcttatgtctaccaaatcctaggtgatgttgcacattggaaatcctcctacttcccaagaacctgagttagtctaattgtagactaagatgtatttgagattttggcttctgacaatttggcagcagataaaatgctgaaatcctggaaaagtttcatcaactcatttttttttgagaccgagtctcactctgttgcccaggct

SEQ ID NO: 55510 - DNA, 1575 bp, Homo sapiens
aagatataaacaaaaatacggtgtaaccatttacatagcatttaaattgtattaggtattataaataatctagagatggtttaaaatatgtgggaggatgtacacaggtaatatacagatatatgcaattttatataacagacttgagcatctgccagttttggtatttgggggcttcctggaaccaatcccctgtggataccaagggataactgtaccttaccttatcaataaaaactcatttgaaatgatcatttaaatgaaatatagtgtgtcatgtaatgaatataccagtcccctatgtatttattcctctgactcaaaggtgtaatttatggtttttttttagattttgatcttggctcctacaagagaaattgctgtacagatacattctgttattacagccattggaataaaaatggaaggcttagagtgtcatgtctttattggagggaccccattatcacaagacaaaaccagacttaaaaagtgtcatattgctgttggatctcctggtaagataacaatgcctgttggtaaccagggcttttaaggaactacacacttttaatataacaataaagatatatgggagtctttgataactgtgataattattttgattagaaatgaagagcaggccgggcgcggtggctcacgcctgtaatcccagcactttgggaggccgaggcgggcggatcacgaggtcaggagatcgagaccatcctggctaacatggtgaaaccccgtctctactaaaaatacaaaaaattagccgggcgtggtagcgggcgcctgtagtcccagctactcgggaggctgaggcaggagaatggcgtgaacccgggaggcggagcttgcagtgagccgagatcgcgccactgcactccagcctgggtgacagagcgagactccatctcaaaaaaaaaaaaaaaaaaaaaagaaatgaagagcattagaccagtgagatttaggtacatgactggtttaccagtggaatttatgaaatctccattcctaagtatgtttgagaagacatgggataggcttttgagaagaggagaaatgcagtgactttcaggaggcccttctaagccatggattgggattattctttggcttctctattatatttggttgcgaatcactcagaatcagcatcttgcattcagtgctttaggtcttttgatagaaatggtgtttatttactggtgatgaaacgtgaggggaaaacaatgagtttagtcaagatcagagctccagatttctaatttgtggtttagtgtgtacatgcataatgagagttgaatcaggaaattcagcagaacaacctgtaagtaataagtagagtaacaatattggctgagatttacacaaatttggtacatcataaatatttcaattttttttttttaattaggcagaattaagcaactcatagaacttgactacttgaacccaggcagtatacgcctctttattcttgatgaagcagataagcttttagaagaaggcagcttccaggagcaaataaagtaagaaaaataactaacttgactattaaaacagtgt

SEQ ID NO: 55511 - DNA, 1449 bp, Homo sapiens
gtttggtgtcagcttaatttttaacctgttggcatgagcttgtttagttatggtatatcacgagatactggggagactattttctaatgaaccaatacttaaactatagatcacactttaacaccaaattataaacagctgattaaagcatttttattttcctaagaattgctagttatacttcatatgtaactttgcaaatagaatgttatatattcaggcatggcctgatcactatttaggattgatttttgaatttcaagttgattgcctaaaccatagtttaaaagattttaactttggatcttaacctagatttgcacagaaggacagaattaactgtggttggtgtattaaaagtgttaagactgggtgttatgctttttactttttgtggattggataaatatgtattagcttagttgtttttatgtgactttcttttggggtccttttaggcaatatgaatcagaatcagcgtcttgatgctatggctaaactgaagcactttcattgcagagtcctcatttccacagatttggtaaatttcctattcagtttgggtgactaatccatcttgacatatgttctattatcagatgtacagatttcatatattattttatgtaggcgtatctaacaagaataccagaagataattatctttccagtgctgaggaaaatactttcttaaaaatgtctttaatatgtttatctttgtccttgaaattagtcattaggaatgaatttccttttcctctgctcctcagtattcagttcttaatttgtctcttgactgtactggaagaatataatatgcattggtatccatgctgtatagttaatgcaaacaaataattgctatcttcttcaattcaagacttctcgtgggattgatgctgagaaggtgaatctggttgtaaatctggatgtaccattggattgggagacatacatgcatcggattgggagagctggccgttttggtaaaaaaaaaaaaaaaagtttgagtgctttctttaaggggagggatctataatgtgacaggtgggctttgaatattatttttgtgaaaatgatttactacctaacattctctctgcttttaggtacattggggctgacagtgacctactgttgccggggagaggaagaaaatatgatgatgagaattgcccagaaatgtaatatcaaccttctccctttaccaggtacatttcatctgtttcattatttcaaaataattatagtggtgataagcataataaaaatgataataatagctaacagagtgcttatgatgtgctgggtactgttcccagtcctgtatgtacgttaactcatttacttctcaccacactcctatgaggtgtgtgcaattgttttgtagatgaggatatttagacatagagagggtaagtaaaggtgttacagctagtaagtagcacg

SEQ ID NO: 55512 - DNA, 1050 bp, Homo sapiens
agagtagcttgagaattttaatacatttttcttcctttttatgtagatcccattccttctggtctgatggaagaatgtgtggattgggatgtggaagttaaagctgctgtgcatacatatggtatagcaagtgtacctaaccaacccttaaaaaagcaaattcagaaaatagagagaacccttcaaattcagaaagctcatggtgaccacatggcttcctctagaaataattctgtatctggactatcagtcaaatcaaaaaataataccaaacaaaagcttcctgtgaaaagccactcagaatgtggaatcatagaaaaagcaacgtcaccaaaagaactgggctgtgacaggcaatccgaagagcaaatgaagaattctgttcagactcccgttgaaaactccaccaacagtcagcaccaggtcaaagaagctttacctgtgtcactcccccagattccttgtctgtcttcctttaaaatccatcagccatacacgttgacttttgctgaattggtagaggattatgaacattatattaaagaggggttagagaaacctgtggaaatcatcaggcactacacaggccctggggatcagactgtgaatcctcaaaatggttttgtgagaaataaagttattgaacagagagtccctgtgttggcaagtagtagccaatctggagactctgagagtgacagtgattcttacagctcaagaacctcttcccagagcaaaggaaataagtcatacttggaaggctcttctgataatcagctgaaagactctgaatctacgcctgtggatgatcgtatttctttggaacaaccaccaaatggaagtgacacccccaatccagagaaatatcaagaatcacctggaatccagatgaagacaagacttaaagagggggctagccagagagctaagcagagccggagaaacctacccaggcggtcttccttcagattgcagactgaagcccaggaagatgattggtatgactgtcatagggaaatacgtctgagtttttctgatacctatcaggat

SEQ ID NO: 55513 - DNA, 1049 bp, Homo sapiens
aagttgacctcacctatagagttagaattgtaaaagagctacattcctattccaaaatttctgcaaagtgccagattgcagctatactcttctagagccccccataattacgttctttttcttcccagaatcctcctcactcactctctattgcagccaagacatgtttggcatagaaccagggaaagccaatagaaaataatgtaacacattattcagtgtcttgtatatttcaaatctaattgttatggaggggacctatactatatttggtcctaattaaattttatttaaagtggttttctgttttagaaggaatcatgtcagaaaaaaaaaaacttctttatgaacgtctttcccttttattactttaatttcatgaataagaacaccaaaggaataccctctacaatgaaagcaaattacattgctcatgaactgtctgggggaagcagagagtggaaccacatagttcagcaggaaagcctcagttcattaattccaagcaaatctagtaaatggcttcctaccataggctgtgattgcttcagaggagaataaaggaaggttaatcaatggccattttaaaaaatctgaaaaatagatttgactgctaataaaatttagattaaatagtttatttctgaatattccacatcgggtatattacatctgcacatcttagatctgatgcaaagccacactaaatggcttctgtgactaaatagaatccaccttgcatttattggtattgctttattttaaagcattctttaaatcatctatacaatgataaatggtgaaatattacagctttcatgtgcgattaacttaaggagtcttgaattcgtttccattgatgcctcaatcataaaatagggatatcctcttttaaaaccgaggatagaactttgttgtgtttggccaaatgctgttgcaaaatcccccaagcaagaagatttacaggcaaaaatgttgtagacatgacaaagttagaagtatatttagagtatgagattatgtaatacatcattctataggtttaactg

SEQ ID NO: 55514 - DNA, 1023 bp, Homo sapiens
agccaccgcaccaggccatagctagcttttttttttttttttttttttttgagacagagtctgactctgttgcccaggcttggagtgcagtgacgtgatctcggctcactgcaaccccttcctcctgggttcaagtgattctcccgcctcagcctcccgaatagctgggactacaggtgcgtgccaccttgtccagctaatttttttgtatttttagtagagactaaaatacatgttagtagagactaaaatacatgtttcaccatgttggccaggattatctccatctcttgacctcgtgatctgcctgcctctgcctcccaaagtgctgggattacaggcatgagccactgttcccggccagctagctcttaaaaattattgtctggcatcagctgtttgctgtataactttttatcatgtcatcattcatattacaaattgtggcatttaggggtttaagaatgaagatgccagaagaataagcaaatttctcgtttgactgatgtcttcctgtgggttctgtgttttgttttgttgttgtagttttaatatttttcaagaaaggggaaattcagtttataaaacagtacctatttagagaacatacagttttccagcagttacggaggggcttcagaaaagattacagcagtgaggaatttcattgcatttattcagcctgtaactaaaacaaataaaaaagggaaatagcttattcctattttgacttcctcttattgtgtcttccttgcatgtgttagccttgtgatttgagattaatcaggggttatttctagttgtccccataaagagaagagaagcaaaggaagacaaagaggttgcttctaaaactaaaacatatcatttagtattccagtttagccagttgtaagaataatttggaagataggagaaaaccatcttgtatgtttgctgaaaatatttatggaaaggaggcatttatagaatgaactgggagttttattatgtgaaattgttttgttagaaaagcatagtaat

SEQ ID NO: 55515 - DNA, 1056 bp, Homo sapiens
ttgctgggtttcatttattcgtttgtttgtttgatctctggaactatctaaggtgcctgatttggcacttattattggttgtattaataaatgtgactccttgatatttgaaaatgaaatttaaaaaattctttaaaggtgatcctagaccttgaggaagaaaggcagcggcatgcacaggatacggctgaaggagatgatgtcacctacatgctagagaaggaaagagagaggctgactcaacaggtaattaaggtagagggattcacagtagcatttgcctggaacagcatttcccaaagattattctgcaggatgccaactggtattgttcagaaaaggggctttgtggtcaaataagtttaggaactactggattaagcaaagttaaacaggtttctaactttgttaggatctttagtatgcagaagcacattgtgagtcttcaagaacaagatagggtattctgtgtttagcaaatccatggttttataaaatcttttattggcatagatccctcactgtgggattattattgttccgtagaacactctttggggaatggtaacttagcgcttgtagctctcaaacttttgacttagaacccccagtaagaagtgacattttatgtcacaacccagtatatgtagacatacacagttacgcctgaaacaaaaatctcatgaaatcatatataacccctactgctacagtacacattgatgttttctgtttatatatttttttaaaattctagtcgtggctcagttagtttccccatccattaatggatctcagagtttgaaaaacactgagtttcttcaaccctttccctctcacgcagagtctctgcctcaaatagggttgggaagacaattaaaacaggctatatttgtgtaaaaaatatgattcaggctgggcacagtggttcacgcctgtaatcccagcacttttggaggccgaggtgggtggatcacctaaggtcaggagtttgagaccagcctgaccaacatggaaaaaccctgtctctactaaaaatacaaaattaggcgggtg

SEQ ID NO: 55516 - DNA, 2607 bp, Homo sapiens
aaagagaggcttgcagactgaggcccaggtagagaagcagttatcagagtttgacatcgaaagggaacaactgagagcaaaactgaaccgagaagagaaccggaccaaaaccctgaaagaagaaatggaaagtttaaagaagatagtgaaggacctagaggcttcccaccagcacagtagccctaatgagcaattgaagaaaccagtaaccgtgtccaaaggcacagcaactgagcctctcatgctaatgtctgtgttttgccaaacagagagttttccagcagaaagaacccatgggagcaacatagccaagatgacaaacactgggctgcctggtcctgccactcctgcttactcatatgcaaaaaccaatggccattgtgacccagagatacaaactaccagggagctgactgcaggcaacaatgtagaaaaccaggtgcctccacgggaaaaatctgtggcattggcccaagagaaaccagtggagaatggtgggtgtcctgtggggattgagactccagtcccaatgcccagtcccctctcttccagtgggagctcactgtctcccagcagcactgcctcctcctctctaacatcctctccttgctcttcgccggtactcactaagcgtttattggggtcatcagctagcagccctggctaccagtcatcgtaccaagtagggatcaaccaacggttccatgcagctcgccacaaatttcagtcccaagcagatcaggaccaacaagccagtggcctacagagccctccatccagggatttatcccccaccctcatagacaactctgccgccaagcagctggcccgaaacacagtcactcaggtgctctccagattcactagccaacaagggccaatcaagccagtctctcccaacagctctccctttggcacagactatcgaaatctagccaacactgccaatccaagaggtgacacaagccattcacctactccagggaaagtgtccagtcccctgagccccctgtctccaggaatcaagtccccaaccatccccagagctgagagaggaaaccctccacccatcccacccaagaaacctggcctcaccccttctccatctgctaccactccattgaccaaaactcattcccaggcagcctctttgaccactgcagaagaccttgccagcagctgctcttccaatactgttgtagcaaatggtaaggatgttgagttacttttgcctaccagcagctagtccctaggagggagtctccacgtttgacattccatcagatttcgtccaaaagctcagtcagacttctgagtcagattatgttatttattttgatagtagctgaaaccatctgtataatacatttagtatatttcaccattttgtatttttttaagtagaaactgagtagtttggatttttatggctcacatctttttactgaagccagaaaggcacctcaaagatgtctcaagctcagcagtcaccgtcatgttgtgatgaagaaagcgaatcaccaggtggtgatttgctatctatttgagaactagaatcactcaacactcattttgaattatgcagaagtggttcatgcagatttttattccagatgaacatgttttaaaagtgcctgaaatatgactgccatatgaatgtgattctgcagcaaaaaacacaaaatagatcatttaattacagaaaatgagatcctctgtgaattctgaatgttaaaaaccaacactgcttttaatcctcttttaatgttttaatacaagctttgtgttctgaaacaaggctgcataagtagaatgggaatccttctaaaggtgggtgtgaactcaccacaagctgagctttatagagcccttgagaaaccctcctgagcactaagcagttggggtgctgattttcttgtacttttgaaaaattaagtcactcccagtttcctgcataagttcttgaacagaatgaaatcacatctccattcaaaaaatgtctcaagcatctactgttgtgtaaggaacttctgattctgattgctgttacttgaataggaaatggttactcattctgtataaaagttttgcaagagaatgaattttttattctgtaatcaaaaagcaataacttgaaattcactctgtaatattataggtcagtcagaattatacaagttttaccaaattgttacacttattctccaagctgccagaacctggtatctgtatctgtaaaaccaaattaacttttgcttaaatgggaagtatacatatatctgtatagatacattacccctttacatgtttaacatacacacacttaaacacataaatactagtgtgattatatctttggagtttgcaatatagcataaaggacaagtagaactgcacattaagattacctaccgaagcaactagatgtggctgggacacaatcaaaggaggaattttgtccacaggaaggtgaggaaattccaaatgaagcctagatcttcagtatcataaaaaggcagagctggccaggcacagtggctcatgcctgtaatcttatcactttgggaggctgagatgggaggatctcttgagaccaggtgttcaaga

SEQ ID NO: 55517 - DNA, 1004 bp, Homo sapiens
cggacaaaagcctccaaactttccaactgtgtaggccagtacagctggcaaggttcatagaatataatggctatccccctctgccaaataagactatccacaacccagctcagacacagtggttatatgattttgtgtccatacaggagaggccttggtgtcttcacatacattctctgagccaacatctatccagcagccctgacctcctgctataatttaagtctatttccttttaatctaataagagttgatagtaaaaaggcaggtgatggaaatcagtgtataaatcacaatggagtatattggcaactccacagcttatagtttgataaaggcaaatacatgaaaaataaaaatgctactaatgccccaaggtgtctatcaaaatgatgtagggggtatcttaaactgtccaaggcaatcatgcattgaactttattcctatgcagagccaaaacgaatagtgttgataaaatagctaaactttctaaactggagaggaggctacagtgccagagagttattgtctcttttgctttaaatggtaatcttaaaagttgcattgtgctcttcctttgttttgggatagatatatatagagagagatactataaggaagtttatttcttaggaagtgcactgaataatgtatttcttttacagtgtaatatgggggtggggatatgcgaaagaaatgtgtatttttgctagttgcctaccttctgagataaataagcacaatcttgcaatggatccaataacccagttaggtattatagattagtatttaagtttgctgtagattgtgtgtgtgtgtgctaagtaaaagttccatgattcacaattttagtattaacccatgttgcaaaagctgttactggccaacagattgtaatgatgtgtaccatataacacaagcattaactaggcattaacgtttgtaaagccaaatataccatgcagaagtcttcatttttatagcagactgcattaaaacaagt

SEQ ID NO: 55518 - DNA, 1045 bp, Homo sapiens
tggagtggggcaggccaaactcgggcaacaagtccttcttgtggtctgacttaaatccattctgctgcagcccacataggtcctttttattacatcctcactgagtgtgggaacatctgttcagtatctaagatgggaagataattaaatgtctctattaccacccttactccactaagtaatggcttcaagactccacagagcatggcgcttgcttgctctccagtagtcagccccttgtagttagtgtagggagcctccaataaagctgagcctgaggctaaccacatcttcctctcagttcaacacatgcctgcaaaatgtctaccatgtgccaagcactgagctcagatgtcagggacacaaagatatttaaggcatctcccacctcacggtctggtagagtgttagatgccctgactctagctttgtttttcccttctggaagttcttcacttccttcccagcttcctgccccagaatgcttctcttcacctgcttttggccaattcacatcccttcatttgacaaagtgaggcatacactactctagccccttgctactcaaagtgtggtccccagaacagcagtatctgtatcatgtggggattcgttagaaatgcagacattcaggccccacccaaggcctaccgtaacagaatctgcatttcaccatgatcctcacatggtttggatgcaccactccacaaaggcagggatttttgtcggttttgttcaattcaatatccccagtactgagaacagtgcctggcacatagtaggtatgcaatcactatttgttgaataaacacctaactgttctgatttatccccaactcccttctccctctagccagccattaactcccatttccattacagctttacttgtcaacagttgccagcctatctgcagatgttttatgtttgtatgttaaagacacaaacgggccagggatctgctttttttttttctttcctcctttcgtgtacagcccctagtgtacatgattcagcccagcacatatagaactttgaacacaga

SEQ ID NO: 55519 - DNA, 1217 bp, Homo sapiens
cttaatctacagacttttgttaatactttatagtcctaaagaaggactgttcctagagaagtcatgatgggctagaccagccaggggctttggtgaagaggatctgcgggctggagtttggtgcataattaaaactcagcgtctgacagctgggcacagtggcttgcgcttgtacgcccagcactttggaaggctgcagtgggaggattgcttgagaccaagaattcaagaccagcctgggcaacatagtgagctccatctctgaaaactatgtttaaattagctgggcatgatggcatggccctgtagtcccagctaatggggaggctgaggtgggaggattgcttgagcctgggaatttgaggctgcagtgagccatgatcatgccagtgcactccagcctgggcaacaaagcgagaccctatctctaaaagaaataaaaagaaagaaaaaaaagaacaggtacgtatcctcattttacagatgagaaaatagaagctcagaaaatttagctaccttgctcaaaatatcaaagcaaatggcacagctgtgatttttaacccgggtctgtcataaccgcaaatttctataccactctgctgctttaagatatcaacaggcaaaagataaccactgtccaactcacataaaaataggacatcaagttttgggggacttcatgtcctacctccagcttactaagcctgctatctctggagattccactactgcaaacctagttaggcaatgggtaatagcattacccattaagccaaatgtggagtgaacaataataataatcactaggacttggagagtcactaaataaagatttgttgagtaagtggaggaaggctgccttctaagctgtgtatcactttggccccaacctgcagtactccttcccactgtagccactgactcctgctcccagcttcaaaggctaggatcctctcataaagaattaccaaagccagagatccctacctgcctaatatatactgatgcctcatgtgggcccttgagatcagacctgcttacctgctctcccaccatccatgagttgcctatctttcttttactccatgtctccccaaacctggcaaacctccagaatagtgcatgggaagagaagaaaagaaaagaaaaaaaaaaaaaaaaaaaaggcaacacaaggcctagccagacttactacattaatctatcctaggagtgtt

SEQ ID NO: 55520 - DNA, 1061 bp, Homo sapiens
aattagaataaagttcctcatttattagtgagctggttttgcagtctctaaagctcttttgcagctcttctattcactatggcctcagatacgataaatctgctagctgcaaaaattcaatataccaagtagaatatgtaggaccagtcaagttttaagtttgggagtgaggaaaagcagcatgtattttctattttaaattattttcttttcacattctaatttcttaagggtttggcttgatttatgccaggttctgggcctgtaagcctacattaatgtatcacagtactggataggatatttgatatctcttacttagcccagaatctcaaatgataaggagctgtagttaatgatatgtagcattttgttgaactttacagtgtagatctctgttagtccctgggtctgtaacaaatggactcatccttgtgcttttccataggtgccctgatgtttactgacataaatcaagatactatgtggctctataggggatgctgaaccatttgacagtctaggtgcacacagtcacctcacattatttaagccctgatctcagcattctaatttctctgtattccccagtgtatataatgtgtacttgcttgaaattccttatatattgcttgtacattcctgcttctaagtttcagcacataccagttccctctatttagaatgccttcttctgactgccctcagtcagttcataaaacacataaagctatcttttaaaaattcaactcaaaagtcacctcctgtggaatgccatctctgcttaatctcattaacctaattcctttattctcagacttctgcttcctagtccattaaactgtttcattttattgtaattgttgcttctgtatattgtcacccagtaagcataattattctaggaatgatcatcttcctccagcctcttgtgtctacttattacacacaaatattttgaaggcctattgatgaccttttcagtttccccagagttccagttcaccttccttactgtttccttttacttcatagttacattcctaaagaagcagcgcatg

SEQ ID NO: 55521 - DNA, 1703 bp, Homo sapiens
agtctagactaatagattatgcttcctttcagaagaatttattcggttaggtcaagcaagaacatatagaaagagatatctttattcttttccaaatatgtgatgtggagtactttcatctttatactcagcagctggaattcatctttttgtaagcagtgttatttattataatgtttatatgaatataatttatcaaaaaatggagagctccacaattcaaaatttaagaaatgtctcacctcagattcacagagtaattgccttagacaaaagctctacactcatacattttatatacctcttttatatcctctcattcctaataatgacagattaataagaactaatagccatcctggttttcagtatgaaacaatgtgatttcatgtgaagaagaatagaatagtaagagttaggaccaaaattacttagttctttgggcatgtgagagaataggaaagagctacccagaattttccagagctcacttgataatgtcaagagctgcagctggcagtcactgattctgaaaataggcacacatcatgttaatcaaaaaactaaataaaaggatattgggataaggcactaaaataaagttccttttgccctttctttatagctgggttttgctgatcaattctgcattttttggcaattctacctctttacagggagaaccaccagtattattttctctttaagtaactgaaaaaatatttcctatctttattgagctgtctcattaaagtaacagactagctggatcactggggatatgactttgggatatatgttttaaaataggcacagaggctgggtgcggtggctcactcctgtaatcccaacactttgggaggccgaggtgggtagatcatctgaggtcaggagtttgagaccagcctggccaacatggtgaaaccttgtctctactaaaaacacaaaaattagcctgatgtggtggcaggcgcctgtaatcccagctactcaggaggctgaggcaggagaattgcttgaacctgggaggcgaaggttgcagtgagccaagatcacgccactgcactccagccctagtgacagagcgagaatccatctcaaaaaacaaacaaaaaggcacagaacctctccttgagtttatacaaattaggcatgtaatcagtaaatatggtaaaatatggtaaaatgtaatcagtaaatatggtaaaatggtagaagagcaggcccaaggctaaattctaaactactcatgcaaatattataataatactagagagttgtagaatgtactgattaaactagtgttgcagtagaagaaaggaagataaactatttgaacaacaacttggaggcagaaaactggggattcggctttggaatttactttattggtaattattacttctctagcttgtcgctcacttctctgagcttgtcacacctactggaataagcagaaattgttattctttgcctaggttaacaaaatacacatctccagatagtaagttagttgcatgatggcatcttctaattcagaggtctgatttgtagcatattggtaaggaggcacattcatatttctgggtggtagggagcccactttcatccattcatctgcattcctgttcaaactagcaactgtgtctgctaacattaggttcccagaaaaaagatgtaagtaaaccccagttccactgagc

SEQ ID NO: 55522 - DNA, 1065 bp, Homo sapiens
ttatctttgttctgtaataacattaagattgtcttaagtctgtcttgacagtagccagcttcaaggagagaaattatttgggattcaataatacttaacaaaattaagagtaggatattcagagaatgcagatcacataatcaccttctgacctcactctgtaatttcaagcattctagaaataaaactgttcaaagtgtagaaaagggctatgtttcctttaaacatccttgcagatgaccaatgtgacagagaaagatgcagcttaggggacagttggagaagggagcacattcccacactctttgttaggaacatgccagctctcgtcttcatttattcaatatgctgcagtcccagtttctttctgaagccagagctcatgcttttactcccaggtagcagcagctttacaattaaattttaatccgacagtgttgttagactcctatcaagagtacagccacagctgttcttggcaggcaaatacattgctggttttccttcagtcacagtgagatagaaaaatgttctctgtctagggtgtggacgaaggcactttactaatcttatgcataattcatccttggttgctggggcactcaaagttgaaactttgccctctgataaaattcagctggatgttttttatttattagactctgatccctttaggggtttagcccttattgcgagcccagggattctaatttggctaagccctagctgtgaagacttttcttactaatttgcccttggtgaattttagctcttgtaataccacctttaaaaaacaaaaaacaaaaactgcagtagaacatgcagttcagagagtcctggataacctgaaaagagtcttctttgaatgttggcttattgaatggaaggactccaatagggcctgtcttgatttgttttcaaagtttagatttgtaaagagcctcagcaaattaaaacatggttttaattgtcctataacatgctaaaatatggtaatgattgtcctataacatataacaggtctttgcatttcaaattcattgggtacctgtgaagtataaaata

SEQ ID NO: 55523 - DNA, 1048 bp, Homo sapiens
gtgactttagtgttttgaattcagaagtgtgtttaaatattaaagtctctaattggggccagtcatggtggctcacgcctgtaatctcagcactttggaaggctgaggcctgcggatcacttgaggtcaggagttagagaccagcctggccaacatggtgaaaccccgtctctactaaaaatacaaaaaaaattagctgggcgtggtggtacttgcctgtaatcccagctacttgggaggctgaggcaggagaactgcttgaacctagaaggcggaagttgcagtgagccgagatcgcgtcgctgcactccagcctgggtaacagagtgagactccatctcaaaaaaaaaaaaagtccctagttgggttttaactaaacagggtagtctttgcaattttggcagaaaagggtgttacaggtaaaggtaggaatcagagattcccaaataaattgtctgttttagtacagcaaaactttgttgaagtttgttttactgaacgcatattgtagctgtgctgcggtgggaatgggctttgtttccacatatttctactaatctttatgtgggaaaatgtggttggacatgccaatgatgaatttctgagcaactcataattggctggctccactgtaactagggccttacaatctgcttgattaattctttaaggactacattagccaagttgcatgatttccaaagatatagaaggtcagatgttacactaacaaagaacctctctacagaatgtctcactggggtttctttagtcccttctcaaaaataattaaaatttttcttcccaaattacatttttaaaagaataagcagatataaatgccaagtgtcttttactgaaaagtgaacaaaacttttgggaagatttgtccactattcttaccatttttttcagggaaaagattgatcttcagaaccgggggagttaataaacaattataactatatattaatgtataccaattgaaaaatatatgtttttttaaaggttctgagttttccattattataacctgtgacatgatagt

SEQ ID NO: 55524 - DNA, 1125 bp, Homo sapiens
gacctacaggcacacaccaccatgctgggctaatttttaaaatttttaaaaatttttaagcacgattttgcttaggttagtgtcgcatgcctggctttaagcgatcctcctctttggccccccaaagcgctgggattacagacgtgaaccaccacctgtggctgcaactcacattaagcacttaaaatgttcatcattacaactctccatagcaacttctagagggtttagcaacttattcaagatcacatagctaataagtgacaaagctttttttcaaaatcacctcagcatgattttgtaatcaatattctttcccatgacgccatcctgttcccacacccagcacagttgtctggctatttagatatgctgttgatgctgggataaataatggataactgtcttctaccttgcttagccagagactttcctttttaaattttttttctttttaatttttaaaaacagatttcatttgaaaagattaagacttgtttacatgttattctgaaataaaattgattcttacctattctccattgcagcctttcatcatgtttctgtttacccaaaaaaggagcttcctttgttcatccatttcacagcaggattttgctcttctacagcaatgatagccattctcactcaccagtttcctgaaatcatgggtatttttgctaaagctgtaagtatgatctcaaggacttgtgtagattatttgtaaaacacacaagaaaccatctctgatctgcctgtgctaacccagctgaacaatggaagatatttgttgtaaattaaaggaattgatttgtatatagttgctgccataaatacatcaaacataaatttttggtgatttgagctacttctgttgcttaaaagtttaaagaatacaatataagattgtaacaatataacattataaagtttgctcttatagatcacttttggtgataaacagcatttgttactatctttggtatttttaaaaataccctattttgtaaacaaaccctttgatttttttcatttaaatgaaatcattagttctcaggatttgttgaactttaaactcaagagcacaactaggatggataataagtacataaggcgggggaacag

SEQ ID NO: 55525 - DNA, 1010 bp, Homo sapiens
catgaaaacagccttagccaatatgtaaatgaatggcataactatgttccgataaagttttatttataaaatcatagtgggccagacctggccaaagggccatactttggtgacccctgatctagattaagatctgctcataggccgggcgcggtggctcacacctgtaatcccagcactttgggaggccgaggtgggtggatcacaaggtcaggagatcgagaccatcctggctaacacggtgaaaccccgcctctactaaaaatacaaaaaattagccaggtgtggtggcgggcacctgtagtcccagctactcaggaggctgaggcaggagaatggcgtgaacccaggaggcagagcttgtagtgagccaagatcacgccactgcactccagcctgggcaacagagcaagactctgtctcaaaaaaaaaaaaaaaaaaaaaaaaaaaagatctgctcatagaaagctttggtgaaactcacatgtgaagttaggaaccattgaaaactattttaggttgccaatagtaatggccacaacagttatatacatcccagttatatgaagatttctgtaaggggcagaattatcaattctgctttggaattatcaattgtgtttgtaatgaggagactgaatgaagcaaagaaggacccagccagtctcatctatcactccctatagttttactccagccagactagaccattcactattatctaaataaatcttatccttccccttatttattattttgcttactttgtttctcgtatctaaatgtctcactaaaaaaagaaaatagtatgtgaaatttctatataaatttgtctccaaatataggatggtaaatgagacagaattgagtatcaacacatgcttttttttcctcagcttttagaatgattccatacccgttagagaaaggacatctattttacccttatcccagctgcacagagacggctgatagagagctattacctagtaagtaaatattttagtttt

SEQ ID NO: 55526 - DNA, 1183 bp, Homo sapiens
agaccttgtctcaaaaataataataagaataattcaacatctgtcagatatcacttaaactattagctccagacagttcacagtttcaacattagatcattctccattcctttcaatatcattatatctttgcaaagctggagttttgttagttgctctgattaaaagaagtaccacacaaaaatcaatgtgatataggaaatgagaatggtagtgtccaatgtgattccaagttttgagaagttgtacagtgtctaataggctcatacctatatctcattagtaagaaattatggtcatttaaaaatgaaataagaaaattgatttattgattctttaaatttatgtgcatttttttccaaattgctgctaaattatcagaacataaattttttaagttgtttggactcactattaacaagtgaaattatcttgaaccaattttggaacctctgcattaaccatttgctaaaagccagacactgtggcttgacaatgacaatgtaaataaaattgatgagccaagtgttgtgactcacacctgtagttccagccactagggaggctgaggcaggaggatcacttgaggccagaaatttgagaccaccctgggcaacatagcaagattctctctaatatgtgtgtgtgtgtgtgtgtgtgtgtgtttaaagaaaagattgataaaactgggattatgtgcttgagaaaccaaatgtctttgagtaattcaacttacttttgctttttctccagtagtccataagctcctcaaaagcagatattgttttttgttttgttttgttttttttaagtctatactcaatgaatatcttttctttttttcaaaagcagatattctgtctcactcattttgtgcatgtcttcactgcctgacattctgcttggcaaataggttttcaataagtgtatgattttattttcttttattactttttatgtagtgatgaggtcttgctatgttgcccaggctggtcttgaactcctggcctcaggcaatccttccaccttggcctcccaaaggagctgagattacaggcatgagccatcatgcccaaccacctatgatttatactgtatttcatgaatcatgatcaatgatttattagtgttatcactaatttactctatgactttggacaaataactacttcttattgtggta

SEQ ID NO: 55527 - DNA, 1072 bp, Homo sapiens
atttagccaggccacacatatgccatttatcaccttatttttacctatagaaatattctggttttcataatttgcgtatataagcattttatacatgttatcagtatcttcatgtcatttcagttagttttttaaaaatcagtttaactttctaacactttgaatctacatttttgtgggtgtttgaatttaacacaatttaatttttcttttttctgttgtgtgtatatgtgtctgtgtgttactctttcagtatttattagagatgaaaagtttaattttacctccagaacacattctgaaacggggtgatagtgaagcaattgcctatgctttctttcatcttcagcactggaaacgaatagaaggtgctcttaatctgttacagtgtacatgggaaggcagtaagtattcttttccaaaagtaacactaatctctctaactattcattgaattcacaggcagtctttttaaatgagattgtctgggtttccataaggatttgtcgttcagattggtttcaaatggaaattagtgatgagatatttggtttattggtagaaatgcataatgttatattgatcccacaaaagcagaatgagaaattgttatggtattctgccatatgttaatttaagttacatatttgtaaggaaagaaaatgaaaacttggccctttgacttacaactttttttgtttttttttgagacggagtctcactctgtcccccaggctggagtgcagtggcgcaatctctgctcaccacaagctctgcctcctgggttcatgccgttctcctgcctcagcctcccaagtagctgggactacaggcgcctgccaccatgcccggctaattttttgtatatttagtagagatggggtttcctcgtgttagccaggatggtctcgatctcctgatctcgtgatccgcccacctctgcctcccaaagtgctgggattacgggcatgagccaccgcacctggcctgacttacaacttttttaatgtggttgagctattctaatattttaaaaattggtctttttgttttgttttgttttccgatgtat

SEQ ID NO: 55528 - DNA, 1039 bp, Homo sapiens
cttcttagaaaattaaagtctgggtagcagagtttttgtatttggttttagttttcccagagagttaaaatatatctttggtaaaaactaaaatataaatatgaatttgaagacatttcagctgtatttatcagattaactcagttaataagtttttttttttttttttctttaagatgtagttttgctgttgtcgcccaggctggagtgcaatggcacgatctcggcttactgcaacccctgcctcccgggttcaagcaattctcctgcctcagcctcccaagtagctgggattacaggcacccaccaccatgcctggctaattttttgtgtctttagtagagatggggttttaccatgttggccaggctggtctcaaattcctgacctcaggtgatctgcccgtctcagcctcccaaagtgctgggattacaggtgtgagccaccgcgcctggccaataagtattttaatacttgcttttagtgtaatatgctaggcatggtagtagaattttaaggatatggtttttatagtgtaataagttacagcctatgctgggtagtggaaattcctgagtagcagtttgtgaaggagataaaataaataatcttataatttgtatacattttccttaaattgaaatttttctcttatattttggggatcaacttttattttactgtctaatcaggaattgaaaaattgcttttttgtttttgttttttggtttttgggtttttttgagacagagtctcgctctgtcatccaggctggagtgcagtggcgcgatcttggctcactgcaaactccgcctcccgggctcacgccattctcctgtctcagcctcccgaatagctgggactacaggcgcccgccaccacgcccagctaattttttgtatttttagtagagacggggtttcaccgtgttagccaagatggtctggatctcctaacctcgtgatcctcccgcctcggcctcccaaagtgctgggattacaggcgtgaaccactgcgcctggcccgaaaaattgctttg

SEQ ID NO: 55529 - DNA, 1048 bp, Homo sapiens
ttttcccctgaacttactataagcaggttttttttttattgttttttttttttttttttttacagagtctcgtactgtcacccaggttggagtgcactggcacaatctcggctcactgcaacctcggccttccaggttcaagtgattctcctgcctcagcctcctgagtagctgggattacaggcacctgccatcacacccggctaattttttgtatttttagtagagacagggtttcactatgttggccaggttggtctcgaactcctgacctcgtgatccacccacctcagcctcccaaagtgctgggattacaggcatgagccaccacgcccgtccataagcaggttattgtagacattggttgaacgcatttcaccgttgtgcagacggctttcatagacataatttcatctcggtcagaaaatatcattattttgagaggtgaaaactgaggtcaaacaagttgctactagctcaaagatgcttagctggtaaatagtaagataaagattcagattcagctttttcaacttcatatacgggtttttcctactatattatagatttttcaacatcacgtccaggtttttcctatataactattgaatttgcattgcattgtgaattattcttttttttgttttgttttgttttgttttttttggagacggagtttcactcttgttgcccaggctggagcgcaatggcgcaatcttggctcactgcaacctccgcctcctaggttcaagcgattctcctgcctcagcctcctgagtagctgggattacaggcatgcgccaccatgcctggcaaatttttgtatttttaatagagacggggtttctccattttggtcaggccggtcttgaactcctgacctcatgatccacccgcctcagcctccctaagtgctgggattataggcatgagccaccatgcctggccgtgaattattcttattaaaaaattgtctcaataccttttttgtaattcctacctaaattgaaaattatcgttacagatataagccttccaaagtcagcag

SEQ ID NO: 55530 - DNA, 1053 bp, Homo sapiens
aactggcagaaactggcaggatcaactttattaaaactctggaaactaatgaaaagtttacagtaacctagtgaatgcttaatcaaggggaaaaacacctaaatctctctaagaaagctttgtagtgctttatttatcctggccccatccctcactccctagctcagtggcagtcttgaagacaacagagtacattccaggtataggtttctagtaccagaggaagtggaatggaccttattttcaaagaactgtggtcgtttgttttgacctgtctgttggctttctgaaggactagctcaaagggcttgctttatttcagcttactgaaagaagagagttttcaatttcaaaactctcccagaattgacataactacactctgggtcatttgttaaaaacatttaaaggcaaatgcattagctgctgctgcctggggcaagggataacaggaaggacaaacaatagacaaaccagaaagcttgtgagcaaagtctcgggaattagacactttgaggaataaaggctctaaaaagctcccacatgtttctgggaatcaaggccccacacacagccagagctgggcatatgctcagaaaagacttgagaaagtcctaagctgtcaagtctgcctaaccttcatgttctgtacaagtaggaggagaaggctaaggcagagttgtaaactgtttggctgaatgttgaaggtgtgccctagcacccacacagagcccatctgcaaatacttttgctttttgtgttttgtttggttttgttcccaggtgtttaaggaaacctctatcaaatcaccaactgaccacgaggctaaaatagcacacacatcactggtcacacatgacagataatatagattttataaaattggttcagaaaagtcactaaacaaacaactgcaaaagcagcaacaacaaatcctagggagtagagaaaattatgtctctagagttgccagaatataatatttaaaatttccagttttcaacaaaaaattacaaggcatgcaaagaaacaagaaaacatgtcccatacata

SEQ ID NO: 55531 - DNA, 1056 bp, Homo sapiens
ttgttaggtaggatagggaaaccagagaaacattctttggtagatcagttataggaaagagtgataaagttgaagctttagaagttgattttcttaaaaccatgtattccattttggtccttgcaaagttttatgtacttctctagaggtgtgtctaaccccagctaaaggttgaactcaaggaggacagagtgtatctgtgaatgatcttcagaaatggactgttgattccatattgatcttttcagaccctcacataaaggtcatgatttatatcagtagttttattttcagaaatacaaatgtgtatttttgtgatgtggcaaatttctcttgacttactgtcatcagtaataactaaattagattttgttcttattctattaatttatctagggcagagaacaaacttatccagaagggcccaccattgttttttggatttttttcttcagcatttaaaaatcaggagattttacattaaaatctgaatttatgccttttgaagtttgaaaaatagggcaaaattgaacttgaatttacacttgacagtaataagatggaactgagttgtggctctccctttgagacagtgaatgtgctttcagttcactcatttatgtttaatgcctggcatttgtaggcatttacatatttatgacccctgaccttatgataactgctgatctgttttgtgcttgttagcttattagaatgttatttaacttgaaaaatagataaatttgagtgaattgctaattgcttgttttaattatattcagcatattaagagcccttaaagaggacaattgaataccaaatcagcattttgttttaaattactcctaagccttattttagaaaaaaatatatacatttttcccccatcaactttatttctcctttctgcttaggcttaggactgctttggttgtgaagaatactcttgaaaggctaggtagagcatttgaaaacaaaagaataagataaaatatttaaaggtgaattagatgacctcactagaaatttaaaaaaacacaaatgaaaataagtttc

SEQ ID NO: 55532 - DNA, 1056 bp, Homo sapiens
cgccctctctcttatgtcctcgtttttccatggaaaagccacctgacaagctataagcttcaggtattaggacagaagagtgtctcagattaggatacgtaatttatattggctcccccacctctggtaggatcccttaaaagtcactactttgagtctcccgctgcccagctgaaagaactcatatccaggcaacaaagatgagcacatctgtaatttaaagatttcagagaaagaaaatggcatgattttaattgaggattctcttgttttaaaatagttctgttaagaaatcgttttcgtgatagttttgtctgttcttttaggcttatcttgagtaataaaatagtacaggaagtgagagcgccacaaacaacagtgggtttgctagttctttcgacgtctgtagaacacttgctacgtattctgtgctgacaatacgaacacatgtaagaagtgatgatcctgatggattctcatatactgtactattctttagctgtagacaggatgaagtgtttagggcccaggtccccttaccatgtgattatatttcactcaagatctgagcagcaacctcagaacaagatataagtatttccattacatgattcagtatggtggttgatttttctgaagcaaaaggcagcaaatgtcccctttcctgttcagagatgacatgaaagactgtgagttaatgttcggaaatattttggtttttttggaggataggtatcaagttcaaatataactagcactctaaaataagctaaactgaagagctaatttggcatctctgtaacaggtgaatgaagtgcttaacggtggtttctatgcacagtgttactgattgacttgtcatttatttttctacgttaaccatatgcaacatttagatgagaatagttgattactatagatttttcttttttacgtttcgtgtgtgtgtgtgtgtgtgtgtgtgtgtgtgtgtgtgtgagagagagaaagacagacagagtctccctttgtcacccaggctgaagtgtagtggcaagatcactgcagccttgaact

SEQ ID NO: 55533 - DNA, 1055 bp, Homo sapiens
agatcatctgaggtcaggagttagagaccagcctgaccaacacggtgaaaccctgtctctattaaaaatacaaaattagccaggtgtggtggtgcatgtctgtaatcccagctactcaggaggctgaggcaggagaatagcttgaacccaggaggcggaggttgcagtgagccgagatcgcgccattgcactccagcctgggcaacagagcaaaactccatcaaaaaaaaaaaaaaaaaaaaaaaaaagaggtattatgatgtaatggaaaagagtgattgtgagtgttagatatggcctttccctttcgtgcttctagccaccttgtcactgattttggaaacctcacttaacctctatgggtgggcctcaatttccatctaaaatagagaagtagggaggaattggatcaaaccagcccaagaaaatttaattaactatttcaaactctaatgaaaaatctctactttaaaaattgaaacacaaaaatgttctgggaggttctattcattgtctgctttcctacatttgccctgattacaagactgagttccttgataattgaaaccatgtctctttatctagtgcctagcatagtgccaagcacacagtgtatgcacagcctattggtatgaaagagaacacaacttcattaattctcatatctctccagttcacaccccttcatctcctgtaaaacaccccttcccctacaattatttctgttagtctctaggtgtttcttgtattcaagagtatgtccacagtttgggtgcctctgtgcattccttctatctgagcatctgccatcattggtgctctgccatgccactgctgggaacatttgacccctctgggagcatcttcctaatagatcccataaactgcaaagccttatggttaccaaaatgatggtgtatatatatacttggagccttgcaaagcccctaatgaaagtatttccttcaccagctagaagtactctcctttagcgatcagattaaaacacacacccaggtgtgtgttttaaagaaaaaggacccaagagggaaaaa

SEQ ID NO: 55534 - DNA, 1753 bp, Homo sapiens
aaataattgtttttatctcatagagttgttgtgaagatttaatgaattagtaatatatgtaatatatgcctggaacagtgcctggcacaaagtaagctctacataaatgttagatgaatgttaggctaggtgtcattatgtttgattttttttttttttttttttttttttaatgagaatacccattatggtggactggacaagtatagaattcctgttgggaagccagtattgcaaaggggagacatgatagactcccatttagaaattgactgtttaatcctaaatatactttgaatttattgtttgttacctgttcaaagtttgtcactacccattcttaatttggagagctccagcaccaaataaccctactgtgtccttagctatcaaatgacctacagaaagtcatggaattgttgtgatggtgtctgctgtatataagtatcctatgtcttatgtcttcagctgacctgcttagtagtccgtaatttcatctccttattccctatcacattttctacatagtatgttccaaacatttttcattgtcctctgacaggcatctaatcccccatgttttgtaaggattgaaactgacagaaattttttttttttttttttgagacagagtctcactctgtcttccaagctggagtgcaatggtgtggtctcggctcactgcaacctccccttcctgggttcaagcgattctcctgcctcagcctcctgagtagctggaattacaggcgcctgccaccacacctggctaatttttgtatttttagtagagacggggtttcactgtgttggccaggctggtcttgaactcctgaccttgtaatccgttcgcctcagcttcccaagtagctaggaccacaggtgcacaccaccatacctatctaatttttctctgtgtgtgttgtgtgtgtgtagggactacaaggcatgagccaccaggcccggcctatttctccttctttgtctgccctttccaccttgccctttctccctcttctccactttttcccttctctcatctctctctgcatcaccaccacgtcagtacatattctttgcctgctaatgccatttcctctatctacttctgaaccctttaattttttactttagtctccattctacagaaactgctctgagtttactaatggttcctgagttacctggtccagtgtccttttccttgtccatgacttccgaatggcatttcacactgaagccaatcaaccacttctagaaattatcttttacttaggctgctgtcagcaacccctaattcttttttttttttagagatggagttttgctctttttgcccaggctggcgtacagtggcatgatctcagctcactgcaacctccgcctctcaggttcaagcgattttcctgcctcagcctctctagtagttgggattacaggtgcccaccaccacacctggctaatttttgtatttttagtagagatggggtttcaccatgttggccgggctggtcttgaactcctgacctcaggtaatccccctgccacagcctctcaaagtgctggggttacaggcttgagccattgcacccagccccctaattattcttactctatactaagttctttttttcccctacctttgtaaatgtaggcattcccccaaagttcataattcatttaatgcaggtaaagtaacacagacttcggtgtcacaaaaacagtgggtttggattctacctttaccacttcc

SEQ ID NO: 55535 - DNA, 1055 bp, Homo sapiens
cagatttattagaggaaaaagaaaatacatgtaagaacatattttgtggactataaagcgctattttttttttcttactttcccttggtgattgcatttccattcacctctcccacactaaagaagagttagtgtttctaactactaactagacatctccatctgtaatttccagtttgttaatgacaccaccatctttttagtcactcttgagttccttctttcctttgcccatcatttgcaatatactgctagactttgattgtacttctacattctgtgtgcaactcttcctttccattcccattaatataactctgacttgttgcctagattaatcctgtggcctcctaaccaagcttcagcttttcttcgttttatcttgaataccagtattgattattctcccacaatattagttctagtcatgttttgctgtctctccattgcctatagaataaaatcttaaacttcttactttacatctactattacatgacctaaatctaccatcctgttttgtctttcattagtccacttcacacacaccctttaaacctgacagtcttgttcactgaacaagtccttagtttcctgtcttgcctttattttcagtctctgcttatcagaatctcatctgtcttgtatgacccagcctaaatggcacccgccttgtaccccaaaccaagagcagtatttccctctgttttcattgtatcactgtctctggtagaacctaacatgttctgctttgttttcatatcccatgtgcactattgtgttctaagctcattttatgtgattctttgtctcccccaaggatttaacactctgcttttgtacaatgcatgttgtttaaattaaaagtgtttggagtctttaactatttttttttcccaacaataggtttatgctaaaactatcgatgggcaacagactattattgcatgtattgaaagccaccagtttcagcctaaaaacttctggtaagaagtagatattctcttctatttacatctgaaagaaaccagcagttgagacttggtttttaatcc

SEQ ID NO: 55536 - DNA, 1054 bp, Homo sapiens
attattattttttgggacagagtttcactccatcacccagactggagtgcagtgacgtgatctcagctaactgcaacctccacctcccagcccaggctgggttaattcctaaaaattataactagagagaatggcaggtgttttggaatataaatagccaagcagaagtagattgattgattgattgattgattgactgattgattgatttttgagatggagttttgctcttattgcccaggctggaggtgcaatggcatgatctcggctcttcgcaatctctggctcctgggttcaggtgattctcctgcctcggcctcccgagtagctgggattacaggcatgcgccatcacgcctagctaattttctatttttagtacaggcggggtttctccatgttggttaggctggtctcgatctcctgacctcaggtgatccacccgcctcggcctcccaaaatgctgggattacaggcgtgagccactgcacctggcccagaagtagatttttaatgctgatgtcagggtagacaggcagctgaataagatagctgttaactcatttgatgcctgtctggattgaagtttaatatcctagcagaggtttgactttctaaactcagggtgatttaatatttaagcctcactaactgtaaggtcagaataggtacaggtaaccgagaagatcagtacctaatcgtacctgtattatattatgtgaagctgtgctttaacaacaattaccaagagttgtctttttttttttttttttttttttttgagaaggaggagaaggaggagtctcgctctgtcgcccagcctggagtgcagtggtgcaatcttggctcactgcaacctctgcctcctgagttcaagcaattctcttgcctcagcctcccaagtagctgggattacaggcacacaccaccacgcccagctaatttttgtatttttagtagaggtgggatttcactatgttggccaggctggtcttgaactcctgacctcaggtgagccactgtgcccagccaagagttgtcttttttaatgctct

SEQ ID NO: 55537 - DNA, 1993 bp, Homo sapiens
tggtgagttctgtttctcataggtgacaccttctgcattctcacgtgacagaaggggtgaacactgtcctcatgaggtagaagagtggcaagagagcttgattgagcctcttttagaacggcactaatcccttgaaggcttcatcctcatgacctaatcacctcccaaaggcccctcctcttaatattatcccattgcatattggtccaacataagaattttgggaaggtaccaacattaaaatcatagcactagataaatggcattacctggactattgttctggcattatgtctccaatagcagctccttcgttttattttcttcatagcacaagtataatctttctaaaacattccttttcccgtgtgtcacctataataggataacatctgcattcttttttttccctaagatggggatcttgctatattgcccaggctggtcttaaacttctggcctcaagtgatcctcccgtcttagcctcctgagtagtctgaattcttaacatggtttataaggtgctttgttcttcacagtctgtgtttccacttcatagcaatgtctcctgccacactccttttttacacatattcatatgcagtgagttctttgttcttctccaaattaaaccagttatactccattctgttatacttttttatctccttggtgtagatgtcattctctacctgtctacttaggtgacaactactgttttcaagatcctattcaaatgcacaaaaggataccctcatcctattgtgtatgaccaattagtagccttgtcaaggtgactaaacctatcttaagttgccaaaacttaacctaaaatgtcattgacttgttagtctcttctcctttttgctaattgtttgcataattgtagcacttcactttaccttacatattcagaactacttttatcttactttttaaaaatatctgatttaccaataaaatatttgtttttctgtcctgtctttaaccctcaatgtgacttttcctgtacctggtcagttctgcttaccaacattgatgataatgtatatggagaaatgtgccaaatattaggtatgaggatccattaaaattccttggttttcacagagaaaaactaatgtttaataactttaattattttaatattgttaagagtgggatctcatttacctttgtattcacaatgcctagcacagtgcttagaatgtgaaaagcatgtaataaatgtttcttgaacttaataatcagttttccttgctaaggaaaaagcgttcttaaacttaagtgttctgtggattaattaaccaccattgtgaattaccactgcttatattaattatttgttcagagttggtaaaatggctcatcaacttaaagatagcttaaagcatggatttgtgtcctaaataacaggtttctctatgaacttcccctaaaaaggctcaaacattgtctcacacaggttcactattatgaagatggcaatgttcagttggttagtcataaagatgtacaggattcactaactgtttcggtgagtatggaatatttagtgtctgtcttactcatgtctcgtttttctttaaaaaattagttttgatcctgagtgctgattctgccagtagaaattcagtttgcttttaatgttttgattttggccacttctgttagtgcctcttatcaccaaccagcatatattagttcacagtttttgactcacaatattgattatgactttagacaaatgtccttcttagtcgctctctcaattgtaatagttactcaaggacagcaataccttcattcaataaataccaagagcaaggaaagtttaccaaactgcatcctatagggctgcatttatatcattagagaaacaacatttttaggagtattcaattagaatgttttgtggtttggtggtggtggtctatttgagacaggaattcactctgttgcctaggctggagtgcaaggaaggacatgatca

SEQ ID NO: 55538 - DNA, 2317 bp, Homo sapiens
gcattacttttctgttcacaaccagccccatttctgttcaagcaactcatcttcaattatctattgcagacagcaattagtgaaaactatcaaacaatgtcagataccacattcaaggccttgcgccggcagcttccagttacccgcaccaaaatcgactggaacaagatactcagctacaagattggcaaagaaatgcagaatgcttaaaggctgaatgtaggattcttcagtatgtggaaagacaaggattcaacgtgtggtcatatgataaataagtgatttataaacaagagtgatattttgctagggctttcaaagttaaccggttttctagcctcatggaatactgttgaacctatagcgttgtcttgattcttttgtgttctctgccttgtaattttctgttactgctatatctacgtgtaaatctttttttctttttttttttttttttttggttaattctgccacatttaatgttggtgagagagtgatctatcctaatgacattttactgtttaaaaaagtttcctagccatgaagccctgctactgatttagacaaggtattatggtcattactttgtacccctatccttccaagcacttctggtacttcagtcgtttttactgatccaccaacacctaaagaggctatgctacagtctctagctaaatggaagacacattcatccttctccctctgactgctttgatcatcatttattgcatctcataactaattttctaaagtttggattgggacttttcaggtcctttttggagggcaaaggaagtgccagcttctctggggaacttgtttttaaatccaaagacttgaaccacattccctgcacatgaacatgtttgcttttatcccttctctcattgtctccttcccatcttagtaccattgtagttataaacatctgcattttttagaagcattttacccatttatttttttaaacattcaagaactgctgacgtactgtggatgtagagtataaaacttgaaaaatgcagatgttgaaggaataataggtatcttgtgctttaatactttatggcaggattgtactataagcaaatgaattaaacagctatgtaaatcataaagaaaaactaaaaatgaaccaaagtgaaaggataacttccaggcagtatctttctattgtaacctgttatttaaggaaatactagtgatttcttctaaataggatgtaaaacttctttcaaattactcttcctcagtcctgcctgccaagaactcaagtgtaactgtgataaaataacctttcccaggtatattggcaggtatgtgtgtaatctcagaatacacaggtgacatagatatgatatgacaactggtaatggtggattcatttacattgtttacacttctatgaccaggccttaagggaaggtcagttttttaaaaaaccaagtagtgtcttcctacctatctccagatacatgtcaaaaaaagaaaggtgtttgtgcttccgttttgtttctgctcagtaatatagtcaagcaagtttgttccaggtgacccattgagctgtgtatgcatttttgtttatttcaataaaatatatttgtattatttgtccttcatactatccatccataccacactatcttctgtatcaggtagtctaatagaaatatacctgttttgttctaaaattgtctgagtctctcctttttgattcatcgcttcagccttggttctcaaggtaagatattcagctgtatttgatcttatgttgagaatgtttagggtttctaaaattggtttctaccttcaactatttatagactctgaatatccacagatttgcaaagaacagctttttaaagcgtgagcaatgtctatggatcatactgctcttcactcaaagactacccatgtttcaaagggaaaaatgtagttgtcttctgtacctgtcactcagaaagcaaggcccaagtacagttgtagtcactaggcagaagtagaaatgaaagaatccctgccttaaacttggtaatatttcacattgcgttatcttgaaatgctgctttcctctccttagctggcctagctacaaacttgtgggagaggcttttatcctggttcccaaaagaaaaccagagggagtttttatgcttcaagtactccatccaaggccagttcaaattcccacctttttgaggaatatttagctgcattccattctatttgtaatgcaaatagattgaaacattcttgcttttaatttattaactctctcatcctgcccctgctatcccattgattccttagctta

SEQ ID NO: 55539 - DNA, 1077 bp, Homo sapiens
cagccgacctagatcccagccctgccctttgctctcctgcttttcactgagtcccgaggctctggagggtgggcgtgagggtagccctggctgaggctcggaggtcctcccgggctgttcagagggccccaagcggtagccacgttctgatactggctagaagccaggggagggagcttggggtaaggggagggccctgagggaggggtcagacgctttaggaaagagttaatgcgaagagggggaggggataggacgaagaaaccgaagggaaagctcaggtaagaaaagaacggaggagggaagcctggtggggagaagggagcccgcaggatcaggggtcagagttagggggcttccctcctgctgcaccctcatctcagggccgccaacttccagctgcagcggcgactttcagtttcatttccacggaccctcctgcctgggccgcagccgccgccgcgatgcccagtaagttcagctgccggcagctccgggaggcgggccagtgtttcgagagtttcctggtcgttcggggactggacatggagacagatcgcgagcggctgcggaccatttataaccgcgacttcaagatcaggtacgggccggcccactcccggccccgaatcgcgggcccagcttgctgccacgacccccgcgcgagggccacctttcccgccccggggcgcagagggacgcagctcccccagcggctcaggccagtcccggggcggcgcagacctcccctcccgcgcctcgcccacgccccaccagcgccgcccggagcccgccagttctgcccgagctgggcccctgcgccaagtcgccgcggagagcctcccgcgctgcccgcgcccccggaggccggaacccggggccgggagctgcgtcccgcgtccatgcgccgctcgcgggggctgagggacagcgctcgcggtgggggaggggagcctccagagggggcccaggcatcgcgggagcgcgggttagaggctgcctgttgggggctgcgagcccgagcgcgggctttacagggacctctgccaccttgttgaggcgctgctgcctcggggg

SEQ ID NO: 55540 - DNA, 2272 bp, Homo sapiens
gtctggaatatcgttttcactaatggttatcacatttggagagggatattaacaggcttgaacaacatctgagaaggggcaaagatgatgaggccctgttttatgtcaccatgctggacactatggggactcttaagatgaaaaacacacaatcccagaggagcatcagaggctatgatatgcatgcaatatacatgtacacaatataggatagtacatggtaaaatggaggattatactagggatggtaagagaaaaatgctggaggaaagagcgagcatttgcatcacatggtatcaacacttaaggtatgtgaattcacctatatccacagagtacaacatggctaggaaacaagtcacctacttcttttggctctgttaaggaaaaagtaattggttaaaacagtaaggctgacttgactcaaggctatggtaatagggtattgcaataggaaagaagagagttggagctcaattccgaatacagcaaaaacagcgggggatttatgaccaatgaacagagtaaggggatcaatatatagaaaattactaagaggagtcataaagagtgggaggatttttgctcacctgacctaacaagattcttgttaaaggcagaccaaggacttgtacatcaaaggcgggaatgaggaacttgatcagatatcaagcgtggtcatgcatcaagggtgaggagtctcactaaaatgacttcagtattcttgctaaaactgaactaggtgggcctaagactgaagggtttggggaggcaaggtcaagggctagtcaaaaagagggctcaggggagtctaacaaaagtttgatcaaggagagtctttgtcagctctaaaccaaaggtacatagtatgttttagtactggggaaaaactggttgtgttggattgcatacagaaagccagatatactgtatattatgggtgaatgtaggcattttccaaagtagtttttactgtatgcacttgtgtttatgcagataagataccactcctctgtaatcattaggggatgtgatggagaagatggcattgactttagccttgaaagagataaaattttagtacatagaggaggtggaaaggccttctatgtgggttcatattctatcctgagacccagtgaaagaaactcagaaatatttgcctcaaaaatagaaaaatcagacagtacaaggtaattatccttgactattttggagtgttataatggataagattgcactcctgtgtcactccagaagacagaagcgggtttcatcaactatccccgctctgtaccctcatcatgttggggaaatgtatgttcagattaaagaacttgcctacacatcctttaaagccaggctggaatgctgtgaagtcaaccttcatttcccagtaggaattacttgctttttctctgggctctcatggctcattctttataccttgggtatagcctggtattatggtcacgttacactctgctttatggcacgtggtcatctcctcctggtaccaaatcattgtaatatgctaaagccagtgtattatgctagccacgcaaatgctagatcctctacctttagtcaggtttatatctgtctgcagtccccagcatagagctttgtatgtagtagatgctcaataaatgcttgcagaatctaagtgaactagcaactagagttaactaacaagagaatgggccatatagcggggggtatagcaagtcacactctttaggaattctaggagattcctacactgagaggggataggtctctccagctaggttattttatgatgttataaagtgctctgctctgaactcttgccttttcccacctacctttattcatttagcaaatatagttaatgaggctctactgtgtgcctgtgccttggtccttgcctccaaagaatataatctagtaaagagcagcagatatgtgtagacaaacaaatgcaatacagtagtataggtgctagtaatggtgtttagatagccctgccatttagtggttgcatttaactttgaacaactctctaaattttccatttccccaactgtaagagtatgtaaaatagtacctttctctcggggttgtgagagaccaaaatgagttgtcctaggcaaagcatttgtgtggctagcatattacactggctttgttaagtggtacccctcattagtgcgatgatgattaggagtccattgtatggggtaaggactgatgtcacgaaaaggtttctgagagaagatgattcttgctt

SEQ ID NO: 55541 - DNA, 1030 bp, Homo sapiens
ggccatccggggcctgcattccctactggccccgttcgaagataagcagttacctgcttcagacagggcatgcacttcccagtttgttcagtccccacaaagccctctttctgcccagcattgatctgggagcctggagccacttttcttggaggttgcactttgttttcttagcgttgtgagggatatgcatgcagtattcttacactagtgactctcaaaaatggactgaacaggtgtctgaaagggctgcaaggatcaagatacctgtgaagcatagctgctgtaggcattagcttgtgcctcgatccatgggactttgatggactctaagaagcccttgtgaaagttactgatgatctcctgatttcagtccctgtattactggacccctcagcagcttttgatcctgatacctgattttgagactttgctgattctcctttctctcttgagggtttcttgttttcccttcctccccgggttgtgctagtagctgctctcaactactcacactccctggggagattcctacacttccttgattataaccactacctggggactccctaatactaggctgtaaccttgactttggcctgagttctcagcttctgactcgtggagctggttgcctctggaccacaggaatctcaaacgcatcatatccaaatccaaatgtcatggtcagtccctccaacccctcctcctcttgtcttacatcctatctcagagatagtcctagaagccaggccattgatttggggatcctagactcatccctcttcccagccttcattcccccttctgtcagtcaccaaatttctgctaattttacattctaagtattagcgaatcttgccgctcttcttctgtatctctacccactgccttgctcaggcctttgttatcttttaactggacaattgcaagggccttcttctaactggtctccctgcctacagtcttgcctccagcaaatccatcctccaatcctgatgccagagtgatctgaaatgcaaatatgatc

SEQ ID NO: 55542 - DNA, 1062 bp, Homo sapiens
gcccctccgacgcttgttcttgcggacctggaggccagcccgagtggccatctcaaacacctcccgcactccctccttggtcttggctgagcactcaaggtagccaaaggcactgatccggttcgccatgtcccggccttcctcagaccgaacgggctcctgagaagacataagatgaggggtcaaaggaagctgttgactacatgaacctctcctgcctcacccataagtgtagcagctggaacaaatgcctccttctccagccctgacccagaaagcgcccaggccccagctaccctgggcagcttcgtggccagggatccaaaaatccctccagtctactccctccattcccatgcagccccacctcctcccacacacagcccctggttctcttgcctgaatgagcgtctcccacctcctgactgctctgcctccatcctcactctcttccagtcagaattatttttctaacacacagacctaacatctccccagtttgaaactttgccataattatctttgcatttcttatcctgacagctttctctaataaactctagtcctctggctagagagccacttacaggtccctgaataagccagctctcacatcccttcttccagccacttacacaatgcctgccctcattcccgcatccacatccctacacctcccccaggggcactctgatggcacagcctgggtatcccaagtgaaacataagctgtctccccgagggcagattttcttaatcatcttaatagtcccaattctgaacggaatggacaattaactggaataaataaaaatgccaagtgactttggacaagtcacttcattctgatacctcatcagacacaaccctatgggtcctccctcaccaggagatattactgtttcccctaacacacggcagtagctggagagaagttccctttgcccgtctgcaacccctcagagggtgcattcttccccaggggctccagcctggcagccgtacccacctgcttcatcttggccagctctctcctggtgtgctcgtcttgcctcaggtcctt

SEQ ID NO: 55543 - DNA, 1043 bp, Homo sapiens
accccgccccccagtcactgaatgacctagtatgtccttccccattcctacccctgtctttgcttcattctccctgctggaaccagtaaaagttaggaagtaaatctgcagtcttaaaaaacctggatatactttctggttctcccacagactggctctgtaacctgggccgagtccctttgcctctgggtttaagctcccccacctgcaaaatggggatgatggtaagacctccctcaaagggttgttgtgagaattaaccaaaataatggtgctcacagtggcaactcaagggtcaaacacgtcttagatttctttaacaaactgacctaatttatgttgtgggacagtgattaatataatgcctggtgcatagcaggtgctcaaataaagaagttcagtgagcccgaaggacagtggtttcaggggacctttgggtggcagggttggggccctcaggccagctactcactggccctgtgtgtcaggtggagctggctctgtgggacacagcagggcaggaagactatgatcgactgcggcctctctcctacccggacactgatgtcatcctcatgtgcttctccatcgacagccctgacagcctgggtgaggggattggagggaggggactgagaaccccttggaatcagccagaggtctcgtgccttggcctgtcttcagtcatcttcagaggtgggggtggggatgcaggggagcactcaggccctgttggtctcctttactgtggtaactggccctctgagggcatactactgttgaggttttgagctgtgaaagggaccatcatgctgaatggcttctaagactgctctgggaagatgagggcccccccaggggagctttctagcttaagtggaggcaccgacacctgttggtgcatgtctacacagaaaacattcctgagaagtggaccccagaggtgaagcacttctgccccaacgtgcccatcatcctggtggggaataagaaggacctgaggcaagacgagcacaccaggagagagctggccaagatgaagc

SEQ ID NO: 55544 - DNA, 1143 bp, Homo sapiens
ccacttgggagctggaaaacatgagtttcaatctaatccacttgccaacctggggactccaggtagctagagagctgctcagggatgcgggacgtccagggagcaagcttctatctacttcacacatcagggtttcgagtcagacttcattggttaccaggattttgatgcatttacagtttaataatctctaaggtccaatctagaacagactgtccctcagcacaagtcatacctgtccagtcacaaatgaggagtccctctctaggaccagagtagcagaaccagctaccaggtggtaggtgggtaaaggaagaatagttatagagcccctaggtgccaggcactctgtcgggcattttggcaggaattatctccttcggtacccagatgcctggaaggtagatggtgcactttccattttgacaaaccaggaaactaaggctcagtgaggttaagacagattcagagctgtggcttataaggggcagggacagcacccaaagcaggactgtgtgactcaaagtcgtgcctcttcgacatgtcacctcaggggcaggagggagagcagaagcagggaaacccagacagaggacaggggtagcagccagccagcttccctggtccaccccacccggtccccaaagccccaagtaatacaaaggaggctcagtcccagcaatgcccacagctcgagtttgggcaggctgccttcctccccccttcctcctaggcctgccagcaacactgggtcactcagcccccggcaggggacaatgaccacactgtagggagccacacatctaccacagcacagtgactgagaagaatccaccagggaatcacctccacccactctggaacagccccttcctccctcagtccagctcacccgcatgccctgcccacccctccctgtgactcagggcaaggagtcagcttcccgggcttccatgtgtcccccacccccagcacacacagcgagcatctgcacagttcatcacaccttcgcagcttccctcacttcctccttccctggggaggggaactgacctccagccggctgaagttcccaggctgcaggaagagagggcgggctctggagctgagatgaagtcaaggctgttgggaagggggaggggg

SEQ ID NO: 55545 - DNA, 1820 bp, Homo sapiens
tcttaccgtagttcccctccccctccacacccagaaatagcccgcgacaccaggaggccgccagcttccccaggagcggggagggggacgcccggggtagaggagggtcccatttagatgcccttcagcctgccaactcgtgctggcctggcaaagaagcggaccccctgcccggagcggccggctggcccccgggctgtgtgtattttaaatgcatctgccgggaacgcagagcaccgagggagatgggggcgctcagttcgctgaggaaggtggctggtggcccatggacccaccaccacctcccttagcctcctgtgtgggaggagtttatgggtatgtggctcctgcccagtccaggtgggctttcacttctactctatttcagttcctctttcccgatctgggctggagagcttcctcattgttaaggcagcagaaactttcgctggatggttttaggataagggtgggtgtgcccatgaggatgaggtgctggggacaaggcactgggagagttgatagtggttgagggtgggatgtagggtctagctagcagggaagtaaaacttctgctaccaactagcccctcccccagaagcaccactaggaatgcctttttcttttttcttttttttttgccagggatgggggaagtgaggcaggcaggggacatagcggttggccagaagctcctgctggcctttctgtgaagtggtagggctggccacccaaacagtactccttacaccttgccagccctcccttctcctcctccctctggcctggatcccaggtggctgtgacctttctcagcttggccagcgggcgcaggagacggtgtgtgtctaaggtgggggttattccaggacctggtctggtgtccaacctgatgtggtcattctggcctggcagggtcatcaatgctggcaagagtcggcacaatgaggaccaggcttgctgtgaagtggtgtatgtggaaggtcggaggagtgttacaggagtacctagggagcctagccgaggccaggtaagacccatcccctttcccagagacacagtgacacctctccccagggactcaggcctctggttttaaatctgagccatgcggaagacctgatgaactcactggctatctaccttctggcacagaacctttacctggtattcatcagttagattctaccatgtaagcatgaatgttactttcccacctaaaatgtagaggctcacatatttatggatgatttaattgccagtgctgagttttggatctgttatcctctgagtttgggtttttgagcctttcctttctcttgacacatacgaagccttatgtgaataaacctaatttgccttcagtagcaaacactgacctctcagatgtttgtatggatgcccagagtcttgttattcaccttgcataacacacacacacacacacacacacacacacacaaacaaaactcacctccaacttttcctccaccagggactctgcttctactactggggcctatttgatgggcatgcagggggcggagctgctgaaatggcctcacggctcctgcatcgccatatccgagagcagctaaaggacctggtagagatacttcaggacccttcgccaccacccctctgcctcccaaccactccggggaccccagattcctccgatccctctcacttgcttggccctcagtcctgctggtcttcacagaaggaagtgagccacgagagcctggtagtgggggccgttgagaatgccttccagctcatggtgagtgggtgacctgggccaagagcctgctaggcaa

SEQ ID NO: 55546 - DNA, 3395 bp, Homo sapiens
cactttaaggaaagctttcttgaccccacttctttcaaactctcctggtagtacttgtcacagtttgtgtagttacttgattaacatctcttgtccactgaactgtggatcctctgttcacccttatcctcagggcttagctgagccagtgcctggtatatgataaaggctcaataaatattgttgaatgaatgatgccctgagttagaaagccatatggaatcatatttaaattggttgtattaagtcctgtttaagcatagagtagaattttcccagagataccagttcaatgagatgctaataaattttacagtaatgaaagttacatgaccaaaataaaatttgtaaacatcaaattaaatagggttctttactaccagacttcacaaagcctttatgagaaaataatatgccatttatcaattcatttgacttttgaaacattaaagcagtatccttgtagcacatgcttaagggtgcagacttccgagtcagactttctaggtttaaagccaagtcatttcacttattagttttgtgaccatggacaaattagctaacatctctgtaatttagtttttaaatctgtccagtgaggatgataatagaatctgcctgttataaagattaagcacttagaatgggtgtaagatattgcttttaaatttttagcactggacaagtgtttacaggaatactctttgggaaatgctgagagagaaagagcattggcctgggtaaatgggacagcactatggccttggacaagactcccaagcctcttttagcaacacttatttctatagtgtattaagagaattgactctaggtgatcactacgtctcttccatttccagtttgccaagagttaactattttcaagttactaaaaataacagaatatgcaaaggccacttaaaatccatgatgcattataaacagaggatcagctaattttcagcaattccttatactaattcatcattttgggactctttaaagattggattgacatctttctgaatggatccttaagctttgcttgggggaaaaaaaaactgtttactcttagaaacaactgtttgtgttgttttacatatttaggtcggctcaatgacatgtatggagactacaaatacacatactgggcatgtggcgtcgtcctaattatttcaggtatctatctcttcattggcatgggcatcaattatcgacttttggcaaaagaacagaaagcaaacgagcagaaaaaggaaagtaaagaggaagagaccagtatagatgttgctgggaagccaaatgaagttaccaaagcagcagaatctccggaccagaaagacacagatggagggcccaaggaggaggaaagtccagtctgaatccatggggctgaagggtaaattgagcagttcatgacccaggatatctgaaaatattctactggcctgtaatctaccagtggtgctcaatgcaaatagtagacatttgtgtggaaatcataccagttgttcattgatgggatttttgtttgactccttaccaatagcctgaatttgaggagggaatgattggtagcaaaggatgggggaaagaagtaggttctgttttgttttgttttaatcttagcttttaatagtgtcataaagattataatatgtgccttaagttttagtctttagaactctagagagccttaacttcttaaaccatttttgctgaattcatctatttcgagtgttgtgttaaaaggaaaaataacaactaacttgtttgaggcaaatctaaaatttaaaattaatcttgcttcattgttacatgtaatatatttcagacattttcactggaagatttatgaacagaaatattggttgaaagttagagattttacaaaatgctgacaaaaatattttcctagcatcagtagatttctggcatatgtttctgctagctatatatttaggaaattcaaagcataaaactttggcaacatcttggctgttctagacacagtgtacttgtcaacccctctcaggtaccttttcttgggatgcttattagaagccaagtaaagtgcttaaggtttgttttcattaaattagctatttctgctcccctgttcaaagatgcattttgagtgtttatagatcactgccctttttgaaatcacctggtattatttttcttactggaaaagttagtattaaaatctacagaactacatatttgtgcctccttggtaaatacaacacatctaattaaatgtagacagatatttcaaacatcagctgaattcacttaagtttttccaaaacctcagttaaactgtgaagctattggaatttttttttcctggaatttttcccctttgattcacagtggtcccatttatatctgcttctagcttagtgctatgtgtgagatatgtgtgtgtttggtgtttttgtttttttgtttttttttttttaaggtttgcaaattaaaaagggccagaaaaatttggcaccaggcaaacgaataaagataggattgggaaagaagttgctaagtgtgcttagttttaataagtaattccttctcttttttcagagaaggccttacagaaaattgttgtgcttagaattgctggatgcatttttaccctccacacaaacctaaaaattttgtgacccctttcacttacctgaaaagtagagaaatggattcagtataaggataaggagggaaggtggaccagaatgaaaactgtaaatatttttttaacctaatatcacttaaatcgaggcagaaagatacagacattcaatgaattatattcaatgcatttaaaataccactgtaattgacagagtaaaagtatagatacaaaaccttgtgtaagaggctgacttttccaaataaacattttttaagaaaacatttcttctcccaaatgtctattttcttgaggaaaatattgctgtgtcttcattttcattaccaggtttcattttgggccttgctaaattgattgaattaaatcctccagcttttgaaccttgatatttgtgtatatgatttattttcatttgaatttctcctttcctcttctttgctgtaaggcaaggaggaggggaattttaaaaccatcttatttgaactgagagcatccagagcagttaaccttaaggaaacaatgaaaaactccctttgtatgcctgggcatcatggcagatagaggaagagtgttagaggagaaaactgctgctgagagtattggcaggcttggcctcagtttggactctgtaattttctttggacccaagtctgtaacctctgcgtacttcttctctcttaccttctataaaaatgaggattactgttggtgagggaataaggaatgtaagtaaaggaaa

SEQ ID NO: 55547 - DNA, 1777 bp, Homo sapiens
gacttaatgatcttatatggttataataatccttccggtgattttgttagattagacaaaatagttattcaccttcaaataataaaaacaacaataataaaaataacatgtattaagtgcttactacatactgggcactgggtactaagtgcttaacaaatcttttcttcctcacaacagtgacctgtgcccgttttacatattaggaagcagtcataggagggtatacatgtctgagattatgcaaccagtaagcactgatactgagatttgaacccatgtctgttttagaagtcatactttaaaccactacataacatgtcctctaataatgaggatttatatcctattccttccattatttatacctcttattatttatttatttatttatttatttatttatttatttatttatttattgtcttcacaggtcttgggcttgccttcaacttgaatccagctctgaccatgattggcaagtatttctacaagaggcgaccattggccaacggactggccatggcaggcagccctgtgttcctctgtactctggcccccctcaatcaggttttcttcggtatctttggatggagaggaagctttctaattcttgggggcttgctactaaactgctgtgttgctggagccctcatgcgaccaatcgggcccaagccaaccaaggcagggaaagataagtctaaagcatcccttgagaaagctggaaaatctggtgtgaaaaaagatctgcatgatgcaaatacagatcttattggaagacaccctaaacaagagaaacgatcagtcttccaaacaattaatcagttcctggacttaaccctattcacccacagaggctttttgctatacctctctggaaatgtgatcatgttttttggactctttgcacctttggtgtttcttagtagttatgggaagagtcagcattattctagtgagaagtctgccttccttctttccattctggcttttgttgacatggtagcccgaccatctatgggacttgtagccaacacaaagccaataagacctcgaattcagtatttctttgcggcttccgttgttgcaaatggagtgtgtcatatgctagcacctttatccactacctatgttggattctgtgtctatgcgggattctttggatttgccttcgggtggctcagctccgtattgtttgaaacattgatggaccttgttggaccccagaggttctccagcgctgtgggattggtgaccattgtggaatgctgtcctgtcctcctggggccaccacttttaggtatagtatatctccctactaatgtgggtctattacaaaacaagcatgtaagatgggaatgctgacagaaagcaaacattagtgagctatttgggtaagaataaatctttctcatttatgtacccttgatgctgggacaatgcttggcacagcataattgctcaaatatagaatctaattaaatggaaccatcaaggcaaaagggggatcaaatattgttacaaatgtcagtgttttttctttttttttgagatggagtcttgctctgttgcccaggctggagtgcagtggcaccatctcagctcactgcaacctccgcctcccaggttcaagcgattcccctgcctcagcctcccggtagctgggattacagatgcatgccaccatgcctggccaatttttatatctttaatagagacagggtttcgccatgttggccaggctggtctctaactcctgacctcaaacgatccactt

SEQ ID NO: 55548 - DNA, 1563 bp, Homo sapiens
cacgcctggctaatttttgtatttttagtcgagacggggtttcgccatgttggccaggctggtcttgaactcctgacctcgggtgatccacctgccccagcctcccaaagtgctgggattacaggcgtgagctactgcgcccagccactttctacatacatgttaatcgtatcctagatacatcaagaaccttgtgaacatccattaccaaggtgttttcagcctgccctgccataaaagagaaagattaaggataacttcaggtcttttgtattttagtaaaattccatccagtatttttagatttagaacctgcacaattaattatgttttctaacatctttattttagtacacatgtgactcagaagtaattatagaaaacaatattcttatcattgctgcttgtttattttggaggatttgtcattcattgtcattcatacttgtgtagatgtgagggagcagtttcctttatattactacatttttggttgtcttttaggtcctatcagcagtatcctggtgaataaatatggaagtcgtatagtcatgattgttggtggctgcttgtcaggctgtggcttgattgcagcttctttctgtaacaccgtacagcaactatacgtctgtattggagtcattggaggtgagttactactgattcatttggaagcattagtttatggctggctattttgtatttacctgcattcatctttcagatctctggagtgaaattcttttcttatagaaatgacttgattatcattttgaagaactagagataaaagtactagaaaagcaaacttttaaagaaattgccattatataatggatatttattgtttgtcgaatgagtgaatgaattgaaagaatgattgcattccttgtcctaagaatagccagtagtggtagatacaatgtgtgtggcaacttggtgcgagagtggcaatttgatagaatgtccacataacatttctgaggggtagaggatacgcttcataattcctccccccattttaaaaatcactaaattaagataatgaactgttgatgagcataatgaataaaagttacccataacctcacaatccaaagaatatcattaacatttctatgtatatccttccatgtgtttttctatgcacagatacacctttttttgagcaaaaaaggatcaaattatgtctaatattttataaccagatttttgtcagtattaagttgaaagttttgtgaacatgaatatattcttcgtataaatttgtagaaagggaactgctgtgtgtttgttttaatatatgtatgctaaattgtcctccaaaaaagttatactcacttattatcccaccacaatatatcagagattccaagattatcccttttgtcaacaatgggatattgccttttttaaaaaaataattgccagtttaacacgtgagaacagtatctcttggttttaatccttattttcttttcttttttttttttttttgagacggagtctcgctctgtctcccaggctggagtgcagtggcgcgatctcagctcactgcaagct

SEQ ID NO: 55549 - DNA, 1807 bp, Homo sapiens
gacaggatcttgctctttcacccaggctgcagtgcagtggtgcaatcacagctccctgcagccactacctcccaggttcaagtgatcctctcacctcagcctcccaagtaactgggaccacagacacacaccaccatgtctggctaattttttaatttttttgtaaagttggggtctacttatgttgcccagggtggtctcaaactcctgagtacaagtgatcctcctgcctcagcctcctgagtagctgggactataggcatgctccaccatacccagctaattttttaaaaattttcttagacacaggatctgtgttgcccgggctgtcttgaactcctggcctcaaatgatcctcctgcctcaacctcccaagtagctgggattactaataggcatgatccaccacgattggctatatttcttatttcacaaaagagttttataggtgtgccttatattgacatactattttaattttatgtctttcagatatttggatttgacctgcattttggaatttatctacacttaaaatgccaccagcagttggaggtccagttggatacacccccccagatggaggctggggctgggcagtggtaattggagctttcatttccatcggcttctcttatgcatttcccaaatcaattactgtcttcttcaaagagattgaaggtatattccatgccaccaccagcgaagtgtcatggatatcctccataatgttggctgtcatgtatggtggaggtaagtacccattaaggcctgctcttttaattttcatgaagcagccagagtgtctgtattaggtaactttaaaaaaaaaaaaaagtcttattcagtgagatgttttgaaatgttatttcttaaagtttggtgtttagagtcacatttttcattcctgataacaatagcaactcttgctatagtatactgtagtatttcaaaacagaaatgagaaaattgtgagggaccttgatttgctccaactgatgtatcattgagtttaaaagactgttataaaaatgatgtattcacagctgtattttttttgttgatctctgctggactcttgaaatgtaaacataaatatagatttttaaaaattgatgttgggaggattaaaataaatcagactagcctgaatggcatggttcagattctcaggtaaaatctttatatgatgttagaattaactgaaaaaacctcctccgtattacttgcgatgttatgagtcctaaaagcatttcagctgcaccctaaacttaaattttaccatttatttctcttttgttttttttggcatattgtaaaggaaatgttggaagtaagttgctcacttaacatcatctaaaatactgtttctagccaatgtaatgattcttggtttcaactataaataacttagccttaggctgctaaggtggtgccagagtcaaccaatatctgtcaagttctatgaatatattcagcactgggctaggtattgtgagtgacagaaaacactgatcccttcctttgagaagtttataatccttttgagacagtaatatatgatcgtgaaacaggaataagcagttgaaatcataatttcattaagcctgtaattaaatcgtccagaagaaacaggtaactggctgccatggagaaagagaaactgggtgactgggaacaggattaggaagacttatgtttccactgtttatctttttgtgccttttacattttgaacataggcctattttgtctatcaaattaaagaacctaagtgcttaattgtagtgtttttttttaataagtt

SEQ ID NO: 55550 - DNA, 2238 bp, Homo sapiens
ctttagcagcaatagcttcaggaaatcagcctttctggatttgaatgtttccatgtgtttgaaacctaaaactagtttacactcattaacagattattttaaggttattggttttagatactttctgcttcttttaagttcacaaactggtcattgtcattttaggaaaagacagtggcttcattttaaatgttgatgaggaaagtgtacagaacatgatgaatactattttcaaggcttttgtagctcttctctttgggagtggggcaaggacatggcaggtatggagcacagcttcggctttccagattagtttactagcacaattcatgagagttacgagaaaaaaatatcagaaaatctagaaggtgattcttatcaccgtcattgccaagaaaagttagggttattgttttctatcatcctttagaagatgaattaatgaagaatttttctcattaccctatcactttgttttttagtctccccatcactcttgggcagtaatagctaagctgataggaaagctactgtgcatattgtaaggattaaaatcttaaactttagtcccttttagcctctgggctttagcatacaaagaatgcatgtgctctgctttctcaagggaactctgagtactctgcaagggggcctgctctcataatttactttttgaatgagcccttctgtttatagctgagatttgccagttaaaaaaggaaataatatgcttagataatattaactgacttttttttttcagttatgtaccatcagtatttttaagttaacagggatagccatttgtcaggtggtggcagaattgtgttgaatctgtgtgtggttttttgaagtgttctgtttttcataatgattttgcatgctcttatttcttatactttcttatttccttttaaatttttctaaagtttcttgaggctttaaatctaattttggcactgtggaataaggtattaacttgatgaggcaagctttagtgactaaaaattgtaactgccttaattgggacaaatcatagctggcagctaaactcaaagtttaatcacgtccagcacgtattagctgttctagtcagagcttgatgtgttaaacagccctactgtctgtgtgtgggtgttctatgtgtgtaaatattctgagatgaattaatctttttagtggttctttgaaattttttaagtgttctcttttttcatacttagaagaagaaaaagctcataaaatcaatgcctgcagcagttttatttaacatcattttagaattcaggctgttgctgttagcagagctgacctgttaaatagcttttaatcatattcattccagtagaaattttaggaaaccttaacttgtaaatatttttatctcacccaaatcctaggtagatgaaatgccctaggacaaagaccttcaatttttaaactgggttatatttttgaaggaattattctgcacatcctcaggttgagagataaccttagctaaaaattacctcttgagaatggatgcctgatctctactttttcttttccaacttgagttatccaaaagccttttactcccactacaaaagagaggtgtatctcttattcatcccatttcttatggtggttcactgtcctaagcaataaaaatctcaaaggaagggaaaattccagaatgcatagtcctagagagagtcccatgatagaaatccaaaaagagattaggtcagaaatattggagaatattgaaaaattatttcatctggacaacaaactcctgccttctccttttttttttttttttttttttttgagacagagtcatgctgtgtcacctagactgagcaacctctgtctcccagagtcaagcaattctcctgcctcagcctcccaagtagctgggattacaggtgcctgccgccatgcccagctaatttttgtatttttagtagagttggggtttcaccattttgaccaggcaggtctcgaactcctgacctcaagtgatccacccgcctcggcctcccaaagtgtttggattacaggcatgagccactgcccccggctgccttctctaagttagaattattattataaaaatgagatagttatcacagagatgtgtatcaacacatttatttgaattaaaatgaagtgtgcttttgtttaacagaaatctcttttacttgattggtttgaaaatgaggactggccagctatttcctgtaagttaca

SEQ ID NO: 55551 - DNA, 1034 bp, Homo sapiens
actagaatacctctataaagagaggtacagtttgaataggaaggacaagttaaagtttatgttttaatacaatatgctatgttattgagacactgtcgttttctggaaatgtatttaaatgtattgaggtatatcctcttaaaaggccactattttaagttgtaaaagtgtttttagcacttgatgttaacatttcaaatggcttttagtatttagaatatttaaaatttttgtccttaaatttatggcgtttcttttggtctttcatgctctttcttggaggactttgctgttcccacagcttttagagaatacctagtagaatcactactaaatccaaatctttagctataaaaggattccagattgtaagttcctcaaggacaggggttgaacactcttattgatgatctgcttttccagttgcttcttgggcattttgaacttaatatgtcacttaaagctcattatctctgcctgttctcaactttccttcatcctccaaacctagtttttttcttctgattctaccattcttgaaggtagccaggcttaaaacctctgaatcttcttaatatttctcctagtaggcccccctgccctaccacatgcagttggtgccaatctcttgtcccttttgttatttctcgtccaaccccccacttttcatttgtaatactgctacctagtttatatatttttctctttgcaggaagggagtgttataggagatttttacaatgaatggaaggactagtttaggtggcatgtttggttcctagtgtcatcctgagaagagattaaaatgcaataacaatcttttttttaaagatagaatgtatagaatttatacattctaaatttataaattataattttataaatctataaattataatttataaatttataaattcactctgtcgcccaggctggagtacagtgaaaccatcatggttcactgcagcctgtaactcctgggctcaagcagagccacctcagcctcttgagtagctaggactacaggcatgggc

SEQ ID NO: 55552 - DNA, 4374 bp, Homo sapiens
ccagcggcacccgcatccattcaaatgctgcccattccccgctcctcagtcgcttcccgctactccgcacgcgcatctcccccacccgtcagggtcaggcctctcggtgacttttcctttttctctggcagaaactgaggggtgagaccgatggttgtgtcccgaacgagggcagattgcctagagctcgtcagacagggacccaagggcgagtctggcagggcgtggtagctccgcgccgctcagcaggggcgcagcgcgcgggtcggactgggacgccggtcacgtggcggggagggggcgccggcgcgcgcgggcgagctagagggcgcgcgcggctgaaagcgtgtggaggcgcgggctgcagttcggatgtctgtgtggcggggagggggcggcggccgggagagacgactccgccccctgcgcgcatgctccggccccggcgggttataaggcagcctcgctggcccggccagacaaagtggtgagctgcgacgtgactggctagctgcgtgggtactggaacaagcaaacgaggcagcgagcgaaggacgggagccggaccctgggccccgtggaactccagcctgcgccaccacgtcacgcacacgctcggcgctgcgatccgcgcatataacggttagttgggtaacagccggcggcacgcggcgcggaccccacggtgccctcgctgccctggtggggtcggaggggacctccggggttgggagactttgtctccggcggagggaggcggcccagcagagggcatcgtggtcacaggcagccgcgtggcctcggactgcagtgctggtgaaggagaccttgaggcgctggggtcagcgcctctcttagccgagccgcgggccccgtgctaagatgccggtcccaggcctggccgaggagttgggtcgtggtgcccggtgacggtggggaagtcccttcccccctaagtcttcaataggctcctcgagagatgctttgatctggaaaagggataacatgaggctgctgcatgtggtacctccagactctcctggccgcttctgccccaagggaagggactcggggcagaagttatttatgattcgtgacattgtccgccccaaccttcttggcccgccgatccttgccccacctggtgacttgcgagagtggtgcggagagccgcattccccacagccaaggcgtgactgcagggttcgagtagactttgcggaggggacggggcagcccgcagactcctgggagtggtgctgacgggggctctttgtcattcaacctgtggctgccagcgtccgccgcagcgcccttctactcatggacttaaggcggccctgttgagagaaatctggaggatagcgttacacttggtccgatgcaagttttttgttccaagtacgtctttttttttttccagcatgcgttttaacattttattactttgtcatgacatatttgatggaacaagcagttgccaaaactagtttgtaattaatctaaaccaggagacaaacttgttactactttagtctttctttgggtttccagtggctgattagaaactgggctgctactgataacagtaaaatgtttacacgctactttatttactgtaacttactaagctactttatttactgtaacttactataacttgttttgaatttttttttcaaaaattactctggtttcaacaatttttttatcccaaccaccagcccagtgaggtgatgcaaagactatgtatcttcagttttttagttaggtgttaaatagtacccataaattcaagtcttacaccctggggcacgactttgccttcagattgccatagaaatgaccaacaattcaagatatttagcacttaaaacacgtggtaagatttattatttacacagaagttgaatatatttcagtaattcattttggtcttaggtagatgctgttgtttcatcagattgcagttaccattgttaaatatgcaagttaatgatctgaggagcattttgtaagatttttatagctgaatagatttgaaggtttagttgtaagcttaacgggatagactgtaatgtccttaaacagattaaaaaggaaaaaagtcatatcactataggatgaaagcaaatgattagtatttcactagtttacatgttttagcctttaaatattagggcatatattagccctggaaaggatcctaatgaccagctgatcaggatcccttgttttacacataaggaaactggggctggagggattaagtgatctaacatcttaggtctgaaaacttgttatggtttggtgggaactatgtgtgtctttggactcatttttgttagattggcactcctgatttttctttagattgtaaatttggatacaaattatctcagcctgaaaatagatttctcagctccttatgttctgcattcccatcgtgttttcaattcactttataatgctcactcctatgcaagattaagatctctgcgtaaatgcctacatagctgtcttgtttttgttgcagttgaggactaggaagatggaacttgggtatgaggaaaacagtccagattgttgtgaattttatatgttcggcaatttgttattggctaccaggcaccatgagagacttaggattcagcagtgaacaaattttaccacttgccctcctagagttatagtctagctggaaaacagataaatatataattgccacagcaaatactctttacaaacaagtaggtactgttataatagggtgggtacaggttcctgtaggaacaaatactgtattgtgtaggtgtgagaagacacccaacttagtatagaagcaatttggctagacctctctgaggaaatactgtttaacctgagacttgaaggatgaaagagctagccaggcaagacagtgatgatgggtggaaagaacattccagacatgaacactgaagctacactcaagagtacagggtgtaatgcaagagctgaattttaccaaagctaaagcataaaaaagtcaaagagaatgggaagagatagaagttgaagagatagacagtatgagaaaatggagggccttgtaagccattttaaggaatcaaggagggtaaaaaaattaaagggatttttaagggataaaggagggtaaaaaaattttaaaggagcgctcttgtcttgaagctgattgaaagcagttgaaggattttcaagctggtggctcacgcctgtaatcccaacactttgggaggccaaggcgggtggatcacttgaggtcaggagttcaagaccagcctggccaacatggtgaaaccctgtctctattaaaaatacaaaaaattagccaggcatggtggcatgcttctgtaatcccagctacttgggaggctgatacaggagaacagcttgaacccaggaggtggaggctgcaatgaaaactgagatcacaccactgcacttcagctcagctcaggcgacagagcaagactctgtttcaaaaaaaaaaaaaaaaaaaggattttcagtggggctggggataacctgattggattttgtgttttaggaacatcactttggatgcaatatggagaacaggctgaaaggaggctgttggagtggtgtgagaccacagtgatggacaagacaggatttggtagagaaacagacaggatttggtggaggatttggtggagaccagatgtgggagactgggaaagtcagagacgttaaggatataacccaggtttctggcttgaacaaatacgagtttattaggtggtatttgtttgtctccatttaaccaatagggacactaaaaagttgtgtgactagaccagggctgctcagcttgtaaggcttggagacaaaattcaaactgttgttttcagtttttgttggcaacccctgagaatggtgtttttcttttttcccttttgaacagttaagtatggaaaatttcaaaacacaaagagttgagcgacacgatttctctcttcccctatctactttccccagaccctactggattactgtgaagcaaattctacaaatgatttcatttgttttatttcaatatagatatctgaaagataactctcgagaaagtcataaccacaatgccattaccctacctttaaaaattaacatcgccaaatatccagtcagtattcaaatattcctcagttgtttttaaataattggttggtttgatttggggtccaaacaaggtaacatattacatttgtttgggatgtctcttaaactttttaatctataggttccctcatcttaattattttcctcgtaatgtattttccttgtaaggttggtgcaaatgtcattgtggtttttgccattactttcaat

SEQ ID NO: 55553 - DNA, 1124 bp, Homo sapiens
gctgagcggcgcggagctaccacgccctgccagactcgcccttgggtccctgtctgacgagctctaggcaatctgccctcgttcgggacacaaccatcggtctcacccctcagtttctgccagagaaaaaggaaaagtcaccgagaggcctgaccctgacgggtgggggagatgcgcgtgcggagtagcgggaagcgactgaggagcggggaatgggcagcatttgaatggatgcgggtgccgctggcacccgggaagacgctgggggccggcgctgtagagccgggcatgggctgggatgtgtttggattccaatccgggcctgacaccagttcagtgacctcgggaagttccccaaccctccgggcctgtttcctccctctgaagtggcgacagtagtagaaccgacctcgtaggctcatcgggaggtcctgatgggagaacccatgcaacttgccaccatagagccaggcccgcggcggttggcgcctggtgggtattaaagacgagtcgggaaagaagagcaggtaagagggtggggagactggcccagtgggttggggtgtgcacctcggccacgtggaaaagcgagaatgcagaggccggacgcttatggacgatgcatatgtggggccggatagaattgtggcaggcggcgctggggctgatgctcctcacccggattatcctctctaatcctcagccctgtgaagtgggcactgccctgaacattttgtaaataagggacccgaggctcagagaggtgaagtaactttccagacagcccagctcgtcagcggccagcatttgaagtcacactccagagcctgtttttaacataatagccgctgtgaccgcataaccaacgtgtgtgttgaagtgatcaaataaccatggagtgtctttgatgtccaggacttttgagaaataccgaaaaatatgaggcaaggcccctgccttcaaagagcttgcaagtttttgggggagacttaggcacaaattaaccaacatctgttgagcacttgctgcttgccaggaccctgcccttcccctcgtgtcttcctcccttccaggactcaccccctcacttaccctccccctcacttaccctccccctcaattct

SEQ ID NO: 55554 - DNA, 1128 bp, Homo sapiens
aaagaaaaggaagtaaaaattaaaattaacttcccacaggcctggctaaagtatgggttattgatggctgatgttagaaatgtttgatgtaattttgattaacaaacaaaatgtcgttgtcaaaaaatggtatacatctttgtgttagaaagctaacatcatgtacatttttgttcatatatttagacattaaactaattttttttttgagatggagtttcactctggttgccaaggctggagtgcaaaggtgcgatcttggctcactgcaacctctgcctcccaggttcaagagattctcctgcctcagcctcccgagtcctgggattacaggcacacaccaccacgcctggctaatttttggatttatttagtagaaacgcggtttcaccatgttggccaggctggttctccaactcctgaccttaagtgacgcacctgcctcggcctcccaaagtgctgggatcacaggtgtgaaccaccacgcttggcctgttcaaccagttatttattgagctcctaccatgaggctgattctgtgctatccctggatataaaatggaaattgaaacagacctaaaccctgaccttggagttcagtctagtatataatagtctctacgaaattatacatataagtcaggaatcgtatcttattcatcagtacaatgaatatagtaggttttctttgaatatttgtagactaaatgaatggattttaccagacgttaccttgccataaactaagaaatagttactattactccagacatatatgtacttatggaggtttgagaaataatgtggactaagaagcccttatatagcctcacccaactttagcatgctccttccagagccaacccatcattcaaataatccaaaattctgtctaatatctggttatgaacagattcctgagacaaaacaaaatgtggccacctattaataaagcaaacagtcttggtgttcagacactgctgccgtttagttcagaacagattattgtcattattataattttgtttattaaaaagaaaactcttggcagccgagcgcggtggctcacgcctgtaatcccagcactttgggaggccaaggctggtggctcacgaggtcaggagatcg

SEQ ID NO: 55555 - DNA, 1047 bp, Homo sapiens
taagagagtagattgtcctctgggctgatataaatggggaagacagtactgtatgtgaccttgtgttctgacatgattctggcatctgtgcagaatctttttggtagcatgtgctttgtcactttctagcaagcagggagactaggcaggcacctagggcctgagagtcaaccagtccacacgtttccaaaccatgagggtaggagaaaggggtcccaatattctcagcatttgggtagttactactccgagatgggttttaaagccagttaataaaaaggcaccatgccaccggaagagatatgtgagcttggatctcaaagggtatgtactctgaagctgaaatcataaaccagagcatctgatgtgtgtctcatacacaatgagggaggaaggactgctgacggaaatgtcacacgcagctgcttttagcacttggctctcactgatgaagcttccctctctgccactacacaccaccctcttcctacatgagagacctttagggctctttagttctcatcctgaaagctgtgggacagattataaattgatatcttttatatcagtatagctcatgcttggttgatgtgcctgatgggctataggagtgattgactcagctactattttggtgaggaaagagagtcttccttagaaagagaattgtgtgccttgccctaaaaaggttaggaatgcggcctatggtcctaattaagtgccctgttaaacagtgtcccttgaacaagtcactttcttcttctgcaacttctccagctatataattaagcatgtaatcctgtgtgacttcatagtagggttgtgaggacaggctattcccaccgtctggagttgtcttcccctcacttttccattgccaaataaatcgtccttatcttttggagttaagttgaaacatcaatttcttgagattgtttcagatcctacttttctactgcccaaaacccgtagttccccagtctgtcactttatagcacctggcacttccctttttgcaaccaatgtcacgcttattgtaatagttgt

SEQ ID NO: 55556 - DNA, 1093 bp, Homo sapiens
ttctggagaattgtatgaagacgagggttaagattcttggggccaaggagtctgtgatttcctcaactggggaggaaatggggcgggcatatttaatggtaaggactcacgggtcctgggcaccagcattgactttggatggttggtggggcggggggtgggttgagcacggaacagtgctttctgcttatcttgagctgcatgatttggtgtgtacctcagacttagtggtcctcaggcacgtgattttataatcacaatcgccaaagacctatgaactgtctttagtccttagttcgcatgttggctgattttgtgctgcagttttgatacttaacagggttgaaaagttcattatgatgaatcaggagatcctgtaattcagaatatctttgtaagtagcattcttgatctaatttaaacttcactgtaaagaggaggagtattttttgcagaaccatttgatgctttgttttcagcgcatcttcttgtggcaaagaacccaaaaatcagttctgcttatttatgtaggtaaagcaggtacaacggttgaatgaattctggagtttccactgttgagttttcactttgacaggtctttattagacagtggaacttggagggctccttagtctgagtcagcctggtggtattaggaacaacagcaggtattaaatgctgcaattatggggcttcttaaccactaacatacagttatttctcgtcactaactgagcagcacgtttattaactgacagatttctgatggagtcgttaagaaagagtcatcaatgggccaggcgcggtggctcacgcctgtaatcccagcactttgggaggccgaggcgggccgatcacgaggtcaagagatcgagaccatcctggccaacatggtgaaaccccgtctctactaaaaatacaaaaaaattagctgggtgtggtggtgtgcgcctgtagtcccagctactcgggaggctgaggcaggagaatcgcttgaacccgggaggtggaggttgcagtgagctgagatcacgccactgcactccagcctgaaaacagagcgagactccgtctggggggagggagggtcggg

SEQ ID NO: 55557 - DNA, 1248 bp, Homo sapiens
tataatttacttaatcatttttctgctagatttaaaaatgtttttctttattctttaaagttacacattttgtagtaaacatctttgcgtataaatctttgaatttctttttttttaagttatttttaatcttttttaatgggtcaccgctgctcaccccctccagctattgcagctgccctgaacttctttcttaggatagcttgcctaagctggaattatcgagaaaagattgaggcttttttcaggattttgttctgaaacattaacttctaatcctcccatgagtatataaaattactcattttattatacccccattggtctaattcagtagaaattagggaataaaattgcctaacttttcattttttttttttttaatgttttcctgttagagacaccctcatttattagacccctggaggataagacagtaacacgaggtgaaactgcggtgttacagtgcatagctggagggagtcctgcccctcgtctcaactggactaaagatgatgggcctttgctggtgacagaacgacatttctttgctgcagccaatcagcttctcatcattgtagatgccgggctagaagatgctgggaaatatacctgcattatgtctaacacccttgggacagaacgtggccacatttacctaaatgtcatttcatcccccaattgtgactcttcccagagtagcattgggcatgaagatgatggctggaccacagttggcattgtcatcattgttgtggtctgctgtgttgttggcacttctttgatctgggtcattgttatttaccacatgagaaggaaaaatgaagactatagtatcacaaacacaggtaagtagtacccacatgacacctatggcttgtacttcagtcaagaatgtagtataggattaattgtacaatataaaaaactgagagctggtcatagtagcacatgcctgtactcccagctactcaggaggatgaggtgggaggactgcttgagcccaggagttcaaggcccacctgggcaacatagcaagacctcatcttccccctcaaaaaactgaagagctgtgatacattacctgatatgtgatagaagggagtttttgttgttaaaatgttcaacttctttgatataacagaacctctttgaggaataggttcataacagaacctctttgaggaaagaattttgtttatttgagatagggtgttactgtaatgcccaggtcagagtgtatcggta

SEQ ID NO: 55558 - DNA, 1017 bp, Homo sapiens
agggcacatgaaactcttcaggatgaaatctgggcagagacttattaattaattttgcatttactacttcatgtcccacattagatcatttactcctgccagaaccatccctgcaagtatctgagttaggctcacctttttttttttttttttttttttgagatacagagtctcgctctgtcgcccaggctggagtgcagtggcacgatctcggctcactgcaacctccgctttccgggttcaagcgagtctcctgcctcagcctcctgagtagctgggattacaggtgccaaccaccatgcttggctaattttttgtattttttttagtggagacagggtttcaccatgttggccaggctggtctcaaactcctgacctcaggtgatccacccacctcagcctcccaaagtgttgggattacaggcatgagccactgcacccagcctctattgttcttaagagatcaaagacttctaaagaggtacaggtcagaggaaagcactattactgaagttaatctcttatttttacattaagtgttcatgaaagaaatgcatcaacagtaaatccacttttactgttggatgtcttagaagagttaatacaaaaagggtttaagaaggaccagaaatgtagtcccatcttttttgtaactttggggatgccttcatttttaatctggtccgtaagtaaggaaatcagcaaatgagagtgcttcggcccattggcgattttttatgtggggtatcctagcttcttcttactcgaagtctggtctgttgactatcagcatcaccgttacctaagagcttgttagaaatgcagagtaatgaccccagagcagatctagcaaatcagagtctacattttaacaagatcctcaagttatttgtgtgcatattaattaaaacttgagaaaccctgctctagcttacttttcacatggattttatttttatttctgggtatttgtttttataatgtttggctagctttttctaaaatgtaccctatg

SEQ ID NO: 55559 - DNA, 1050 bp, Homo sapiens
gcagagggaagatacggggcaaatgtgcttcctgatgcttccatggggatgtgccctggtgtgcatctgcttgtcaggaagagtcacattgctgcttaacatgctggattgccctagtcttcagaatggtcctgagaaaacatcactacttcgatgttctactttgctttccaaggagcaaaaataactttggagccttctgggaagtgtgcctgggattcttcagtggtttcaggcagatagttgagactggggctttgatattcaaggtctttggcaagaatcccaggcttgaccaactggtaccaggtcaaagatttttgtattcttgtgaatttttttttttgtccctattgcccagggatgtcattgtaaatatatgtgcatttataaataatttttgtattcattgaccatatgtgttggctgcaatgtaaatatttttgatatgccaaaattatatgtaatatccagttataatattgacaagtagcttctcagatcacagattttaaataactcaatttagtgagatctaaaaattttatttaaagtataaaaactgtggctcacacctgtaatcccagcattttgagaggctaaggtgggaggattgcttgaggccaggaatttgagaccaggctgggcaacatggtgagaccctgtgtctgcaaaaaaataaattaaaaaaataggtggacattgtggcatgctgctgtagtcctagctacttgggaggctgaggtgggagggtcacttgagcccgggaaatcaaggctgcagtgagctgtgtgaagccactgcatcccagcctgggtgacagagtgaggccctggctcaaaagtaaaataaataaataaaaagttttaaaaacttacttgttaagaagtgtatctatagaggcagctacttagtgattgtatacacataaacacagtcttggtgtaattaaccgccttcttcatgcctagaggttcatacttctggtcatttgccatctgtttaaaagtgctaggtgatactccctttctaacataaaaagcttgttct

SEQ ID NO: 55560 - DNA, 1016 bp, Homo sapiens
ctggcctcgaactcctgacctcaggtgatccacccgcctcggcctcctagagtgctgggattacaggcgtgagccaccgagcccggccggtccttattttatacaagtgattaagccaaaaattttcttgaatttctgataccaaagagctttaggtaaataacttcacactctaatgcaatgtaattctttctttgtgctttcagatttccttacacttcctgtccagttctctcttctaaatccaatattactcactagataatttcagccacttaaataaaaatatctatttttaagtcctggttcaagggttccaaactcacataatttctcaactttttgccagaaagttgagcatttattcatacttattttcaatcctaagtgttctcccatgggcagcagcacttcttgagctgtttagtactgccacacctttttatgtctttactatgtcagcctctgatcattttcactttgaacttcctaaagatcacaatttcctatcccttcaatctgcgatccctcttcttcctttcttactagattatggtgtagtttgtactagactgactcattaagaccttgtacgcttcctgagtctgcttattactggctttgtaatcaagggtgagtctttttacttctctaggctagattttctcatttatgaaatgaggacatttttctagatgctgtaaagccctttccagctgtaacattctatgaatctgtaattccctcgaggagctaaggaggattatgctactttaataaaaagctgctttggtgacatttgttcgagtagaacaagagtgatgctgctcattctgacttgagccagatgtatttcctttatagcaggagtaatggtctaagaaatactcattaggagaaaaaaattctgcttctaaacagtattagtaaacaaagaatcttgactcagttgaaaaaccacccattgctctctagagcagaatgtctgaatgctggttttatagcacactagaata

SEQ ID NO: 55561 - DNA, 1034 bp, Homo sapiens
ttttccttaatgtgctctgctgagtatacggtgcatcaaaatataatgggctggttaattgttacctgggctaggtagcagtccatcccttgatggcaaaatgctagaaaattctggataaaaatttaatatgttatctccttctcatttctttctcagcagctcgctttggaaatattaatatatctttaatagtccttgagcttaatggggcttgatggtttgtggtgcagtttacatatgtctgtgtattgtggatatgtatacacacagactcacatgctcctaaggtcataattaagattttctttctatagcgtattccatcgtattcattttaagtgtatgggtttatgtggtgaggttttctttttattgttgttaattttttaaaactttggcagactttaaacagctttttctgtatagttttgagaatttgtaaatttttttcttaactctaacttttacagccatgtgtgaaaggcagaggaaagacttttggggctgtaattcagctagtcaggcactgtctgtaatatgcaaaaggctatatagacagcatttactagtctagctgccaaatcttagttcaaatcccatgagttagtgaatagtgagaacatctgcatcatttctttgtgttttgttttgattcgttagggcatagatgagaatataacttatttttagaaattttaaagttgatatattgacatggaagctggtgtattctaaattattgtgatcttttttagaagactgaagagatggctatttcataacattagtctaatctacctgttatacatttttctcaacctctatattatatttaacaataattcaagatttagagcattagtaatattaactgtgttgaataaacatcctatgcccccgtatgtagttgacattattagagtaatacagttttgccctcttgacagccacagacactgttctattttaaagatttagccaaaataaagggaataacgtattaatggccacagaacattttgtagtcatta

SEQ ID NO: 55562 - DNA, 1081 bp, Homo sapiens
tagcacagtgaaagagtaaaatttaaccatttttgtaagatgtaatactaatcggaaatgttctcatattgtcttctgacaaagtccatggcagaaggatgagctgggttgtagaacatggcttttgtagcactgattcttcctagccttcttttcacttaggtgctaagggtcgccctcccaaagccagtactatcagccaggtgacttaacatctttctggcagctactgtctttagctttgattttttttccctttttttgttgttataatctttaatagagaattgaaagttactctttaaaatatggtttctaatctgaagcttttcctgaatcaattaggtagtttcttattgttttagtgtagtacttagtagtcagtactttgcccgcttatagaagaatctttggtttcacctattgcttggctcgattagttacttgtttcttaattatgaccctgttgtttatttttctgcaaagagaaaagttgtcatttgagtttgaactttgtcttttcccagtagtaaagttgaactttggacctctggtgaaattgttttgtgatatactactatgactaggtttagtttctttgattttactacagagtatatattcttaaaccatttctattctgattaatatacaagtagtgaattttgttctgaaattccccagactctaattgtgcagagttttatgcttcttcatacacctttaagctcatatttcagcagtttgctttcagtaagtttcagtaaattatgtgtattttattccagagattaagtatcggtacaataaatacatgaaatcattgtctactgccatatgcacacattacattcaactaccctaagcaagtagtgtatccagggatggaaatcataggaaacaatgttatagtttgtttaaataaaaaccaagttgaaacagttcctgggtaatgttaaaggtaggtaaaagtcttcactgctgactctttgggacatccaatttgtaagggagttttgttaaaatgggctaattcctagaaatacacttcctgttggtgaagaaacactactggatgctt

SEQ ID NO: 55563 - DNA, 1070 bp, Homo sapiens
gacctagagattattttagaaacaatagaaaaagaagcaagccaagcccctttgctagggaaagtagcattacattttgataaaccttgaagttgaaaatttcctatttcaaattttggtagtttttttttcttttttccctaaagctcttaataactcaggggttcaggttttggattctgttcattgacaccttcaattcatatgagtaatgggcttacaccttagcaattgcaagctgatttgcttgcatgatatttgatgacttttattatatcattaacatctttgtacttaaaaaatattttctctccatcattctctaagagtactatatccaaatatctcagtatgtatatatgtatatacgtgtgtgtatatatatattatatgcatatatgtatatgtatatacacacacacatacttttgttaacttttcttgtatatcattttctagtatatcattttgggtactttattgatcctgccctcacccccagacttttataatttagtttgtaaaactttattttcctaggttgaggcattttaataattctttaatttcttgctatcttactggtacaaacaaatacttaacatttggccatttgatttttagatgattttaaattttattcagtttattgctaaaactgattttcatgtaacataactctgtgttcctgggacgtatacattatttttcctctgagatcctggcacatactttataaaaccttttgttttgagagacaaatttttgtgattttttttctgctaatttatgtaaactggcgacaaaacaaatcttctaaattcattcaagtgtctgacttatgaagtcagtgcctaatcttctcaagtgatagtttcatacagagtctttactatgtaacccctaagtgctttgtaatttttggggggacttagtgttttgggagtatgttgaaagagaatcttgtttttatggattacttcagtattatttaccaatttcaaaatctgtgaatgtcagggttgtgtgtgtgtgtgtgtgtgtgtgtgtgtgtgatttgacaaaagata

SEQ ID NO: 55564 - DNA, 2076 bp, Homo sapiens
gagtgaatgccctgaatttaaaactattgtctaaagtaagagtttcagaaacttagaagctggtgttatgagacatgtttgtagggaaagaggcaaatccattcattgctcttctagctaattttgctaacaaaatatcttgctaatattttgtttttgaagaacaactattattcagaatgttttccaagaaaagatgcatattttatttaatacagaaaaaataagaagtcctattactggcacgcattcattccctcagcaaatacttagtggtgcacccaccaagtgccagcatggagctagcactggcgatataaacatgagtcagaaattgtgtgtcttcaagaagctggcagtttagtgggagcttaatgactcattggtaaggaatacctgtagtaagggttttgcctttttcacttttctgccagtgtttaaaactctttaggtaggtcttagtatgaattttggtgaaaatgagactaactggctgcatagtgtgctattcgaaaaagtagtggagctgcattttagaaaggatttgggttctcaagtcatcacaaaaagagggaaatcaaatataagcaaaactgtcttttcaaaaagcccttaaattgtgcataaaatactatattgtactgtttgtaggatgagtccaaatgccacttttccacccatgttggaaccaattgcagttttttggtcgaataccagaagaagtaatttgcttgcattaaaaagatatgttttacaaaaaaacttttaattctaagaaattatcctcatctaggtatgtacagtgaatttatggaaattaaatgtgtacatgaagtgaaagaatgatttcttttctttttttctttttaatatcttggtaggatccacgccatctgcccttgttttctgacttgagtggttgaggaatgaattgtgaataattttgaacttgtttgggttttgaaagatgacagattttggttgagtggaattaggatctttccagtagtaggtaagaagcagaggaggagaaaaacacagggcaaaaacgttccatacagaaaggtttacagtgtggtccatctcaataattttgtgtgtgtttgtgtacaagggcacaaaatccacattatagaataattggaaattattttgtacaagggcacaaaatccacattatagaataattggaaaatagagggaagatcatattaattgtttaaatgtataggtagttccattatgaatagtctcctgtaagttttttttaaatgtgttatctcctcgaaataatgctctaaggtgcttaatgctatttctgccttcagcctcattccactcataatgttatactatgaatatttttatttaacccttaatgtaccattagttctgttctttatggttaatagccctatttttgttgttttggaagtctagccagttttatgggaaaacacaatttgctagcctaggaaaaagggaattgaaaaatatattttcatcttaatcccgccttcccttttgttacagccacagccgactggcttccagtgagaagggtggcatcattatatctccattcttccctgaaccctagcaatttatcctgatgcagccactcagctgcattgcagtggtttccaggagcaacccacttacctgcagcccccacccatttcagtcatcccaacatggccaggggaacatagattacattttgaggaccataatttgacttatgacatatctaaatacctgagaaaggacacgctgtccttataggtgattaggtacttgttttattaacacatactgagagatattgttttagagactctgtatgggttatgaagggttaaacttttttgccataatttgtttggagtttagggtttggttttaaaaaatatcatgcagtggtaattggaaaaaattttgtttcaaatttattaataattaagatcttttctatttggaggcttccctttttattgtcttgggtatacaatgtgaacggtaaccgatctacttaattaaaactttctggcattttagcctctttgcttttgctgg

SEQ ID NO: 55565 - DNA, 1056 bp, Homo sapiens
ccatcagtgtgcatgaatgtggttagaggcagtggtatccccgaacctgcagcacaggaaagaattttaatcattatatgccatggattttcagggcattttaagcctttataatggtgtaacttatgattaagatttacacagtcaaaattgttagctggtataatagctgaatagttaagtatttattttggttagttactttagctttagctttgaaaaatcatttttcctatcggagattcttcacaatgctttcagtaaaatgtttctgaatagttcctgctatatggtagactgctaacactgtttcttgctctctctgtggggctgatgctacaagtctgatttagagtcagctgtgcttttatttttttccttgagtgactaggggatgcattgggggaagataaattttagggcaagaggacactcagggttgtgggagatgaactgtcaaggatacctttggctcactgtcctcaagcttgttcggctgcagtgatggcataactgagaagagggattgtgctcttgctgggtgcgggacaagaagatgtctcaggccacgtaaagctggccacagcagaggacaaggtattccctgtgaggcaaaactgaagaaaggggattgaggtggcagttctggggaaactatgtttgttaggtagactaatgggaatgatggagtcttgcttgggctctttgtaggtcagtggaagaacagcatgaatgtggacatgaaaaaatctttctgcaatccatttaccacatactcctttgcaatatcagtcagggttcagtgcaggaaacagaaggggatataatgcagggaattaattgcttagggaatcttttgaaagggctggagggctgggctctagactgagcctctgagaatgatttccaggacaccttgaaacagtccacagtgggagctgccacctctgcttgagtcaggaaagtggcaatcaggaggttgctactgaaacagtggcaagaaaatgctactgtagctgtgatccaggtgatcagggcagccactgctgttaacat

SEQ ID NO: 55566 - DNA, 1090 bp, Homo sapiens
agttgcataataatttaataaaaacaaagataaatactcaaaacaaattatttcctaattatttgcccacattttacaattatctatgcttttgaatttctttatatctactatatctgtatggtagaaacactatatagtggtttgctactgtgcatatcttcccagctcccttttcactgttatcacagttgactatggtggtagttgttggcatttcctgaacatatcacactgattgtgggggcggggagggagaatcaaagttggagaggtcatgagaaaccatgtacaaactaaaattatgggagaagaaactatgagtgaaacgatgagaaaaacctaatgcatgatgtagaactgagtggtgttaatagcagagcactggagggaagggccacaaaactcttcaccccaaggtctagaatcattctagaatcatcctacaagcctagttttcatgagattcagccctattttatttcttgctcttggaattatatgaaattacgaatttctgtgtgttgccagctgtaatagaataccctggaattttatttacttttaattttgtttatttatttatgcttatgtgccatcttctcatgaaaaagaggcagtatgttaaaagtttgagttcagattttctgatgtagataaataagctaaagaaggcagggtgaagtgtgatatatgagaatttccagagcagggtattcgtaacttgtaagtatttagtccaagttccctctcccaacacattttacactagaataagattgaaaggccagatgtggtggctcacgcctgaaatcactttgggaggccaaggcaagtggattgcttgagcccaggagttcaagaccagcctgggctacatggcggaaccccatctctacaaaaaaatacaataaaaggtaactgggcatggtggtgtgtgcctgtattcccagctacttgggaggctaaagtgggaggatcacttgaacccaggcaggtcgaggctgcagtgagccatgcttgtacctgcatactgcctgggcaacagagtgaaactgtctcaaaaaaaaaaaaaaaaaaaaaaaaaaaa

SEQ ID NO: 55567 - DNA, 1022 bp, Homo sapiens
aactcctcactaccctgtttctgtcctctagacagccagatggatcttgtgtaaaagtagaagtaatcttggctatagaacaagaactgttgatatttccattttaaaaagttgaatcagtcttaagtttgagttggtgagtaaaacaaaaccaaaaccaaacctgggataagctaccaataagttaccaaagtatttaaaaacttgacagatgtaaaacattaatatataatttattcttagcaacttaatctgtttattgagtggcagtgtttcagtaataaagctgagctatttggatacactgaccttaatctagtggaaaacaggaggcttttaaattggcacatacacaaatcatcttaggatccataaaatgccttattgttaaattactgtttttaagtcttatattttctctgactacttctgatagtattagtaggcatctcttactgtattttttttttcagaaggcaaatttaggccgtttttataaggtgaatataggtagattttcatatgtattctggtatattgggaattactgccaatgattacttcccagataatccattctaactatcgagtatctagaaatgatatgttttaagtcacgatgattattaaaaaactgctgaattaaataagctacacattttgctggaaattaaacaaaacttactcgcttctttgaaggaaattgatttattccttgatttcttctctgaatcttgaatacaaattaattttttggttttttttttttctataaaagtgaacttggagaccagtatagcacaatataaagcaaggaaagttaaaatcaattaagaatgctttgtttaaaaagagagaagacagaaaatgtacaatttgtttgtgaaagaattccatagaaataacttatttatttatttattttattatacgttaagttctggggtgcatgtgcacaatgtgcaggtttgatatataggtataaatgtgccatgttggtttgttgcacccatcaactcgta

SEQ ID NO: 55568 - DNA, 1048 bp, Homo sapiens
atgacacatattaattatgtaattaatgacacatattaattatgtaattaatgacacatattaattatgtaattaatgacacatattattatgtaattaatgacacatattaattatgtaattaatgacacatattattatgtgtaattaatgacacatattaattatgtaattaattacacatattaattatgtaattaattacacatattaattatgtaattaattatgtaattaattatgtaattaattatatatcaatcatatattaattatatattaatttatattatattaatatattaataatatatattaattattaattaattaataattaataattaataatatatattaattatatatgatttatatattaattatatataatttataaatatattaattatatataattaataagggaatatgtgattaatctggcactgatgtgtaagagacactagaagagttaaagattagcgtggaaaccattaaaggaagagtcaaatttcccaggataggtagaactgatgcctgggatgaggaagagatatcaggtatcaaagttaacaaatcttgagatacagataatgacagaataagggagattatgaaggagagctggttttaaggaggaatatgatttagattttaaataggtttggttgcaatgatgatataaatatggacttcagattagaacctgagcattaagacttatttctcaaattcagaatggaatgcttagagttctattcaaataaaaacgacaaagttgcatatttattaagaaagtatttgttgctgggagagtggttataaataaagtactataaatagtaagggtgatattagcatatactttgtttctaatataatattaagtaactattgaatcacctttgactaattgtcattgaattagcaattagtaattgattttttaaaaaacttttattttaaaatttcatttattttctttttttcacttctccattgttcttttagaccttttttaaagtgtcagatttattgagtataa

SEQ ID NO: 55569 - DNA, 1047 bp, Homo sapiens
taccaagttttatcagtttttctttctttataatattttttatatcctcatccattcatttttattttcatattcacttccttgtctgggctttttcgacctaagacctggggtccttggtttcagtcttttgtttttgttttttatcttgtatactactgctatttcagttttgtgtaaatttttctcttattcagaaagctcagtgggatctgtgttgtttaccacagaaaatgtaaacttatgtgtctagcattcaagacctttatcatttatttaaaaggttttagtgtctgataacttcaaatgcactgtgatgggtgatttgttaggctgtgtagtttgtccccaacccacttttcctgttatctttttctacttccctacttgaaattttccacagtgtctaatttggttgcttacttttctctgaacatgctttttgctttccagccattacttgtgctatttcactaatctggtatcttcttcttttccatttctttctgagtcttacccaaatcaagtcccaccttcaacatctttgaccattctattccatagagcactcccttttgacctcgtttaggggatttaactatttatgctattcatttgtaatactgccttgtagtcttcttctttctctttttttaatttataaatatgccatcttcttacacaagatggaaagcacatggagtttgaggaccatttcttacatgtgcttgaatctcctgctgtctttaacatagggcttgtgcctagtggtcctcaataaatatatatttgattagagtatttagacacctgtttgcacttatgtatagaaaattaatgagagaatatgatagtgaatcattttatatctgataaaattccaaaatataatgactagtacactaaactttagcatctatgaacagaagtgttgtagaacaactttaaagattttaaagtgaattttacaggaacaatatatattacagtacatttatcaaacacttatttttttgctacatcattgttttcctggaagaaattaat

SEQ ID NO: 55570 - DNA, 1210 bp, Homo sapiens
ttggcagtgttgaatagaggatgaacaacctcttcccagaattgttgtagataggatctataaacattggtgggtctacacgagccttagacccttgccaaccctgagatcaaatgattctctatgcatagctcagtgctattataatttggatatggaacaatccctgccttaaggaattcaacttttactccattagttgctgtattgctttattgccccctttcaatacaacagtaaacataaggcctaaaagaaagactgaaaacaagggctgtagatttaggaacctactgcttagacaatcaaacctacttttgtttgatgaagttcttttgggttaaatatattttcacttgttttgaatgactcattcttccattcaggtgaaaaatactcagactttttaacaatttgaatggatggcattcctaaaaagttatgtggaaaggagtttgaatatttaatcttacacttttccaaataggagaaaaaaaattttttggaatttaacaggcctatgtgaaggctttaggtgaggaacatagcgtccgttcatctgtgttgaatatttcatggttttgattataaccaaccaatatgaaccaatttcagtagttttagttgagagatctagttagtagttcactttcaggtagactcaaaaagcttttctgtatctcagggaatacaagtcaaatgtctgtacatggggggagtggcttttataagctggtagtcagtgaatattgcattgggagagctgaaaaagtttatgtactttcagacatctcataatgtattatgtagcaaatttgttttctccatacgtttttaatgaccttatagattaaaactttttttttttgagagggctaactgtatttttttcttgaaaggtatttttgctgaaacagagtgaaattgaacatattttctaaccagtctggcatagtgcagcatcatggtatttaccttttttccctgaggctgttgtgcctcatgttttctatttaagtatgacttactaatgatacacaaaaaatttccatggtttctgtagcttcttccttatacttcaagcctgtcccacatggtaaatatgcttaagggtcctcttagataaatccaatgtcaagttaaaaattttgtgctattcatttgacagtgaaaaagagatagtcccatttgaggatatgaccagagtata

SEQ ID NO: 55571 - DNA, 1033 bp, Homo sapiens
ttaataacatgttttattgagccctacctgtgaaaatattaacatgtaatcaataggaaattattaatgagatattttacatgttttggtactatgtctttgaaattgggcataaatttaacatgtgtggcacgtctcaagttagactctaaattttcaccagaaatacttgatctgtatttaggtttcatacaatcacagttgaataagtaggttcatatgcctaaatttgtccaaatcatacttcagagttttccagtaactgaatcacttatcagttcttgaatttaaattaattaaaaatttaaacattacaaattcagttccttaattacactagctacattttaggtgctcagcactcacatgtgtcttgtggctcttatattggacagtgcagctctattctattctattgtcagtctttactgtagaacatacttttgtaattactgtcactttatcataaatcagagtggtagtataagtcctccaactttgtttttggctattgcctcagctattgctaatcatttaaattttcatataaattttggaatcaccttgtcaatgtccactagcattttttcatcacagtttactactgtttacattgttagctgcatacgtgacaacaagaaatccaaagtgatattgagctattgttaccagtggagggtgcccaggctcttggcattttgaacaaagaattggacaaaatgcacaaagcaatggaagaatgaagcaacgaaagcatgtagttattgaaatgaaagtacactccacagggtgggagtgggctccaggaggtggctcaggagcccctgttacagaattttctggagtttaaataccctctagaggtttcccattggtaacttggtttacactctatgtaaatgaagtagtggcccacaatcagtctgattgcttgtgaaggtgaccaatcagaggctgaagtgaagttacatagttacaccctatgcaaacgtgtgattggttgcggaaagtgaccagtcagaggctgaagtga

SEQ ID NO: 55572 - DNA, 1050 bp, Homo sapiens
tgctttttagcaaggccttgttttttcattttggccccaaaccattttttatccatgagccttttaatgttatattcttgcaaaatttttatctttagtcatcacttttgatttttatagttacatatttagttgttatgcaatatgtatgttttacataccaagtatgtttaagttaatatactattttccttagtagttaactcttttcttggttattcacttttgtcccccgttagcagtatgtcttacgtattttaagattcagagttgaaattctaaattccttttactcacgggaaattagattttagtgttttgcacaatgccaaatacatagtggacacttaataagcgttcgtttgtagtaatagcctctttggttttctatttcatagaatttcaccaaagatgattatttttgactgacttttaaatggctacatgaattcttgaccctcagcctaagtaaattttttcattgtggatcacaatacctactttctcttttccttcttcattttactcttaaaaatattaatgtgcaaatttggaagtgtcagtttcacaattgctaacctacttgaagtgttttgaaaaatgaaattaaggaaaatttagagaagtggtttattaccttaaaataattaatagcaagattcttcttaatatgttatgtcatagtcacatcatttatttatttactgattcattcttggttcagccagtcatccatttaataaatgtgtttcagtccttatcatatgtgcaaggtgctagtattatgaagaggaattcaacacagctgatatgtggagggatgtctttaatttatatttaaatctctgtgtgagatttgaaatattacaaaagactagagtataaatcaggtggaaaaagggacagcaaagaactgcaaggaacttaaccttttctagcatccagcttgaccattctataaaatatatttagcaaataatattctgatattttgatttgaaagcatgaggctgtagctctttcataaatgaaagatttttaaaggtactt

SEQ ID NO: 55573 - DNA, 1052 bp, Homo sapiens
ggcttccctttggcatatccaaattgccagcatcactattcttgagctttggggccattattaaataaaatgaggattacttgaacacaggcactgtgataccgtgacagtttatctgataagagagcaagctaataagtaactaatgagtgaggagcatatacagcatggacatgccagacaaagggataattcacatcctgggtgggatagagtggaacagcacgagattgctactctgagcagtgtgcaagttaaaatttatgcattatttctagaattttccatttaatatttttggaccaatattgacttcaggataacaaactggtaagcgaaatcatggataagcagggactactgtatttccagatttcttttccctctgtgcctttgcacatactgtttcctctactgagagcatatttctgctattgcccttccctttcttatcacctggcaagctctttttagcctgctcagaggttatttcctgaagccagtttattacacttcctccttttctgtattcctcctatagcatctgatgtatgcctttaagatgactatactgtagtgttttatcacctcccttgactttgagctccgtgagaacataaatggattatttcacctctcttcatgatttggacagaacactcaattgttagactggaaaggagaaaggaaactaaagtttgagtgtctcttatgtgccagggaatgtgcttaattgtgttgttttagacacaatggaataaattcaattgccacaataaattttgtaagaacatactatcataattagtatatatttttattacatattatctccatcttatagttcagaaaactgaaattaattaatttccccagttattaaatactagagccaggactcgaaccaaggcctgttttgactctacggtctccggttatttcattttactgtgctgtttctttactactagtgtaattgatgatatgatcttgtgtaatgtaaagaacatggacttggacatcatacagacctggatttgagttctagttta

SEQ ID NO: 55574 - DNA, 1775 bp, Homo sapiens
cactttttgcaaactgtggctatgacagtcctgaacaagaagggtttcctgtttaagctgcaataacttttctgactatggatcatcgttccttctgtggcagatttttacagttcctctaatgcatttgggaggactgtctcaaagtaagctgcagttttcctgacaactcctcgctctctctcctactaagaactgtagcccttttctgctgtttttcgaaccttctgctaccatatccaccacttccaccaccagatccataaccaccaccatagggactgcccgagcttcttccaccagaactgtcccctttcacgggtccataatttgattgctgttgtccactataatttccaaaatcattatagttcccaccaccaccatagttaccaccgccaaaatttcctccttcattgtaaccatcatatcctccaccacctccaccatatccaccaccttggtttccatatcctggtccaccaccaccatagccccctctactactataaccaggaccacaccatagttgccaccatcacctccaaatccattatatccaccatcacctcctccataactacctctgctgccaccacctccaccaccatagctcctccaccacctccaaagtttcctccgcgacccataaaattgccagatccacctccacgacctctctgtgatccagcagactgcatctcttgtttagaaagggcctttttcacttcacaattatgcccattaatagtgtggtatttctgaacaacaattttatcaactgtatcatgctcatcaaaagttacaaaagcaaatcctctttttcccactctgcctgtcttccgtaacttctatggtttcaattttgccatacttttcaaagaagtctctcaaattatattcttctgtatcttctttaataccaccaacaaaaattttcttcactgttagatgggcaccaggctttacagaatcctctctagaaacagctgtctttggttccactacacgcccatcaaccttgtgtggtcaagcacacattgctgcatccacctcttcaacacaagaataagtcacaaaaccaaagcccctggaacgttttgtttgggggtctctcattaccacacaatctgtgagtgtgccccatttctcaaaatgttctcttaaactatcatctgtagtttcaaagctcagaccaccaataaacagttttctcaacttctctggttcctttggatcatggccctccattttgagaccagactcgcctcttccaactcgagttcaatatcgatatactgaaaaattttttaatcagcaaactgaatgttgataataaactcaatctattgggaaaaaaaaatgcacttgcagataatttatccagaatctccaggatctactctgttctggatggatgtcgtctccaacggtctggaaattttaacccccaaatgttaaaatgatgaaaaaatatagatccagccccaaatcttctaagtgaattcatttgttttttcttaatattacatgatttaaggattgaagcctctctctctgtcacacacacacacacacacacacacacaccataaaagtaatgcaacacttataaaggatttatttgctgcctcaaagtaagactaaacgaggaaattcaccactcatgcattatctgctattccactgtgacgtcattctcatcaattacgatcagcaacttcttatctattttgcttagactaggcatctatgtcctcattaactttttacta

SEQ ID NO: 55575 - DNA, 1050 bp, Homo sapiens
ctggagattctggataaattatctgcaagtgcatttttttttcccaatagattgagtttattatcaacattcagtttgctgattaaaaaatttttcagtatatcgatattgaactcgagttggaagaggcgagtctggtctcaaaatggagggccatgatccaaaggaaccagagaagttgagaaaactgtttattggtggtctgagctttgaaactacagatgatagtttaagagaacattttgagaaatggggcacactcacagattgtgtggtaatgagagacccccaaacaaaacgttccaggggctttggttttgtgacttattcttgtgttgaagaggtggatgcagcaatgtgtgcttgaccacacaaggttgatgggcgtgtagtggaaccaaagacagctgtttctagagaggattctgtaaagcctggtgcccatctaacagtgaagaaaatttttgttggtggtattaaagaagatacagaagaatataatttgagagacttctttgaaaagtatggcaaaattgaaaccatagaagttacggaagacaggcagagtgggaaaaagaggatttgcttttgtaacttttgatgagcatgatacagttgataaaattgttgttcagaaataccacactattaatgggcataattgtgaagtgaaaaaggccctttctaaacaagagatgcagtctgctggatcacagagaggtcgtggaggtggatctggcaattttatgggtcgcggaggaaactttggaggtggtggaggagctatggtggtggaggtggtggcagcagaggtagttatggaggaggtgatggtggatataatggatttggaggtgatggtggcaactatggtgtggtcctggttatagtagtagagggggctatggtggtggtggaccaggatatggaaaccaaggtggtggatatggtggaggtggtggaggatatgatggttacaatgaaggaggaaattttggcggtggtaactatggtggtggtgggaactataatgattttggaaattatagt

SEQ ID NO: 55576 - DNA, 1033 bp, Homo sapiens
gtacattcctgaggtcttttatctgttgtagctttgtctttttctttttcttttcattacatcaagtatattgccctgtaaattgtggtagtggtaccaggaatgaaaaataaaggaatttttaacttttcaaaagaaaaatttttcagtatatctgcataaatgaaattggtccatcatgtgtattagaggaagctatccttactccgtttgttatcaggattatgttagcttgaagaatggactgataaactttctataaggcttattacaggctttaacctgtaaaattgatctcatcgtaaacagctttgagagtatacagatagttgactatttttcttctctggtttcttcagatactcttcatcatcttggatttgttttaataatttatatatgttaaagaaaataatcaaaactgtgcagatttataaatctttaaaattgtacacaatattatatattttaaaactccctacatatgcagttttatcacccttctcatttatggtacaccataagactcactttttgatgccaagtgttctcgaaaatgtcctaaggaagatcattgctggaacaatgttatttttgagacttttgttccttataaggaaatagacatcaattaaggagggaattttttttttggaggtggaaatgggtagtatgatcaagcaactatatgtatatttccctggggaacacggcattaagaagagaaaataatcccaactattaacaatttcatctgtgcagtggtttttattctgcaacattgtcttttctatttttgtacatgttttctagaaaaggtaaacatgtagtagaaataaatgtgatgttaattgctatggcagtgtgtctgtacacattacttttttctcctgtctacccaccttccattggcaatcacccaactggttaggtaaatgagggtggatggataataaacgtttcttcacaattacttccttagctctcaaaagggattctgaagcattccattataagtgctgcttacagacat

SEQ ID NO: 55577 - DNA, 1052 bp, Homo sapiens
aataccacatgttctcacgtacaagtgggagctaaatgatgagaacacgtggacacgggaacaacacacgctggggactatcggaggatgaagggtgggaagagggagagaatcaggagaaataactgtgtactaggcttaatacttgggttactaaataatctgtacaacaaacccctatgctacaagtgtactatataacaaacctgcatgtgtacccttgaacttaaattttttaaaagtttattaaggtgaaaatggttattgaaaaatcttaatctctgaattagtaacagttcccacatgctaaatgatgtatcccaatatctctttatttaaaatataaaactaggcagaaactgaaattattttctagtaggagagtcttttaaaaggtagcattcataagtgttgtttacatattatgcatgggtcactgacaatcaatgtgtctgtaaacaactctgttgtagttagggctcttttcccttttgaattttgattgctcagccaagggttctttgttgatagctggtttgagtacttttatatactatacttaattcagattaatgagctttgttaatactgatttgaactagctagattttatttgtttacttgtttttgttatttttaagaacgaccaattccagatctatgctaatttaaatatgtcctcaaaaagggggcacatatttaaaaaaacaaaccaaaacatacatttatgttggaaaaatcttcttagttcattgttagtaccctaatttttgtaggttttcataggaattaactctttcaaagcaccttttagactatgttgtcggcagctagatgctccatttacttcaagaaatgcaacaaaattgaaaccagtttaactgctaagtgattcgaagtaatgcaaagtacatggactgctaaatcatagaggatctaatttttttttaaaacccatttgttaggctctcatataaatataacacttaaaacaataagcacatatactgttatataattcaggaagatttttagcttgtagacttccaaag

SEQ ID NO: 55578 - DNA, 1060 bp, Homo sapiens
tatgaagaaaaagcattttttcaacggataataagggacagagcagggaagggaaaaggagaggaggtttaactattttggataaggtagtgaggaaaagttttctttcagaaggtgaatttgacaaaagagctgaatgaaatgaagaaccagcccaactgtatatctgggagaagaacctgtcagtcagatagaacaagtaagaagaccttgaggccttgacttattctagaaacttgaagaccagagtgactaaagcatagggacatagagtgtgaaaagatgagttccaaaaggtaggtagggcctgatcttgtagggcgttgtcacccttgtaaggagacaggattttattctggttgtgatgggaagctgtggagggttatgagcactggaagattatgacattggaggctgtgctaatttggatttaagaaagctcactctgattactctgtagaaaattgattatagggtataagaggagaagcaagaaagactattgctctggagtaggcaagagatgatggtgaccctattaattagtagaagtagtgagaaaggtgtcagatttcagatacattttgaaggttaagggaggggtgcttgaagatcatgagagaatagactgatatattttagttgagtccactttggaatcacacaaaactatttttaattttgaatatactttagtgcccccagcattaattatgcagaacgttttaggctgtttaaaagcaaagcagataaattaaaaggaggttagtggttaaaacttctctttcctataaatctcaaagcaatcacaagacccctccaaacctcatatccctttttttttttttgctaatggttgtagatcacaccagtgttctacatttcatattctctcagaacttgctttgaccctcaatgtcgttctgttgtaatgataatgaaagttaaggtaacaaaaaccacttattgtttatcatgtgcaaagtattggtttaagtgcttttgctatattaaatccttttatcctcaaacaaccctattgtaacaaaaaccaagttca

SEQ ID NO: 55579 - DNA, 1029 bp, Homo sapiens
aaggggaaagagaagcagaggtgaactctgtgaagtgattgaaaatagaaatcttaagggtaggcacctctcttttcaagtttccgtacagagattttaattcctttggtcaaaaggctgcaattcaagttgtttttgcaggcctggctcatttttccactgttttcctcatgggctcaaaggtctgttgaagtggtaaataaacgtgctttgaagctatcacaactcaccttgtgtagttgaacttgcttaggggcagttatcacagttcctagtaagccaagcttgtttctgacagctatggaggatgtgagaaagaacagaattggatagagaaccatttgggaaatgggagagatgtgagtgctgatatgctttcccctccatcgctaataaacttctagtgctattccttgttcttttaaatgtacctatagacattttgctctatgcaggaagtattccctaatgaaagaatggagtcagagcaaaaggaaacatctaagctttattgatctgtgcttatcttacattgctgctctctgctgagaaattgattgatttttttaaaaaaaaaacttcaggagcctttgttggatgttgccattgctgttgcaaaataggaaaacagttatgcataaattatctggagaaaatattttccttgatttttttttctttctaaaaatgtgtgggaagaaattatacaaagtgagtaaatggtggtattatttagaaaccattctattttcacttaggcaaccctaacattaagcaagaggatctttgtggagaatttactgttaatattgtttgcatatttacccaaacagcttgatataagggtttgtttttttgttgttgttgttcttaaattaccattttgagatctagaaatttttcccagcccaaataacaacaaaatcgtttactcattttaaaactttattgtttaaaaaaaccccactaacaaccctaaaatgaatgactccgtagttatttttaccttctttttatgaattccctcag

SEQ ID NO: 55580 - DNA, 1508 bp, Homo sapiens
agtgaagtagacaaatctcctgtgaggaattccaaataatttatgtaactacctgcccccaaggtgtgggacataactccccactccttaggtatgagctacccatagtgacttccttccaaagagcacaatcagtataggagagggaaaaataatgctccagtggagaaatctgatgaatactaccttagccaggtatttaaagttaacttcagcagtgataaatcatattgatagtgtgtgtatccttaacatgaagtaataagaatggcactttaccttactcgtcttcctctcaaaaacacataaccccagtctcatcgtgagaaaaacatgagacaaactacaattgaaggatattctacagaatacctgtttactactcctcaaaattttcaaggtcatcaaaaacaaggaaagtctaagaaactgtcacagataagggaagcctaaggaaatatgacaagtaaatgtaatgtggtattctggatgcgatcctggaaaaggggaaaaaaaactttaggtaaaaaattaggaaatttgaataaaatataaactttagtcaataatgtatcaatattggttcattaattgtgaaaaatataccatagtaatataatatattgataatagggggaattggtgtagtatatgggaactctatactatctttacgatttttctgtaaatctaaaacttttctaaaataaaagttttatttattttttttaaaaaggcctcaaaacattgccatatgtctctagggagcaaaatttcacctagttgagaaaatcaccattatagttaataccatagagaaaaaaagtatatttcatttttgtttctgttgagtccctagtggagaaataacattaatggaaatgcctaggatacctagtaggcacaaaggtgcaaagtacatatttacttaccttttctaatctctctccccttcccccttaaaattttagtgtccttgagggttttatatttttgtttttcttctcattctggtagctgtcttggattacctcatttgtgcctgtagcttcacatatcatccatatgttgatactaccaattcaaaatctttaggctgatcttagcttctaagtctagcttcagagtaagcatctatctatacttttatgtcccataacatgtcaaattcactagatttgagtcacaaaacctgatatctcctgcattctctgtcttgttccaccaactgaatatgtgggagtcatcctagattccctctaccttaaggcctgaattattgtaccctctttctctcactatgtcttccacatctatgggtttaaaacagaaatttgatcctcctaataccctttctcttaatcttataatggttcctcattgcatgtaagaaacttttttctccactgtcatgtacttcaatatctctaaaattgaccccttcctgttttgagcccctgaatctattttactggtttctgtggtaatacaaataacacaccactgac

SEQ ID NO: 55581 - DNA, 1159 bp, Homo sapiens
agaatttattatttaggccagaagccaaagtataaaacttggtgccaaatggaaagtttagaaaactttcagcattcaatacaacttcatttaaattaggttggtcttcagaggatattgaggtgagtaaaatgggcagctagatgaaagaaaatcattcatctattgaggaaactgcagagaagtcactttgctaacacagggaagatgttgctgattattttctgttttggatctgacttaaggaaaaaagataaaagattcattcttaattggcagaatagcaaagaatgagttaagtctttctataaattatttgtcttaagtacctattgctagaattagttaatattgtatttactaaggaattctatattttttcaactattatgaaaattttcaagcatacagaaaattagaaagaacaggacaatgaatacccatataaccaccacttagattccatacccacctatctataagtatgtgtgtgtatgcgtacatgtctgtgtttagtgaaaccatttcaaagtaaattgcaaattttatgacactttaatcctaaaatatttagcatgtattccatattatacctcacaacaccactatcacatctaagaaaattgacagtaatatcttaatattagctactatccagtttatagtcaaattttcccagttatcacaaaaatattttttatggcttttttttcccttcctaaacaggatccaactgaagttgacatattgcctttaggtgttatacctctttagtctcttttgtttgaaaatcttcacctcccccaaccttttttttttttttttgaaaggaggagactttttaagagagcagaatgttctaaattctaaatttgtctgattgcttcttcatggtatcatttgtcttgttcatctatcctttgtaattcctataaactggaatgtaaaccaagttgattctattcagattaaatgttttggcaaaaatacttcatagatgacactgtaaacttcatattgtattgcatcaaatggctatcagattagcaataataagtttgatcttttctgtgtaataaaatacttttctcctttgagattagcaggaaattggtgggaataatttcatactaaatggcttagcatttattgatgactg

SEQ ID NO: 55582 - DNA, 1050 bp, Homo sapiens
ttaatgacaattactgctgaaagtcaaacttccaaagaattcatgttaaatgttttccccctcaaaacatgcacaatttaaggtaaactatgtaatgtctagatttgtctcagcattatggggaagaacctatgctattttctatctaggaaaaaacaatcaattatctacctcattaatttaccttaggtgaatgagcatcttaattacttccttaggagctaaggaatttgattagaaaatatgattttagaaaaatcatgagtattttactctctaatcatatatatatttctctaacgttagcataatgattaatagaatgtcaaaagtagtaggaaccacaaactgttaatgtggctagacctgttgagtgctttcccatattatttggcggcctagtgggaactgcatgacaaattgagaagatactcaattgttttcattcttttctggaacatttatttttactgcaaaaattacagattctcaagagaaagttaaagtatttcttgctttcctgagagtaagccaatactgaattatcctgctaatgtctctgtttgttcaataaattgtcagataaaataatagaatgctcagaaaaacttttaaaaattacccttacataaaaagcctacatttttatatgatctggttagttcttagcttaacctttacctacatacttcctcattttaccaaaatagttcattatgttacacattagaacaaaattatttcagttagttttatcctcatttacccccaccttttatgccaattagtcttacatgacagcatcaatgcatttaaattcacaaagtatgtcctaattcagaacccatgtaaggcaatccctgtaggaatgaataatctacttacatacagtcaacttcctggccttaaacaaatagtattaagatattagataatatatgtgaagagcacttgagaaattagttctttcccctatttctgctctctcttctcgtaagatgagtgctttgagcgctttggcctccttttggccaatggtagatatttcct

SEQ ID NO: 55583 - DNA, 1049 bp, Homo sapiens
ttttttttttttttttttttgaggcagagtctctgtcacccaggctggagtgtagtggcgcaatctcagctcattggaacctctgcctcctagattcaagtgattttcctgcctcagtctcccgagtaactgggattcacaggcatgtgctaccatacctggctaatttttgtgtttttagtagagatgggttttgccgtgttggccaagctgatctgaaactcctgacctcaaatgattcacccatctcgacctcccaaagtgctgggattacaagtgtgagccaccatgcccacccctatggtagatatttcaaaacttctttgtgaaaaacagggcagagacatacactaggtcaaattgctctgactctcactgcaacattagtaatttcagctgctattttattcacttcaggaaacttctatggaactcccaagcctccagcagaacccagcccttttcagccagatccagttgatcaagtcctctttgataatgagtttgatgcagaatctcaaagaaaacgaacgacatctgtcagcaagatggaaagaatggatagctctcttcctgaagaggaagaagatgaggacaaggaagctattaatggcagtggaaacgcaggtttgtaaatagatgaacaacttctaactgatcttctagattgattttactattacgttgaattaaaagcactaaaattttttacaaagcatatggagagcaagtgatgggattttaatttttttgtaaaggttgtatgtggagcaaagtgtatttctgtagaccatcctataagctaaagtgagttgtcccaatttggataaatcaatgataaactatcattagtaataaaatatatgccattaccctgctgtttaaaatatttgagatttgcctctgatgttgcaatgtgggagtcttgttggcctatgtcttactttacaggatgtaaacaatatatggatgttttagaatgtagacttcagcctaaacaaagtaaatagggcttgaaagtatgctgataaaaattatctaaaaggttg

SEQ ID NO: 55584 - DNA, 1089 bp, Homo sapiens
aaacttaaaaatttctgcatagcaaagcaaacaatcaacagagtgaaaaagcaatatatagaataggagaaaatatttataaaccatatatattataaagggttaatatgtagaatatagttaaatatttgctgctagataaagctgtttggtttggtataaccagtatggttgatctgtattactgctgctgttgaaaaatgcaactgtaagaaaataatgttcatataggtctatagactttagttcttatgttttgggaatatcccctatggatatttcttttcattggaaaattttgggtaaaattttagcaaattgcctacatctgctgatttagcaataaaattttggatcatgggaacctaagttaagcttttctcaagtggcagtttttagttgggtttagcaaggtattttcgtgttgttgttgttcttattgttgtttcctaacaatctatgtggctcctaggcccctgagttctcatcctttgcattttctaaaatttttttttaagcaaaaaacttttaagtttggggagattatttctctaatagcatgagtaatatagactttctagagataatctcacttttttctacagaaataagctattattcagcatattaaaaactgttttggccaggcacggtggctcacgcctgtaatcccagcactttgggaggccgaggcaggcggattatgaggtcaggagatcgagaccatcctggctaacatggtgaaactctgtctctactaaaaatgcaaaaacttagctgggcacggtggcgggcgcctgtagtcccagctactcgggaggctgaggcaggaaaatggtgtgaacctgagaggtggagcttgcagtgagccgagatcgggccactgcactccagcctctgtgacagagtgagactctgtctcaaaaacaaacaaacaaacaaaaaagtgtttctatcacattctaccagctagtattatacctggcagtggctgcagagctctgcaagtagctcagcggttacaaaagatatagaagatgtgagtaattccctgaaaccttattggcttcatttcctaagagtggtcaa

SEQ ID NO: 55585 - DNA, 1174 bp, Homo sapiens
ttattgtgaacatggtatttgtcttctagagcatgtcccttttactggcttccattctttttcctggtccctaattgtttcagttcagttttctgccttttcttgttttcttttgtagaaagcatttattctcatagctttatcagtttactatagcctgccccattatcaaaatctctagtattgtcctttgttctgaattatatttctgtttcctcttgcttttgagtcttggttttgatttccctactaatacttcaaataagcttatttaaaactaaattgacatctttctcctaatacaacccgtccctctttctgtcatatacgtaccattctcataatcatctatgccaaaatctttgcaattatgtttgcctgttcctctcttcttgctctacttcctgatttagttttcacgtcctgttgctttttcttttttctctttttgccaatatattattatgcaaaagtttcaacatataggaaaatgaaaagaatcatacagtgaacatacatatgcccaccactaggatattacaattaacattttgctacatttgcttcttcacatgattattcatttattctttctctatctgtgatttttcttttatattatatattcctttccattctcctaatcactacacacttggattattcttggtctttcttcctccagttatttctctctctttaatacatcttttatgccagtggttttcaaaatgatcatactcaaactatctactggtacccagtagaaaatattagaactaatttttcataatgttgttactgaaagaaaaagaaacaaactaagcttcactactattttacatacagattggtaatggcattcttactgattccgtatgtcggattatcacatactctaaccagagtgccttgagggaggaatggatgagacacctttgctcttttttcaaggacactgtgaaattttacagttgatttgtgcccagttaagtggatttatagactagttatatagtttttaaactaacctcacataaaatggaaatgtcactttaaaagatttctacaaaaacactactgattgaagatgatacaaataggcaaacccagactaatagcaagaaaatggaagaaccgatactgtttgtgtatcatatatgaccatatataa

SEQ ID NO: 55586 - DNA, 1079 bp, Homo sapiens
tgttgccccaacataattattaatagtatccccttttattctcaaaagtggacagtacattttatgatcatcctaagtatatttttcttaaaatagaatgatcaaaattgcattcagtattctgggaatgtttgaaactctttaatatgggctactctcccacttacaaaactgggtacacctttttaacattgcctatacttatcttcgggggagcctacaatttagaacattgagtctatttgttttatgctcagccagccttttccactttcctctctacactttgtctccccacgtaatagccccacggaagactattttcaggatgaactatgtgtgattcatattagtattctctgcagtgctttgcacagagtagatgctgaaaagagaagaataatattttaagtgtaggttttataggttaagatattgtttacattctgctgaacatttaagatcttctagaaagaccttacagtttctaaaacatgcccttttcttcccagtcttctgatattctgaacacagctgtgtattcaaatacagtgtaaggacacagcttgaacagcttggtttaattgatgtacattttatcttctattcaaataaaatagtgttttggttaggtagttgtcttgaaaatacaacattaggaattcgttttaccctcaacccatcccatttctcttatgatgaaagaaagattaaatttttgctaaaggcagcttacaaatatattgaatgttgatatttcagagcttagagaatgattaaaaaaattatcaactgaatagagctccaccatgagaaaataattgtaattcttacatttaaacaagaaaaatcctatttggggaagaggaaagaaagataaattcatgggatttagaaccaaccagctgcttgatatgcccaaaatagttttgtcttttgaaatagctttttaggggaatactttggcttcatacacaggaaaagatggttaggttaggtctttcctgtatcaaaaataaacaaacaaattttctcttggccctaaccctccccatagtttttatactatcttttccaca

SEQ ID NO: 55587 - DNA, 1027 bp, Homo sapiens
ggtatactaacaatgataatataaattatcagggttttttttttaatgattcacttgagcttgaagtcaaaattctttgctactgaaataagtaggattttagacatttatacatacattttagagaggagttagaaaagggagaaggtctgtgttagaaatctatcttttcagcagttaatagaggtttccaaaattcaaatttagttgctaaattgtagttatttttgcccctctagcaaaaaaattaacttatttgttgattttaatatttttaacatgattatgtttttccaggcgatgttattgtagacatcaatggcaactgtgtcctcggtcacactcatgcagatgttgtccagatgtttcaattggtacctgtcaatcagtatgtaaacctcactttatgtcgtggttatccacttcctgatgacagtgaagatcctgttgtggacattgttgctgctacccctgtcatcaatggacagtcattaaccaagggagagacttgcatgaatcctcaggattttaagccaggagcaatggttctggagcagaatggaaaatcgggacacactttgactggtgatggtctcaatggaccatcagatgcaagtgagcagagagtatccatggcatcgtcaggcagctcccagcctgaactagtgactatccctttgattaagggccctaaagggtttgggtttgcaattgctgacagccctactggacagaaggtgaaaatgatactggatagtcagtggtgtcaaggccttcagaaaggagatataattaaggaaatataccatcaaaatgtgcagaatttaacacatctccaagtggtagaggtgctaaagcagtttccagtaggtgctgatgtaccattgcttatcttaagaggaggtaagtaaaagcacaacatagaaaaagtttcagtgttcaagcgtttatatctactgattgtctttccttacagtttagaatgtgttttcccagcagacttaactagtaattagtgtgcattttc

SEQ ID NO: 55588 - DNA, 1052 bp, Homo sapiens
acagtatgtagaaaatcttgcctgatgacattgaacagacttttaatagctactctgcagatttatattttctgagtttagtgttttgtttcattgtaatgatagggataatggttgtgctttttgagttatcgaacaactttgtattttctattttctttgtacacagccctgaggatctataagggattacataatacaatgtggttatttgaagtgccattttggagaatgggcactttctcagataatacctttctaaaatataactgttttcatagttgaactgcaaaaatctgttggtttgcacaatgctaagttaggaattccttaactcttcagctaaactttacactgtggaccaaactgtactttgttatcttatcagatatatattggggctattattcccctgggagcagctgagaaagatggtcggctccgcgcagctgatgaactaatgtgcattgatggaattcctgttaaagggaaatcacacaaacaagtcttggacctcatgacaactgctgctcgaaatggccatgtgttactaactgtcagacggaagatcttctatggaggtgtgtgaacttgttcctgctctgaaaagttaaaaaagaaacaaagatactagtctacttcctgtgtagttttgcaggttattttattacattcagtagtatctaagataacccatttggtgtgatccagggcctcactgtggaaggctatgcaaacacaaaaggattcagaaataatactactataaaaaaataaattttgggcttctatattaagattattttcatatattgatgcattttgcaaatgtattataggtgggagtattgatttaaatccggttttgttttgttttgttgagttgaggtagagtctcactctgtcacccaggctagagtgcagtggtatgagctcagctcactgcaacctccacctcttgggttcaagcgattctcctgcctcagcctcctgagtagctgggattacaggcacacaccaccacacggctaatttttgtatttttagtagag

SEQ ID NO: 55589 - DNA, 1121 bp, Homo sapiens
ctgcttatgtcttttaatagctgtctgatcttgggcaaattactttccctccaagagctccagtttcttccacaaaatgaggatgatagagacactccctgtctcatgaatgtgaggattaaaggagacagggtatgtgaagcccttagccaaggccttcagtaaatgttagctgctgttgcttgttgtaacttctgctgccattgttatcatcatcattatttagaaaattgtcaccgtctcttaacttttcttttaaaaaaaaacttttaaaagttcatcaatacttaataatgagataggaaagaaagcccaattaaaatgtaagattgaggcagcagctaacatgtggcaggagatgagtatttgcagctcattaattatcaggctgaatggtaaattaggctcaggttgttgatgaattttatgtaaagtacttgagattttcagtcatggtgtaaaaccagaattgataatttcactgaaatgctagttaataatctcataaaatgttgaggcctgagagtattcttgttagaattttatttttcacatatagacagaaaaagggtcctggggaaagctccaatgaggagttttcacttacagagactgaacacttgctgcaaactgtatgacagagaaggtttggttcagaaaggagttagcacaggtggaaaggcaggaaacctgtctcagaatagatcagtattttctttttcttttttttttttttgagacagtcttactctgttgcccaggctggagtggagtggtgtgatctcggttcactgcaacctctgcctcccaggttcaagtgattctcgtgcctcagcctcccgattagctgggattacaggcatgtgccaacacacctggctaattttttttgtatttttagcagagacggggttttgccatgttggccaggctggtctcaaactcccaacctcaggcaatccacccaccttggcctcccaaagtgctgggattacagacatgagccaccgtgcccagccagatcattctttatggacctcatctcaggtattttctgatgacgtatgtctcaagaagagttcctagtagcatctgtggtaccagttatggaattctgagtt

SEQ ID NO: 55590 - DNA, 1088 bp, Homo sapiens
gagtatttatgcatgtgggcaaaagtgagaagtatgaaaatagttccgtttggatgcgatgatgacgtgtggtacttttctgttatgtttttaaataattttctttgatgttatgttgaattttaaatgacgttgattataaatctaacactagcagaaatcttaaataattgaaaaacctggggttttttttcccatagttattcctcataaaattggccgagtcatagaaggaagtccggctgaccgctgtggaaaactgaaagttggagatcatatctctgcagtgaatgggcagtccattgttgaactgtctcatgataacattgttcagctgatcaaagatgctggtgtcaccgtcacactaacggtcattgctgaagaaggtaaggagccagtagacgcgcctgccccaagctgatctgagaggcacaaagcctgtgtgaggcagtggcctcctccagcactgccagaatcactgcggggatataactgtgtatgcacgctggagtcttattcttccccttttcaatttaatgaacttaaaaaacaacttattataaagttgtcagcagctcaagaaaaataatccagctagtgagtgtggaccgtttatttatgtgctagagaagcaagcacccagaagtgaaagagactggtagtacttttcagatcttattttcttaaaataatgtcttaagtcttcgcttaagtgagagaaaatcctttaaacagttcaaagaaagtcactgttgatatcaagtcttttatgtcaggcccatgccacagtgtgcctttccttggggacagggctttgttctgggcagccgctttgtaaacagggtaaaggagtgcgtgggaatggctagtaagtggggcataaaacacatactggcagccgtggagtctcccaaacatgtttaatgtcttgccttgctgtaaagctgccttttgatcattaagaatttctaattaggaaccatctttagccagtccatattctttgtgaattacaacataaccactatgtaatgctctcatttttcctgattttgcaaaactaacaaggagaagccaaaaacagaatt

SEQ ID NO: 55591 - DNA, 1057 bp, Homo sapiens
aatgtagtccaatattgatgctttcttatggctttttattttaatttggctggataagttgtttcaaataactgttaaagatattacttacaattgaatgtttgaaataagaaagtactttaagcaatagagttcatctcctgctgtgttatccaacctcgatgtatacttacagcatctcaggtcaccctttttatttcagttatttaattatgaaaccataaagaagcatgtggaaatagtgtttattgctctttgaagaaaaaccaccaactatttctggatattttggctgtacctactactaaagtcattagtctttaatacataatacatatttgaaaagtaaacatattatatagattatgtgagggacttaatcatgaaaccagtttcacagtccaagtaccaactcttctggtagcaggtgcacaagcttgggtgtttaaaaacaacctgtgtagggtatgcccagcaaatgaggacaaatgtgtagacagtacttactggatcttatttaacttttagctacattaactaactttcttatttaaaaacaagaaagggagactaaacatctgcttaacttgtacacattttcagaattctttttaaaagtctagttaaagatgtttcttagaagttggagactgttaacaacttccataaaatagatccaggtttttcagttccctgaagcagcattcagtagcatctatataaataaaggcaccttctgagaataaaactattttatggagtgtgtgaacacacttgttctgtcacctgggttcatcttgttgtgaagcacattaggtccaggtccttccctctgggagtctgactgtgaaactctttaacccaacaactcaattagcccctgtagataagacatgcttcccagagtgagatttttgaaatccccttttcatccagaactatatttacccacctattgtaactattcaaatagagcaaaattaggaggcttgataaatactaagaatttagtaccacagaaattatttattattttccctgtagtccacaattagtg

SEQ ID NO: 55592 - DNA, 1023 bp, Homo sapiens
ttgcagtgagccaagatcgtgccactgcactccagcctgggtggcagagtgagaccccatctcaaggggaaaaaaaagaaaaagatttatttttgagatgggggtctcactgtgtcatccaggctggactcaaactcctgggcacaagtgatcctcccagctcagcctcctgagtagtttggactacaggtgtctactaccatgcctggctttataattcttaaggctacttgcctagcaatgttgaaaaaatatccaacttagttgatatattaagttaattcagctagctaaaagcaaagattatagattccatgtaataatgacatgctttaaacaagtcatattcccgataaactctaatagaaccagaaaagagccacccgaataaataaatgttattgtttcaaagcacaaatagtttttaggccttggagcatgccatgatgatgtaaaaacttgctctgatgtattcctcataccagactgaaatgtcacattttgtaacaagtttatttatatcaatgttccttagctccactgtggactaagcttcaacttaaatacagctttctggaagtcattagtgagactgtttgttttatacagtttaatctgaatactccttgccttataaatccttactctttgaatggtggacatattaaacataaaataattctttgtctacatgtttaaaagcatttggttttacttctacatgattacatttatttctcttttaaatcttgctattaaaaagggaagtaacaaggtattctcatgtagaataaaaagccaagtgcctttctggatccaagacttctgaaataagagttgttcctgttcaaaagctgcctggtccaagactgatgtaactaaagacaatatcataggatcttagccttctaatctcactagggagacaatgtaataatatctcaaagcttttctccctgttgtgaccagtaagaaaatatgttcactaaaacaacaaaacgattttactgcctgtttgtttct

SEQ ID NO: 55593 - DNA, 1050 bp, Homo sapiens
taccagaaaaataaagtgagttaacctgttttaaatacattaattaatgttttacttctcagaacccagtaagagatagatgctaggctgtgtagattcaaaatgctgacctgatggttttgggttaataactactgtgaaaaaatttccaattttgttacccaggttctgatgattgctgatgtctgtcatattttatatatgtgtgtatgtgtgtgtgtgtgtgtgtgtgtgtgtgtgtgtgtgtgtatatatatatataaaactacaaatgacatattgctcaaatccacctaaaaaaatcttagttagtagaaaagtaggtgagaacacgttatggattttttgaaggtagctctttgaatattaaggaaagacagccttaagcattcatctatacccaagacaaaacacagcaagaagtcactgagtagctatgagaaaacatgtatctcatttcaattctttgatgttttttgtaggagctggacacaccatttagactctatggactgacaatgaatcccttaatctacaatatcacaagagtagttatcctttctgctgtctcaggtgttataagtgatcttctaggatttaatataagagtaagtatcaccaccactctgtagcatcctagtcttaaaaattactatgtacagaaatctgtgttcttcacacgtgtgtgtgtgtgtgtgtgtgtgtgtgtgtgtgtgtttctagcatgcaaataactcttgaggtaaagaaataggcattttgattggtggtccacaggcttttcagcttcagttttctcattttacacaaatataacagacagtgctcttgaatggaacaaaaaaaatcaagtttgaatttcatatcagtttaatagcctgagctgggtaatggtcttactctgatcctggggaatgtacagatgtagaatgaatgaaaaccagtacatgaactgcattgtattatttttgatcctggaagttttaaatgttttttctctatgatgttctatggttgctattgccagacttgatacattttcttctttta

SEQ ID NO: 55594 - DNA, 1070 bp, Homo sapiens
cagtttgctgctctgtagttgcttatccctaataaaatggatgtaatatctcctcctgctctgtgagaattaagatctaatggattgaaaagactttgtatactatggagagatttttattggtggtaatggagcatgcttttaatctcatattctatgtcaagtattagatctttagagtacttgtcatttagcatgtataataagcttcttgaattcttctgtattagacatagaatacattattcagtgtttggaagatacttggttttcagtatgtgaatagacactaagattgagaaatatctcttgtaaatacagagtagtataaagtttttttaattttgtttttaatttcaagtttttccataaactttgaataaaaacatttatcattcgtttctgttttttttttgtcttagaatcgtaatggagaattcttcctacaaggcaaaatataaggaattagtaaagtaaaaggagctatcttcttctgttccataaatgtttaatgaggatgttagattatctagggggatagtgagatgaataagatagaggttttgaactcaaggtgcttacgtgctaattatgttatgttgcaagtaatattaaaatttttcattgttttgatatttaaattgcttcatcattaatttttcatcactaaatagtttttctttgccagagggagactgatcaggaatgggggctagagcacatgacatatgttctctgtagcgatagctattggaatttcaaaatttattttacttgaaaacatgacctttgaaatatgccagattttatgcagtatatatatttttttccaagaaatttaccttaatttctattccttcccttagattaatttatatcttaagatggaaaaaaagccaaataagaaagaacagcttactctagtaaacaatgtattaaagctgtccaccaagttgttgaaagtaagtcataggctatgatacacttttactatcatttgagttaaatcagtcttttctctaagaaaacattaaatggcagatgataccttgggttgggaggggtcctgg

SEQ ID NO: 55595 - DNA, 1039 bp, Homo sapiens
gatatgcagaagaagtgtgatttattttattttattttttgagaccgggtgttgttctattgcccaggttggagtgtagtggtgtgatcacggctcactccagccttgacctcctgaggatcaagcagtccttccagctcagcctccccagtagctgggactacaggcctgcgccaccacacccgactaattttttgtatttttgtagaggtgaggtcttactttgttgcccagtcttgtctcgaactccagggctcaagttatccgcccgtctttcctcccaaagtgctgggattacagggcgtgagccaccatgcccagccccagaaatgtgattttgaatggaaatttaatttgagaataagccagaatcatgtataaacatttgagtttgtgaagtagtggatccataaatgccaaccattctttgggggtctccaaagaatattccttgcaaatgttgagtgtaccacattgtgaagaagtatgttactatgtaatgtgctttggaaacaacagggtaacgagctattaatgaaaattttcactgcccatcttactgaacactgattagaacttcattctttttaatatttttgtattctgggaatatcgttggcaattatatgaatacacagacacatacatacatttcactgtgattttttttaaatctcttctagagatttttatttgcaaaactcttcagccatattacttctgccaggaaagctaggaaatatgaaatacctcatttcagacttaagaaggtggagaatattaaaatatggttatcactgcgttcctatctaaaggtgagttttatttgattaacaatagagtatgtgcaagaatatgctcactgaagctcctggcagcagttactcagtagacagtgtagttctgggtgtcaggcagattatagcagcagctgacagacttgctggacagcaagttggatgtcatctctctgcaaagctggtaggggtaggtaaagaagagcttagaaagggaaaagaaaatctaaatttcctagggg

SEQ ID NO: 55596 - DNA, 1066 bp, Homo sapiens
aaagcatttaacatattttcctattgcttgttggtttgatttttggcaggtaaagaaaaccactacaaggtggtgtcatattgtgcgggattcagatagtctggctgaatcagaatttgaatcagcagccttcagccaggtaaagtatccctttgagaaatcaaggtatatttttgagggtaataactttatccattcctttttttattggttgccctaaagtagcatttacattaatatttgccagcccttccctgtctccaattacccatctccttatctagcagcttttaatgactacacacctagaaagaatattttcctacattgaccctaagcttaaaagtatcacagatgatgcccagcaggaggttacttaatccctaaataatgagattattaaatattcacttggcatatgaagtttatttttaaacatcataaattggattgatgctgatgaagacagatttttgagaaaggagttctgaaagatgggagtagtaaatctcatcatgagagctaaagggcatattatattatttggaaaattgtaactcagaggtgagcagagtagatggtggtggtgtggttttttcttttattttgattaataaggcaattgtggtcatggaataactttcatatttatgttggtacttttctttgactgattatcctttaacgttttggagctgaatcctgttcacgagtaggtctgtagtcaagttcacaatatttagagttggggtcactttgtgtgtgtcaaaaagctcagctaagccaattgagtgggtcatcttggtgtgcttacaggaatcactcccctcccagaacaccttagttgatcagttccataacatggcagtagcttcttagagggagtactgcttgctagagacatcagagtttaacatttaaatattaaaatctattattggctggacatggtggctcatgcctgtaatctcagcactttgagaggttgaggttgttggatagcttgagaccaggagtcggagaccagcctgggcaacaaaatgagaccacatctttacaaaaaaaa

SEQ ID NO: 55597 - DNA, 1050 bp, Homo sapiens
gaggactctggagcctgactacctgggttcaatccccatctttgctgtttgctttctgtgtagccttggaaaatactcttcctttgagcaacacagcacttcaaaatgtgttttatatacagcatctagttgtttttgtggtggaaacccttttgaaatatctaaattatcatgctgctagaaaggtaaatccttttaacacagtattcttcacttgccgagggatctagggcttcagtttttcacttggctaatgtgcatctggatgggcattgtaggaaactatttatttgtgtacttttttaaatgatggatttttatagaaacaatttgtatagtttttagaattaattttaaagaagagctctaatgttttacatcttaaaacctcttcttttcagttatagcaattgtcttatatttgatgatgcctattgtgaacataagtgaagtacttggacccttgtgccttatgctactcatgggaactgtccactgtcaaattgtgtctactcagataacaagaccatcaggaaacaatggaaatcgaagaagaaggtaagatgagaaattacactgtagttgtatattttctgggagagttattgtagagatttataaaacctttgattaatttaaaatctccctcttttgtgtttttcattattttttggcttagaaaatgaatgcattactttgcacttttctccttgatgctgagaaaaccttgttacaaacttttagttccagtttgggatttttgtcattcagtacagttgtttaaaaggaaaatttctatactatattattctttataaaatttatcatatattggcttcaaagaaaacattctctttgaaattcagtcttaatcaaaatttggtgaaaattcactgtaaacaaggatcttggtacatttggttagcgctaccaaaattttaccttttttcaaagatgtgtaataagaattgatttctaagtggtctaaactttttttttttctttttgagacagagtttcgctcttgttgcccaggctggagtgcaatgg

SEQ ID NO: 55598 - DNA, 5288 bp, Homo sapiens
aatttgattattgttatgacacattttgtttctactgttttcctttgctaattatttcacttgactaaattattacatattttaaagtctcacgtaacttttttctttcttcagtgcgtacagtgggtagatgaagctaaactaaaccaaatgaggcgggaaggcattcgttatgctagaattcagctttgcgacaatgatatctacttcatccctagaaatgtcattcatcagttcaaaacagtttcggcggtgtgcagcttagcctggcatataaggcttaaacagtaccaccctgttgtggaagccactcaaaacacagaaagcaattctaacatggactgtggtttaactggaaagcgagaattagaagttgactcccaatgtgtgaggataaaaactgaatctgaagaagcatgcacagagattcagctgttaacaactgcttcatcatctttcccacctgcatcagaacttaatctacagcaagatcagaagactcagcctattccagttttaaaagtggaaagtagactggactctgaccagcaacacaatctgcaagaacattcaaccacttctgtgtgatatgtacatattcaaacacattttttaacttttttaaattttgatgtgaagttatagttttataactggcttaagttaagttttattggagaaatcttgcctataattctataaagagaaatgacattccacaaatgtcaagcatatcttttttacacagattatgcaaagttaagagttgtatcttatcccgttagtacagtatgtaatagtgggtctgctgctactttctgttttaaggtgtgaggtaacaattcaatctcttcttcaaatcaaaatgagaattctctggaataacagattcttgtttggtaaattattcacttcccttaattttatcttgccttgtctcttgccatatttgctgtttttatggataaataagatttatggtttagtacttgtgtctttatggcacaggttcaatttctacagtgaaaatggcataggttgcaggaaagaatttctgcatctggtacatgggcaagtaagttatttagttctaaccacaaataacaagtagtttccaaggaaatttcagtggctctctggtttcttaacaaaagagaaagcacagcactttctgatccaaactgtcttttttttgtatctgttatttaaagcccagtggatatttcaattaaaaaaaaaatctaaagatgaatagtccttggtcattcattatccatggctcattaatctcttctagaatatatgctaactgttgaagatattttgggtaaaagagataatgttgacatgatactctattgttctgcttcctggcatcctcacattttgtggggataattttgcttcctaaactgatcacaactattaaacttagagaataataatagtctttctgatgaggctgccatattttgagcatcaatcttatgataaactattcttgtcacttggcatcaacctcttcatgataaatatctactactgagacacttcaattcacagttttaactggtgaatacctgggtttatttactattactctgtgttgctattttctaagaaagaatacagcactagacttcatcctagagtttcaggtaggctaatgcttagtgcctgagtatttaaattttcttttcaaacaggcacagttcacattgctagtatggtcctaactttctgttattttagaatgttaacatgattcacattatactttctcttagttaataatacagtaggccttttgtttattaatggaagagtactccccacacctaagaccagattcttatatctccctggttacagtgcaatttggagattttttttttttcctggatggtaagatttgaaatatttacattaacataggcaaaaaaaaaaaaaaatacaagatgctgctttattatgtctgtcaccatgaaaacttagctgcatcttttgaaatatcaaatatgaattttctctaaaatattctgaaataggttaaatcttatataaatattactttgtgcaatattgttgtgtagttaaatgcatattagcaaagtatagaggtcactgtgtaaaccgatagaaaagtaaccatcagcaaatactgcagtgattagttagaatctgtattattccttatatatatgtatatgtatgtattctctgttacaaaggatgaagacaaatagggatacatttcaatgtaaaccatttatgaattggaagtgatgttggctttagttatctttgtaaataaggtaattagaatggtatgaaaggtaatgtgattattgcaggggtgtttttaaatcttgggtataaattctagggtaaattccagtttatccagactagtttttaacgggacctgcctttgagggtgttttttgttattttgttggggaggggtttaatcacaaagtgtgtgggtttgggttatttcttgtttttatttttctgtccagaagagctttaccaggctgtgcaaagtaaaattcttctcaggcaacatttgcttttaaaaataatcatgaagagaaggctgttaaagcaaaaattttttttttttaattttttcttgtcttccaagatccgatttccccatctcccacttgccatccagcagatgccatctgtcatccaagctggtcattgctaataaacaaggagactgtctcctgacagccagcactgtgtattatcactcaggaaccagcggatctgcaaagacctacaatcaaaagcaaatccccattttccttttataaaacattctaccctcacctccaatataaacacattaaaagagtacaataaaaatgtttaaaatcatgtactaataaattcattgtatgttagaattgcaatagaatgaagagaaacatttagctagtaacgtgatctgaaaactgaatgtcctatgtgagtattagattttaatagcatgctttaaagactgatgagtataaaagcagaagttttgcgttttttactgctttcaaagctgtatcctagtttagtgatacaaatgattgcaatttttctaaatcattaaattatttggtttggtggagtgaggcatggagcaatctggcgtcttctgatttgttaaagtagtgatggcagtgaagttgtaactgaaatttaagctgatcttcctttttggtatattatccgttgtgccagctcttgagattacttgcacaatgtggctataagttttaatattttgtggagcagagggatggtttttaaatgtgcttatggaaaggacccaataaatgaatattcctaacttagtaaagtagaataatttcatggtattcattaaaaagcataaaagtcttcctcttgccccagaagtaattctctataccaagatatgctaggagtaggatgatgattcaaagtggtaacccaaattcataaagcaataataataaaaacctatatagtatgttctctcctccaaagttttaactctaaaaattggttcctaggtttaattgtacctttaatttgcttattcagtacttagaatttgtttaactggtacttttattattttttagtgaaagacttttgaaaagtgccctttccccttaagagacagttggaataccagttgactaatattacaagctcttgtagggggaaaaaggagcttattaaagttgtttactaaactttaggaaaagatgtcttgcatcagtcttactaggcataaaagtcacacttaatgactggaaaaaacttgcttattgcctttccctatataaatattaattgtctagaatgaaagctaatataggaacaagactcccaaatccatgaaaacgcttagtgaatatattcttaatcattaataaattagcccattatattttcatctgtatttgccataaaaaatttatttgcatttatgcctttaggataattttgtatctttctaatctgttttatcattgctacaggtttttaaaaaagaacctttcactagctagcacatgccagaggttcacatctgttttgtttttcaaacaggtcgtagctgtatttattggccatgcaagtagaggaaatgcacagtacaaatgtttttctttagcacgtaagggacctatccttgtcttgaaagtttgttgctttaaaagcaagtatctctccataaatattatggccttccattttcttcatacattttttaggatccacttgtgcatgtagttgagaccactgtctcttaaaatatagcacttttcaattctctctaaagaaatacttatgtactactatcacatgttgtaaattttcatgtaatagtgttttctgtgagtaaactccattttgattggcagctaagactttttttcctgtggcttttatttatctaagaggtctttgcatatagatgaaatgtatatttgcctggcggactatttgcgttgtgtggccttagtttgtttattgacattaacgagtgttttaaaaaggtttttaatgaatagtcttaaatctaaatttgtgtgaataatccttttaacacagtgcttttttgtagctgtctaagtgtgttaaattgttaagctatttctttgtaaaataggacaatggaatgcatagtttttttttttcctgtaaagtatttttttaataaaaaaagtctgatttgtcctttactggtgtttcatcacaaaatgcatagcatatgtgagttctaaatacctggaacctgtttttagaggacgaatccctcacctactgtatcccctactacttcaaaaaaaatttttagaaaatcttatgacttctttcctaaagatgtctggggaaaattccatccatattgagatgcaattagtttgggggaagaagaaaaaatacacttgacatttgttgtagttaatgcctcttaattgcttaaattggtgtgtatctacttaaaagaggacagtcttaaatttttattctggtgatgtggattttcttgaaagtgcattgagtattaatgaagatggcgtatagacttttatgtcattgatgtattaatgtgacacaacaaaatggatttctttcctcatcagtttttgtgtgaagttatctttaattgaggtacctgtcctaagcactgatagcctttggttctgtctaggaaaggaaaagaaagggacttcacattttttgagtaactgccatgggccaggcagtttatatgagggtttctcatttaa

SEQ ID NO: 55599 - DNA, 1074 bp, Homo sapiens
taaagccaacatcacttccaattcataaatggtttacattgaaatgtatccctatttgtcttcatcctttgtaacagagaatacatacatatacatatatataaggaataatacagattctaactaatcactgcagtatttgctgatggttacttttctatcggtttacacagtgacctctatactttgctaatatgcatttaactacacaacaatattgcacaaagtaatatttatataagatttaacctatttcagaatattttagagaaaattcatatttgatatttcaaaagatgcagctaagttttcatggtgacagacataataaagcagcatcttgtatttttttttttttttgcctatgttaatgtaaatatttcaaatcttaccatccaggaaaaaaaaaaaatctccaaattgcactgtaaccagggagatataagaatctggtcttaggtgtggggagtactcttccattaataaacaaaaggcctactgtattattaactaagagaaagtataatgtgaatcatgttaacattctaaaataacagaaagttaggaccatactagcaatgtgaactgtgcctgtttgaaaagaaaatttaaatactcaggcactaagcattagcctacctgaaactctaggatgaagtctagtgctgtattctttcttagaaaatagcaacacagagtaatagtaaataaacccaggtattcaccagttaaaactgtgaattgaagtgtctcagtagtagatatttatcatgaagaggttgatgccaagtgacaagaatagtttatcataagattgatgctcaaaatatggcagcctcatcagaaagactattattattctctaagtttaatagttgtgatcagtttaggaagcaaaattatccccacaaaatgtgaggatgccaggaagcagaacaatagagtatcatgtcaacattatctcttttacccaaaatatcttcaacagttagcatatattctagaagagattaatgagccatggataatgaatgaccaaggactattcatctttagattttttttttaattgaa

SEQ ID NO: 55600 - DNA, 1007 bp, Homo sapiens
ttttggcttttgtgaataatgctggtgtgaacatgggtgtataaatatctcttcatgtccctgcattcaattattttggctatacacccaggagtgaagttgctggattatatggtagttctatttgtaatgttttgagaaactaccagactgttgtccacagtggctaaaccattttatattctgttggggcccagttttaacaaagctcaggacatggagatacaaagtggcgagaggactgcaaatgcaactagtttagaataaaactattctttttagccatttttgttttaattttacaacagcaaatctgatttttatggctttttaagctttagtttttttcaaattaaaaaaaaattgtatacctagtccttagaaactatgcatctatttctctgctggtagaagcatttccaagaacaaaagaactgaaatttgtcatcatttttcattgtgagatgtttgtctctgaaacttaattttgttaatcttaggagtgaccaacctcgcataaccaaagatgtgatttgttttcatgctgaggattttactgatgttgtacaaagacttcagttagatcttcatgaacctccagtttcccaggtaataacttatgttttatcaccatttgcgatattagaagtaaatatctatacccattttattttgaattttatcttacagtctgatatgtgggatagtgagtttaattttattactgttaaagactggggtgggggtggtgctgaaaatcatttaaacagagcttccctagcagaatgcttgaaatcctttcaatctttgggataccaggtgggcctgggatggttagaggtcccaggcggctcagttatggccatgagctgtctcacttgttaaccccattgcactgtgtcccctcaactgcaaaaggctgaaagacacactaaaagaaaagaaaacatgttgcctttatgtgtggtaaagaatattgatacttagctgtactttgaaatacttaa

SEQ ID NO: 55601 - DNA, 1129 bp, Homo sapiens
tctagtgttacctgacttttagttataagaaagtgggtctaagtgcagcctgattaatgcttaattatagctatatttccatccagagttttgttaactgtgtgagggcagcctcactagtagcatattttgagagttggaaataagatgaatgagggtaaagaagccttaaactttgacttttattttctgttgctagaacagaagcactacatttgagcctaatctaagatatattttcagctttattatggcacacagggagaggaaggtaattacattaagcattataatatagtgtgttaaatgctaatgatcataatcattgaacccttctcagtcctcatcttatttaaatctggtattttagcagacttttttgccttactgctattaattaatttttttttggtctctttcttccttgcttaccctttgtttaacaaccaaatcaactctagatcaatgaatgaaataaaaaatctccagtacctacctcggaccagtgaaccccgcgaagttctctttgaagataggactagagctcatgctgatcatgtcggtcaggggtttgactggcagagtacggctgctgttggagttttgaaagctgtacaatttggtgaatggtgagttaattgaactcaactgcaaggttggttaatattgtataagacaatgtggactctatttaaaaggtttaggaccagttttttaaattgtggtaaaatacacataaagtttgccatcttaaccatttttaaatgtacatttggtagagttaagcatctttacattgttacgaaacagagctccagaaccttttcatcttgcgaggctgtaactctatactcactgaacaacaattcctcttttactctcacccccaggctctggtaaccatcattctactttgtttctatgaatttgactactttacatatttcatatagatggaatcatatagtgtttatctttttgtgactggcttatttctcttagcattgtcctcaggattcatccgtgttgtagcaagggtcagaatctccttccctttttaggctgaataataattcattgtatgtatataccacatgttgttaatcagtttatccatcagtggacactt

SEQ ID NO: 55602 - DNA, 1001 bp, Homo sapiens
accacaatttaaaaaactggtcctaaaccttttaaatagagtccacattgtcttatacaatattaaccaaccttgcagttgagttcaattaactcaccattcaccaaattgtacagctttcaaaactccaacagcagccgtactctgccagtcaaacccctgaccgacatgatcagcatgagctctagtcctatcttcaaagagaacttcgcggggttcactggtccgaggtaggtactggagattttttatttcattcattgatctagagttgatttggttgttaaacaaagggtaagcaaggaagaaagagaccaaaaaaaaattaattaatagcagtaaggcaaaaaagtctgctaaaataccagatttaaataagatgaggactgagaagggttcaatgattatgatcattagcatttaacacactatattataatgcttaatgtaattaccttcctctccctgtgtgccataataaagctgaaaatatatcttagattaggctcaaatgtagtgcttctgttctagcaacagaaaataaaagtcaaagtttaaggcttctttaccctcattcatcttatttccaactctcaaaatatgctactagtgaggctgccctcacacagttaacaaaactctggatggaaatatagctataattaagcattaatcaggctgcacttagacccactttcttataactaaaagtcaggtaacactagatactgaccatttgcatccctgttgttcctacagatagaatttcttggaagtgggaaaacctttttgtgaaaaaaaaaatatatatatatatactttttttaaaaaagaattctagtgttagcatcataaggcttttgtttaagatagaatctctgatgttaagaatggcttaagcagatcctgaattctggcaaaacagctgctgccaaccaatttaaagacccccacagaaaaacctaatcagcatgataatagtttattcatccctttgtcca

SEQ ID NO: 55603 - DNA, 2103 bp, Homo sapiens
tttcacaatatgtcttgagtctttcattcttattttttaattatactttttgttgtttagtagtcaccttaaattgaaagattcatgtctcctttcctttctgataatttttcttacttaattggtttggtaatttcttcttcattttctcttatttctttctgaaactactattggttgaataatagagctcctggtttgatggtcctcatatttcctattatctttttgcttttgattcggagacatttactggacttttgtcttctaacctttctttggtgttttaaaattttagcattgttcattttggtttttctctgtcaggctgctatcttcagaagctggtgattctcggttgacccattcatatgttaaaataaagcattgggtctattgtgagttctatttatattttggtgagtcttgtcaacaggtagacaattgtcagttgtcaacttagagtgaacaggcatagaaatggacactaaatgatgtgcccaaatttcagaggattatgttctatttttgtggcaatttccatgtgtttagagaatgtgcagtttttctggctgaaagtttatcaggatgtttttggctataagcaacaaaaattttggttcaaacttgtttataaaataaaatgtctgtcttgtatatcgagaagtccagagaggttggttctaggcaccatatggtcagtgtgtcagtgctgttatcaagggaccagattctttccttttctctgttctaacattctcttggcttaggctatttacttacactagctccctttatagttgctagatggctgaggcagttctagacatcacatcttgatttggctatatctaatagaagaagatagtatcttttcttgtacttctttcttaggagctaggaaacttcccagaagtctcttcagcatatttcctttcatactattagacagaatcagttcatgtctattcctaaatcagtcactgtcaggggaaatgagcttaccataatttaccagtactcatcagaaattaactctggagcttgtgaatgaggtcacatacagggcagaatgagatgcctaataaaaattagggttctgtcagggaattaaaggggaggaatggatgctgggtgggtagccatagtctactccatgtggggctaaatgtctgtctacatttctacctgcagggatgacttgtttatttgcagaatttcactttaattccccttttctcagcctcacttcatttctgttcatcattattatgcctggcttctttttggactcaggcttttccaaggtctgttgggcaggtctgctgcctttttggctgctgatcccttcttgtgtattctatgcctgtggctttctctgcacagttttattagtctcaggtactaggatcattttccatcttgcaaaagtttgttgatattgctcattcattaattcatttcctttgttgcttcttattcactatcatctttagattattatatttagaaattcttgagcacataaaaaagcagaaaacaatataataaactgctgtgtgtttaatatacaatcaacagctgtcaactcatggctaattctgtttcatctgtactctaatccattctcccatctaatccccacttcccctattattggtttgaagacttttactttcattttaatgtagaaggagataacatggatgcctggtttgcaatcttgaatcagaactctagtttaactataatagggtcattgcctgatgcacatggcaagtcagtacaccaaaacagcagactgcaacagagaaagtttaattgtagggccactaaaggaggagatgggaggaaatctcaaatctgtctccctgaggagtttgggggtgagggtttttaaaggttttggaatgggctgatgtgtggagatgtttattggtccgagagtacaaagtgaagtcatggacaaagggatgaataaactattatcatgctgattaggtttttctgtgggggtctttaaattggttggcagcagctgttttgccagaattcaggatctgcttaagccattcttaacatcagagattctatcttaaacaa

SEQ ID NO: 55604 - DNA, 1039 bp, Homo sapiens
gctatgcttctatcatcacatcgccttctcaaatatctctttgcctcagtctttaaaagacacgtgttattacatttaagcccacctggataatccaggagactctccccatctcaggatccttaatttattcacatctgcagagtccattttgccataaggtaacattcacagattctggggattaggttctaggggttaggttctttggaagccgtttttcaacctatcacatacttctggctcatcatgtccaaaacagtgaaacctgatcctcctccagaagagagagtagttgctctttcaggttccaaagtacagaacctggtagtcatctttcatacttctttctcttatctatcatatccaatctttgtccacatcttgacaattttatctcctgtataattttcagatctctttgtttttcttttaaaaagaagtccctatttaaaatcaagttattagcttagcctaacatttcttatttggcatattatagaatactcctagctgatctctttactttttgtgcccctctgagaaaactaaacaaacaaaaaaccaaaggcaaattgggtaactttccttcttttcagatcctttagtggctttccagaatccttgatgtgatcttctaggctctccataatccagctacagctgatttttccagtctcatctttatttttctcttttgctttctgtgtttattatcattagctttcttttagatcttggaaagggcaatgcttaagagattttgtttccctctgaacttgttcttcagatttgagctcaatgttacttcaaggaatactttattccccggatcaggatcccatgttctttttcatagtgtcatacatcttacattctgaagatcaaagtttataattaaatgtttatttagattagtgtctgcctctccttactagactgtaagcttcaagtggccaggaataggtctggtttgctatacctgtgttgagtacagtggcataaaatatatgtttatgtgctatgtagtgacgtttca

SEQ ID NO: 55605 - DNA, 1824 bp, Homo sapiens
ttcacaaggcacaaggttaggaagatcgctggctaattttttcctttctgtgttttaaaaagtcagcttgaataggcttcttcctgaaacgtgagttctgtggaataatccacacccgctctcaacccccatacacagggttttccacatagtgcttttttagcttggtgttctcctgagttattaacagatttataattgtcctttgtagaagctctatgtattggggacacagttgagcttacttaattcagaaattcatacaggataactgtgaagttgagtttctaatttaaacactacatatgtattgacagcagtatatatattcaaagataattgtttaacattttatagatattataaagagaataaattttatgcaaaactattattttttttaataggcatatttctctttgatgccacatccttctcccctccccactttgccttctgattttaccaaagactgtgtttttcctgttggcgttatgtctcctgcttccatggcagctttagttttttctgttctttggtctcgtacttacctccctccagtcctcccaattctgtttgttcctccactgtgctccagtacataaactccggaaagctgtagaattcaacttgttctttgttttcagttgctatttccaggccagagtttcccaaacttgccagatcctaagaataatttggggttgctagttcaaatatacattagactctcaggttcctcttctggaaattttggttcatgaggtctggagtgaggcatgaaataagtaccttgaccgacttgattcctatgatcaggcaagtttaagaaacactgttttaaaccatataccatctaccattactctagttcctttcatttgacctgtagatagcatctttttagaatttcagagcatcataaactaagagataatcttatctgacctctacaaagtgcaaattttaaaaaatcatgttttgattggccatcactggggactttgtctcttcatgacattttataatgcttcccattgggttgtcaacattgcctgggaagcctacttcttttctttgtttagcttgtttacctgttcttcataaatactatttaaactttatctgtatacatcttttcctcattctctcctgttacagtagagaagatattctatctcctcctcaaaggctaatttgtcaggctaatttgtctacttgtgttatgaataccatcccttagcctgctaaggtttttaaaaaactgttgtcaaatatacacaaaatttaccattttaaccattttaaagtgtataattctgtggcattgggtatatatattgttctattaccactaccgtttccagaactttttcctcataccaaacagaaactctatacccattaggttaggatctttgatgtcagttacccgctactacccctccaacctttcccttctccattcccactccccacgtaactaaaagtataaaatatattaagcgaatttctgcttcgtgtctttcccccgctttttttttctctaaataaacttttcctttctccctagaagtaaatctttattctgaatttgtggcttatcatgtcgttttatcttttaacattttactaataccaaatgaacataaaaacaatacttgtacctttgtattttaaaactacagtgtattgtgtgtatcattctgcaggttatttttgttcaacattgtttttgaagattattttgatacatctaactctacattaattttaaccattatatttggtattttgttgggcagctgtatcactgtttttgaa

SEQ ID NO: 55606 - DNA, 1080 bp, Homo sapiens
tgatgagctcagtttgagatattttgagttgaaggtacctgtgggaatttacggttagaaataactgttaggaggctgggcatggtgtctcacatctgtaatcccagcagtttggaggctgaggtgaacagattgcttgagatcaggaattttgagaccagcctggtcaaagtggtgaaaccccatgtctactaaaaattcaaaaattagctgacatggtggcgggcgcctgtaatcccagctgcttgggatgctggcttgaacctgggaggtggagtttgcactgagccaagatcacgtcactcactccagcctgggcgacagagcaagtctcaataaagaaaaaaagaaaaaaaaaaaaagaactcttaggaattgaatgtatggatccaagtttgagagatgtgtctaggttggagatgcagaagttgaacccattaatgcaggagatgcggagatgcagaagatggaaccagcaatagcagtggaaaagagatgaaactaagggtggaatcttgtgatgcatccacaagtaagtatgatgaacatgggaaaagaccaaaaagaaaggcaggcagaagaaagactagaagttttctgcattttaagaatgaagtgtttattttatccatatgaaggatccagtaagtaaggatgggaaagtggtaggtttatcaattaggaattgaattggagacatgatcaagattagtgctttgcaaaccgtggacaggtaaatactattgtaaattatgccttttctttagaaccttgctactaaaagtttgctctatgtatgaatttggcaccaccagggagcttgctaggagtgtagactgggctcttacccagattttctgaatcagaatctgcatttttaaaaggtgattcatatgcacattaaactttgagaagctttagaactcagctcctctaagcaggagaaagtaaaatgtagattttgtgcaagaaaaatgaaaacttctgttatttttatatttttaaattattgtggtggctaaagctaggatccacatatagggttttcttttaacattctagaaaactcaaatgttctaa

SEQ ID NO: 55607 - DNA, 1906 bp, Homo sapiens
cctgtttatatgccaggtttttggagtttttatatctctttcagtaacttgttggcagtccatcccagaaatataccccatttatgtgacttggaagtgtcattaggaagaccgccatagcctctgctccttctgcctatacattgttgtaggtgaagacattttttgaagccttgcatgggcagctaggcttaagtcagcagggaaacgtctgcttcttaaccagtggttttaaccaaacatttttttcagtgaagttattttagggaataagaagttaataatgtgtcctagtttttttcttacttgcttttctcgtaagaattgaatataaatggtcagctataagtttctgcagtatatattataaattcaactttagtggagactttcactttttaaacttttatgattatatgttctgttttttcaggttgtctagtaatttgctgccattcttttcccttaatatatatatatttttttaggtaaatagattgttgccgtaataagactctcagctgcctgaattatagtggtttcaagccacttagatttatttgaaacctcctctaacttgaatctttttagtgagtcttaccatctttgcctccaatgaggggagtatccagtttagatttatgagcttcagaatttctctaattgaagttctctctgcagtagagagagcaggagcagccaatgtggagaggtcgcaagatggggctgcccaagatgttggaacaccatgtgcaataaagggcttcgtcttggattttggccttattaccacaaccaggtaccgaagtgctgacttttgtagtagattttcttttttcattttcattttttttttaagttttgccctttgaaggtcaaggaatcctatttttataaatattgcagatgagactgaaaacatttctcctaatatagtccataatccccataagttccctatttaacaaggaaagatattgctgagagcagaatcaacatgctctatcatttttttagtttagaaaaatgcagcaaattttctcttttgatagaccaacaagcatttctgagaaataagccagaaatttgggggaaaactgtcccagttttgtaagggtgtctttttaacattcatattagttaaagtggatcaaatttgtatgtcaacagacagtatccagtctaaatagttaataaaagaaaatatcttgaaatattccctgctgatttttgtcctccaattaattttttaaaatggagctgaaatttaaatgactgtaccaacaacttaccttgatacttactttgagatttaaaaaataaccactttttaagaacatttcagattatgattaaattagatattaaacgcttcaaccacataagaatattgaggactgttgaatgagtcctgtgctctggtggtcctggaacttaattttatttatgaattttcagtcattagagaagagtatggtgtggatatgggaggttggattagccgactaaactttgaagtttgcaactttagcagatgttgggatagaagttaacacagtagttcaaattgatttcgcacttcatggtttatagaaatgctttcacattcatatctgaatatttgaaacaacctagtgggtaggtaggtaagcaattttatctgtgtttcccatggaagaaactgaggctgggagatgttcattgtttgttatccaaggtcatatagctagtaagtagaagagtccagatgcaaacccaggccacctgaacaatgttcacatcattttaccatggagaagagattagtgcttttatttgtctaacactctggtcagtgaaattaaagtatctccgtgtgaaacagcatgcaaaaggctttgtttctaatatttttaacaaatccctt

SEQ ID NO: 55608 - DNA, 1031 bp, Homo sapiens
atttttatcatgttgatttatgagattacaatgtaagattcttttctttatacagtggttttctctttttttgttttttttgttgtttttttttgagatgggccatgttggactaattgaatggttttcatataagtgaattttgtgaaactcgtataagtgaaacccacagagacttgaccaagttagaaataccactggaaagttgatagtaatacagaaaatgtgttacaatcaacgcagttctttcttggtgctaatttcagtggcagatctaggtcacaattcattttctgcataccaaatacctcttccgaagcttaaaataacaagatctatttggagatattttcttttcttgttttcctgtgaaattgctaaaacattaatagaagagagtaattagatgactatttttaaattggtctaacctttatattgaatggcattaacatttagttgcttgggagaattgcctaaattactgatttgatattggggaaagtatttagatgaattttatttggtaagaagtatacttcttaccaaataaatgactattactaagtgtttaattctcaaatatctcaaatatttagttgtatatagaataaaagatgactttttctcttgccaggttaacagtattctgattaaatgtaaattttgctatcttattacagtttaattacaagtgatatttgcaaataaacggttttcattttattgttcttagaaggaaatattatttggcattagtaaagtctttgacttgcttttttaagtattttctttagaaggtttcgtaacccttgtagtagctaattgacttgaagtgattttatatggagtattggaactgtcatatatttacatattgtaccaagtaaattcttaactctaaaatttgttgaacttgtttttctagatgtaaaaataggattaattggaatatttgtcttaactccaaattacttcaattatgttagaaaaaacgattgtttggtgggtaaattctatgcagtaaatac

SEQ ID NO: 55609 - DNA, 1119 bp, Homo sapiens
ttactcttgaccagttgcctaactgctatcaccgagtgtaagtgttcctgagccagatgtttaatggaaattttctctcatgtcaaaaagcagggattttaagtccagaaacacttctttttgatgttagcaatggagaattattgggattataagggaattgaaataaacaatcttatttatcagaacaacaactgtagggactaatatttttccctgctcaccctgagagaggcaaaaacacctttaagggcacgaaaacttttgaaatggcactaagtaagatatttgttgaagtaatactccctttattccaagctacctcaggtccattaattgtaaccagataatcttagttgatcatctaatgggagtgttgcagggagatgtctgatagtggaggcggaaaggaagagagtgtagggtgcagtatgttagaagaatttgttttggagtcagataggtgagaagtttgaatcttggctgttgtgtactagctttgtgacctaatataaattacatatcttgtttcaggctgtttctttctccgtacttcattggtttgaggattaaaataaaataacatatatggtccctattagacatttggcaaatacgttttctttcctctttcagagatctttcttatgtgtttctcttgataatcaagatgataagagacttattgtgtgtcacatattgtgatgagggccttatagtcattgtctcatttaattcttaaaataactctgtgagatagactctagaattaataacttttttttttttctgagacggggttgcccaggctggagtgtagtgaagtgattatagctcactgtaacctcgaactcctgggctcaagcgatcctcccacctcagcctgtagctaagcctagctcactcctgcagctaggactacaggcatgcaccgccaagcccagctaactttttttttttttttttttttgtaaaaatggggtcctgctgtgttgctcaggctggtcttgaattcctggactctagcagtcttcctgcctcagtctcccaaagtgctgggattacaggcatgaggcactgtacctggcctattataacattttaagatgagaaaattta

SEQ ID NO: 55610 - DNA, 1026 bp, Homo sapiens
gcctcccacaagtgctgggattacaggcatgagccactgtgcctggcctaacaatggtttttacaatttaaaatagttggaacgaccttgtagcgcatggaaatcatacgaaatttaaactgtgtccagaaataaagctttattggaatatagctctgttcattcatatatattgtctatggtagtttttgcactacagtagcagaatacagtaattgagacagagaccataagacctgcaaagcctgctgttcggctctttagagaagtttgccacccttgagttcacttaagagacatgttccttcctgcacagcagttcaacagtatttaatctgaattcatgtggagactaattacaaattattacaatctcagacatttggagttgttcataaacagttgaaacaaaaatttaatctgtaaatgctagggtaaacttgttcatctttaaaacagaaagaagtgattttcagagagatgaagtgaaatgcttaaaattttttagttggtgatagagctgaatacagaactcaatttttttccctcatggcccagttgacctctctttctgctatgcacactggggttgattatttaacagagatatttaaatgctgtttttatttcttatagggaataagcttgagtgtaactaaactggaggttacctatgtgttttgaaatcttaatttttttctctccctcttattgctcataaaaacataggacaggccgggcgcggtggctcatgcctgtattcccagaccaaggtgggcaaatcacgaggtcgggagtttgacaccagcctagtcaacatggtgaaaccctgtctctacgaaaaatacaaaaaattagctgggctacttgggaggctgaggcaggagaatcacttgaacctggaaggcggaggttgcactgagctgagattgcgccacttgcattccagcctggtcgacagagtcagactccgtttcaaaaaaaaaaataggacaaacatacttccttaaaaatccatgaaaagaa

SEQ ID NO: 55611 - DNA, 1681 bp, Homo sapiens
agttgcatttgattctgtctagcacactttgtggatctgttaattccaatagccctcaagaatattttactagaaaatgtcagagtatccaattaaatgtggattctagaaaaattagattggccagaactgatgtcttcctgttcccaagtacctgtagcatttatttatattctttgtggaagaaatgtgatgcttttgattatgccgtatgtttgtactttatatattattttatataatttactagttgtttttcctcaggaatatttgaaatacttgtttcttagtactggaccagttaggttattacatgttaatgagacaatctttcaacctaaagttttgtgagtcttgcattctttccacgtattgagtcttaaggctaatcattttttttggtggtgctatttccgaatactgtagttcgttgcaaataattgctcaataagtatttattgaatagcattaaatttttattcatttggtggcatccaaatcttgggagtagaacttgtggcaagatgacaggactgccagttttcaccaccaatatgcaatgatcttgctctctttttatttttacttttattccctactttctcatttcttgtgtgtgtgtgtgtgtgtgtgtgtgtgtgttttaactgtacagaactagagggaattagtgatcctctggcttaaatttgtattgtagaaaaggaaactgaggcccaaagtagtaaagaggcctgttcaatcaaatcacagttaattcgcatgaagtgcaaaaaaattaaatattttttaaaaaggtgaatattggcataacaggcagtagaacccaggctcctgaatcctgcttcaagcttcatctccaggcttcatgatgttgctttctcttcctgctattcattttttccactcctttgtttaccttttccctgtgctttgacattacagtggctttatatcatcgaggatctctgacctggccccgttttatgggggatagtggcaataacatgtgtaataatttacaatctttctctgaagattgcacaggccccatgttctttaaaaaacacacttctgacctaatgctgactgatagaactttctcagatgatggaaattttctgtatttgtgctgaccaatatggtagccgtatgtggttcctgaacagacttgaaatgtggcatgattgaggaactgaaattttgattttatttaattctaattaatttataattagtcacatatggctagtggctaccacactggacaacaccactctaaatatctgtagtttgccaacatgtgaagaagagaagtgggttaagataagcccatttaaacattttaacttttggctgagagattgttggattatatacccaaactatattttgggtgaaaaagaattttttggtcaaatacatttgagaaaaactgtgtactgtagccttctacatatgtaacatgaattggcaaactggcattttaaaagttttgaaaaccctacagaaaataaactggtttaactttgtttaatccaggcttttgcacatagtttgactgatatcttttttgtcctctgaacatctttattgttacagtggtatgcaggaggcatgcctctggtattaatctgagtttaaatcatggctctaacacttactgtgtgagcctgaacaa

SEQ ID NO: 55612 - DNA, 1063 bp, Homo sapiens
cgggggcgcggcggaactacagctcccatgacgctttgcgcggcatagggtgctttacaatagaagctcggttggagaggcctgcggagaaaagctgggaacggccgcttccggcatgttcatctctggacgaagaacggccgacaagtggagggcggaggagagactccaatgcccagcgggcagtgcgcgggcggcgcttgcgcgatgcgcggacgggggggcggtcgggccatttaaatgtgtgtttgtgggtgaaatggctgcgcaggtcggagcggtgcgcgtagtacgggcggtggcggcgcaggaggagccggacaaagaggggaaggagaaacctcatgctggggtctccccgcggggagttaaacggcagcgccgatctagcagtggggggtctcaggagaagcgggggcggccgagccaggagccccctctcgctccccctcaccggcggcgtcgcagccgccaacatcctgggccgctgccgccaacgaatgcagccccaactgtcccaggccctgttgagcctcttctcctgccgcctccgccgccaccttcgctggcacccgccgggcccgctgtcgctgcccctctcccggccccaagcacctcggccctcttcaccttctcgcctctgacggtgagcgcggccgggcccaagcataagggccacaaggagcggcacaagcaccatcaccaccgcggccccgatggtgatcccagctcctgcggaaccgatctcaagcacaaggacaagcaggaaaacggcgagaggactggaggggtgcctctgatcaaagcccccaagagaggtgagagcaggcaaactgcccggcttgggttctaggtctctctcagttccgatatcccgcatctttaggactgaaagacgccaaacccctgcttaccttctgctgctgtacttctctaagctcactggggtggaccctggatttcagatcgttgacacggtttgatctaactacttgaggcttctcgctccgaggccgagctgtcagttgctaatccctttaccggtcccccggagcctctcagc

SEQ ID NO: 55613 - DNA, 1065 bp, Homo sapiens
gaaagtagagtatcttagcactaaacctcagactgttgcctgaatttgaagcatttgtgagcaagaaagaggttcgtcactggttatttcagccatttgtccaaaaataaaagtcacattgtgtacatttgggaatttggataaaaaacttagctcctacagattaagaacatctttcacacaagttttctgtctcttttaggacccttgattcctgaagagaacaaggagagggtacaagaactccctgattctggagccctcatgctagtccccaatcgccagcttactgctgattattttgagaaaacttggcttagccttaaagttgctcatcagcaagtgttgccttggcggggagaattccatcctgacaccctccagatggctcttcaagtagtgaacatccagaccatcgcaatgagtagggctgggtctcggccatggaaagcatacctcagtgctcaggatgatactggctgtctgttcttaacagaactgctattggagcctggaaactcagaaatgcagatctctgtgaaacaaaatgaagcaagaacggagacgctgaatagttttatttctgtattagaaactgtgattggaacaattgaagaaataaaatcataacagagtcttgttgcttgtctagagtaagatgaataactattacactttcttagtctttcctattagagctgccagtaagtccagataatatcagatacaaaggagagtggaaaatctagaaatcaggattcttaagtttttggccaaagaacattgattcattcctttcattcctattggcaattgaccccatttttcagtgatgatgttgtagaggttaatgttggtaaggagatgcgttgaggatgggatttggattatttcctaatcaattttaggaattgtgttagtaattaaagatggctgatgtgtggaaactgataggggtcatcatttgtgggggtcatcttttcttccctggattattatagtaaattcctaactgttctcatatttccaatcatgcttttaggccagattccaaagtccttaatg

SEQ ID NO: 55614 - DNA, 1046 bp, Homo sapiens
aatcggctactttggcctgtctcctccctgcagcgcgcgctttgagtgcccggctcggcctccgctcccgcgcggttgggagtgtccagcgccctccgcgatttgggctccagcgggcagggtgacttcctttttctgcccactctggtaacttattgctctgctgggctctttcccttagggtctctggccctgttcttgccccagcatgacttttatcgggacgccgttgtggaagcctcacgcaggagccctgcccccgtggagaagatcccactggtgactccaaccctaccaccatgaatggggtcctgatcccccatacgcccatcgcagtggacttctggagcctgcgccgggctggcaccgcacgtctcttcttcttgtctcacatgcactcggaccacaccgtgggcctgtctagcacctgggcccggcccctctactgctccccaattacagcccacctcttgcatcgtcacctacaggtatggggctggagtcggtctccgagagctggtccaggcatctgggttgggacttcaacctgtcattcttggagtcatagaatgggggccacgaaaactgatttggaagttgtttgaacccaaaaatgcatctttaacccagaataggaacgtgttttcgaagtgaccaacttgagatagttagccataagttgaggagatattttaatccagccaaggaaactattcctacctttataagtaagctaggccgatgtttcccaaacttgccttttttttttttttttttttttttttttgagacggagtctcgctctgttgcccaggctggagtgcagtggcgcaatctcggctcactgcagcctccgcctcccgggttcaagcgattctcctgtctcggcctcctgagtagctgagattacaggcgcacgccaccacgcccagctaattttttgtattttttgtggagacggggtttcaccatgttggccaggctgttctctaactcctgaccttaagtgatccgcccgcctcagcctccccaagtgctgggattac

SEQ ID NO: 55615 - DNA, 1002 bp, Homo sapiens
tcagcctcccaagtagctgggatgacaggcgcctgccaccacgcccagctaattttcgtatttactattagtagagacggggtttcaccatgttggccaggctggtctcgaactcctgacctcaggtgatccacctggctcggccccccaaagtgctgggattacaggtgtgagccactgcgcctggccgatttcccactctttaagggtccgaaccttgtgaagagtaattgaaaaataggagtaggatggagacattacaacaaagaaaccatgcagctatactgcctagttcagtgccaggctacataatagttttttcacagactagtaagcaaacgcctgtctattgttggaggtaggagaggcttgtcttctattcttttgtctctgaccttctgcccccatgtacatattcctccaggtgattttcgatacacaccatccatgctaaaggagccagccctgacactggggaaacagatccatactttatacctagacaacaccaattgcaatccagccctggttcttccttcccgacaagaagctgcccaccagattgtccagctcattcgaaaacacccacaacataacataaagattggtgagttgtttcctttcagtttcctgtcacctgtagatagtgaactagattctttaaggattctcacatctttcagatctttgtgcagttctcactttctcctacactgaccaccttatttaaaattgcaacctggctaggtgtggtggttcatgcctataatcccagcactttgggaggccaagatgggagggtcatttgagcccaggcgtttgagaccagcttgggcaacatggcaagaccctgtctctacaaaaaatttaaaaatcagttgggcacgatggtgcgtgcctgtggtcccagctacacaggggactgagacaggaggattgcctgggtccagtaggaggtcaaggttgcagtgagccatgtaagtgccattgcactccagcctg

SEQ ID NO: 55616 - DNA, 1008 bp, Homo sapiens
gatttagcctaacgttccctaactccatcacctgttagatacaatactgtatactttttttgtttttttttaagagacagggtctcactctgttgcccaggctggagggtagtggcatgatcacagctcactgcagcctggacctcccggactcaagtgatcctcccgcgtcagcttcctgtgtaccaggaactataggcgtgcaccaacatgcttatttgtttatttttgtagagacagggtcttgccaggttgcccaggttggtcttgaactcctgggctcaagcaatcctcctgcctcagcctcctaaaattgtaggcttacaggtgtgagccacagtgcccggcctgtacacatatctttaacgttgctcttaattgtggtttttctgggtctccttgtagatagtacttcttgaggactgacagttttctttattagttttcatggtgcctgaaacttgctagatgctctcttttgttgaactaaatgaatgagtggattctgtgtcattccctttcatatgtcttagctcaaatgccacctcttccttgatattctccctggatttctccatgaattgtatctatttttgttaaacattttgttgatttattaggattttccaatagcttaattttcttccttctcttactttccccaatacattgaacattatttaggactctacagcctgggaaaggaatcactgctggagcagctggccctggagtttcagacctgggtggtattgagtcctcggcgcctggagttggtacagctactgggcctggcagatgtgttcacagtggaggagaaggctggccgcatccatgcagtagaccatatggagatctgccattccaacatgctgcgttggaaccagacccaccctacgattgctatccttcccacaagccgaaaaatccacagctcccaccctgatatccacgtcatcccttactctgaccattcctcttactccgagcttcgtgcctttgtcgcag

SEQ ID NO: 55617 - DNA, 1044 bp, Homo sapiens
cctcctcacggcagccccagctcgcggctgagaaccagacacaccggcggtgagtggggacgggcaggaggggtcctcggcggggagcgacttcccctcagctccctgaggcggggccgggccggccgccggctctcctggagcgcccagcctgccgggggcgccttcctcaaagggcccctgcctgggaccgggcgccgcgtcttgcggcccggccgctcactgccgctgaggggattgccttcccaggaaggtggggaggctccgggctggttttcggggcaactccccctgcctcctgccacttctcgcctgggcgtgttgtccttaagtgacaggggaccgccttgcgtctcctcactcggccggttttttccccggctgtcgtggcaggttcccagtgtgtggcttgtgcgtgtgtacttcacagctccgcttatcaccatggttttgggttatttgtgctgtttgggaccaggaagccgtgcctggagaggacgacagtggggtgggtgtggaagcttttctgtcgtctccgctgatgttctgtagtcgttaggcttgtaattcgtaatgacggtggagactacgtgagaccagcccacctaatgtatatctgtacaagggagatctagaggtctggcccaaagggaaacttttgctgccaccactttcaaagctttcgttaaaaaaacaaaagggagggggaaggtggagaaacaaccaaaattctggtaaggcccacactgttcacaggtctgtggggaagagtcccctttttgtgcttagcaaccaagacgtggagttccgtctccaggagcgttggtctaacctccagtttgttgtggtgacgagctgtgagcaatggcctgtgtttatgctgggcgagctttctttcctacttggggaggggggttcaggatgggaggatgcgggtagggaagagggggggaaaacccccaagctccagtaagtcttttctttacttaatcactgattctgttgtaggtagactcatttagaggcagtcctagatgctctttc

SEQ ID NO: 55618 - DNA, 1057 bp, Homo sapiens
aaataaaggggggaagttgagagtacaatttggaggaaaccagttaagctgtttaagtatgggattgtgcagtaggggtggagaaaacttaggagagtagagagagatttaggtgttctgttgggaagaattttcttcccaaacttgtctcactttgtttttacagaagatgtactcttatcatctgtaaaaaatatgtatcagagtatgtgatagacaatatgtatacctgtgttcatgtcatctgaggataagtgctggagcaagaaatcaatatatagtacagtttttaggtcatttggctaaccagctgttaaattgtatgaaagaggcaaagataacattgagcaaaagcaacaggaatttattactggtgtgtcaggaaaaaggttactgaggggtaaggacaaatcaatggaaaatgattacctgggttgtcttatccaactgttccattcagggttataatatttggatccttttaataagattatttgcctatagtgcttatagtgtggagcacccagtaaataatgttaaatggatgtgaccatgccagggagtgggaaagttgttaatctgtttttgaaagccttggattctagctattatcttttagcaataagtacaagtaccaatgatcttttgcccatcattgctactttggtattaatgaactgggcaaatttgtcattatattgagatggttaagtccttggaaagtcagatttgaaatgtaaagacttcatttattgctggagtcaagaggcgcagcattttcaggaagtcaaaaataactttttatgccaggtacggtggctcatgcctgtaatctcaatatcgtgggaggccaaggcaggaggaggattgctttagagcaggagtttgacaccagcctgggtgacatagtaagacctcatctctgaaaaaaaaaaaaaaaaaaaaaaaaaattagccaactgtggcatgtgcctgtagaaattagccaagcgtcctggtgtgtgcctgtagtcctagctacttggatggctgaagcagaggattgcttgagcccagg

SEQ ID NO: 55619 - DNA, 1215 bp, Homo sapiens
tacacatatattttaataggtgcattttgtaaaggaggtacttggtttcagatttttcttttattatatttggtatttcagtgaagtaggtagaacaagatgatttgtaaattcagcctcacagttaaattgtactgaccttagcttttaatttgtacttttttttctcttcaaagtttatataaattatggaaactcttaaagtaaatctcaactgagttttagaaattgaaggcagaggatttgttctttccagctgactagtccagtgcaggtggtttctagttgtattcaggcacaaagaaatgtacttactgccttttgatgttctgtaacatcctttgtcatgtttccttcctttcttgttgtgtttattcttttatgattagtaatgttatactgtatggattggagtagagacttcccccatgactcaaggaccacacagataaaaaggagggaagacattaaaaaaaaaaaatcaaggatcgagcatttgaaaatactacagttgaatgtgagtggtagggagttgtatttaatagatatgagattggtaggcaggggtcaaataattcatccaacagataattgagtatgtatatattgtcagtctgtataaggctttggtgatagaagagcaagacagagatggtacatgtgccggagcttatactgtagctgggaatgtagcattaaataaatactttcaagttaacaggttgctgtgggaatgcatggtgggggcagggggtgatcgtagggagcgtttctgcatgtgacagaggtgtcagggcagttttcgcagcagaaagtcttcaacatatttagagggcctggaggtgagtggccttccaagaactaaagaaagaaaggcagtgtggctagagtgggggttaggggaggaatcaaagtggggagatgttggaaggcagcaagcagattttggagtgcattttaaggcaggttgagacaggttttttttttgagataggatctagctctgttgcccaggctagagtgcaatggagtaatcacaactcactgtagcctcaatgtcccagactcagatgattttcctgcttcagcctcctgagtagctgggaccacaggcatgtgccacttacacttggctttttttttttttttttcccggtagagatggagtctccccatgttgctctggctggtcttgaactcgtggactcaagtgat

SEQ ID NO: 55620 - DNA, 1048 bp, Homo sapiens
aatgaattatttggctgcttagctttctgtaatgtgtaattcatttgaataattttcagtgttaggttgctgatctttgtattttttatccttttaatttaagctgtcaattgattcattttggttttgttttttatagaaactaaggttttcaaatcttcaaagttacccttcgacaaagctttctttaaattcactgcaatatagttgttgactataattttaagtggagctaagtttgcctcttaaaaacaggagttcattctgtgtattactgagtaattactctgtatactgaagttcagtgcccagggcttgacagtgtttaggatttaacatgagtgttctgttgtgtcacagtaatacttgataatgagcctaaggcagatggaacagcagctcaggcattccttctttatcactagttttacccgcagtggtcctcttaagcttctttgatgttgctttgttgccatattagagtccattaagtcctcacccttctgtctttcaaaaaacctctgtgaaatctgtttggctggtgaagcattttgactccaaagctagtccttctcttacccacctttttagtttaccttgctttgtctttctgataatatgccagtattatcagctcacataaatttgccaacttgctgtgtccattggccctgggcatggctaaatgattcaggcagtggaaataatatactttactctctggctcactgtaaatgtgcacagactccaagcaaagctcctgtctttcgggcttgagttttagagacaaaggtttgccatgcttacaggctgaatgtttttccctactgaacaaactagccagcctttatttcaagctgaatcactttgttacttacggaaggaaaaggtctagagaaggaaaacgtatcttccatttatcctagacaaacaaataatctaatttcctctggcagtcaaaatatagtttcacctaagccactgatgcaggaagttaggttttatgtaacctctctaattggtaagtaagtaggtttgatgtctctga

SEQ ID NO: 55621 - DNA, 1189 bp, Homo sapiens
ttataagatacattatttttgtaccacttaaaaaaggaaaagcgctgccattaaactaaaatataccatcatttgtaagaatcttcttaatttcagaggtgctaacatgtaaaaagatgtgtatcttagaattgatgacatcataataatactttgataggattgttgtaaggattaagtgactcaacatttataaagaacttagaacagtgcatggcacatagtaggcaatatttatgtgtcatttattattattgctattagtgttacctattattttctttttgaacccacttattgcctaattagtcatagtttgacaattgcccttgtattccaccatgtcaaatataaatttacatagatgagtatgtacttttacttattgagaaacagtgtaatatataatatactcaattctggagccagattgcagggattcaaatcctagctctgccacttatttgactgtgactctaggccaataacttaatctttctttttctcagtttcttcttctgtaatggggataataattctattttagatgtgttcgtatatataaacgtctgagttatggattaccttagtcatctctttaaagttccctagcattttatttctcacttggactgttaatgaatatttctaaaaagcacactaagagttcaaagttttaaaataatggtaacataatactgttattatatctaacacctactagtatttaccatgtgccatgcactggtctaaaagctttcatatatttatttaagcttcacaacaactctatgtggtgggaactcttactgtctccattttatagatgaggaacctgaggcacagagagatcaagtaatatacctgcagctattaaatgatggaactaggattcagaccctgacaggctggctctagagagtgtgctgtcaacaccatgtctcttcagaaggcatttctttttcttttttttttttccagaaggcatttctgtcatgaagggttatttattgaccagggctttttttttttttttttggactgtcttgggtctcctaggctggagtgtagtggtgtgatcttggcttactgcaacctctacctcctgggttcaagcgattcttttgtctcaacctcctgagtagctgggattacaggcgcccaccaccacacctgactcatttttgta

SEQ ID NO: 55622 - DNA, 1046 bp, Homo sapiens
ataaaaaaaatctattatcccttatctgtgattgcaaaattcagaaagctctcataaatgaaaatttttctttaagtttggtataaattcatttaattggcaagacctgacttgaaccattgttaagctatttgaagtctttatttagccaacttagtatgactgttccatgttttgttgcagaaatattaatgtgtttgattatagtgcactgccctgaactccactgggattattatataatgtgtactttgtgttctgcattacctttctgaaattcaaaatattctgaattccaaaacacatctggccctgagcttcagatgatggattgtataccaaagattttttttccatttcattgaataaatgttcctttagctaatactaaaacaggacttagtcatgtagttaattttcccaaataatgtttttttttttttaatctgatattttttgtttttgctagagctcctgaaattattcttgggttaccattttgtgaagctattgatatgtggtcactgggctgtgtgatagctgagctgttcctgggatggcctctttatcctggtgcttcagaatatgatcaggtaaaagtgtttatttgaatggaaatagaatgcaaatagttacttgtgaattagattctggagaaagagaagtactaagtactactgaagtatttagataatagggaaagagtagtccaattgctactaaagaactttttaaagaatagtataattttctcttcctgcttcttaggctaaagtatgtttgcaattctataataaaaaaaagaattttattttatattaaggttgatactttgctagatctgtaatgatttattagagacttaactttcattaacttatgtgctttgtgagttaggaaagtagagtaaagatgaggaactggaattttaaaagagaacttctacttactcggagctattataatttacttttacgcatgacacactgaagtactttcttcagactgaaacacttcaggtcccagaagctgtgacatactgggtc

SEQ ID NO: 55623 - DNA, 1332 bp, Homo sapiens
ttttttttagtagagacggggttttgccatgttggccaggctgggtctcaaactcctgacctcaggtgatccacctgccttggcttcccaaaatgctgggattacaggcatgagccaccgcgcccagcccccaaatttttaatgacaagaaattgtttagctttcttctaccactcaatttagatgaagattttaattaaacagcataaaaagagcttcctcctctgaaaatgattagattttcataaaaagaatttccccaggtttctcttttgattacatatatacacacacacatagtttggagggaaagcagctatgtagtgtcagtgccaaaggttaagtgaagaagtataattctgaattttctttggaaggtgaatatgtctacagacctggagggaacagacatgttggcagagaaggcagaccgaagagaatacattgatctgttaaagaaaatgctcacaattgatgcagataagagaattacccctctaaaaactcttaaccatcagtttgtgacaatgactcaccttttggattttccacatagcaatcagtgagtatggaatattctggggcttttgccatgtggttctttgttgagttaccgccttatcaatggcactatcaaatgagcccgccactttggtgcttataaatctggctcagcagtgcttttctttctcattgaaacatcataagataaaaattagatgtgtatttttcttccctatgattatacaaattcttgatttattttatctgaaagtgattgggaaaaaaagctttgatccatgttcatcttgagttatttgctgtctgtttaaatctcagcattcatttaatgaatctttaatctccttttcagtgttaagtcttgttttcagaacatggagatctgcaagcggagggttcacatgtatgatacagtgagtcagatcaagagtcccttcactacacatgttgccccaaatacaagcacaaatctaaccatgagcttcagcaatcagctcaatacagtgcacaatcaggtattcaataaataattttggaaactcaagcttaagtgggatagaaactagtaagaatacagggcaaggtaaagaaccaatttttgttttggtggtcttgttgcttcttagaaattctccacttgacaaaagttgatggaaaacagggtagactgataatacttaccaggcacaggctaactaaagttaaatataaaggcctaatccatgccctcatatgttcagcatcgtcaaataaatggggtctgactattatgctacttactgctgttagttttactgactttagccaaat

SEQ ID NO: 55624 - DNA, 1111 bp, Homo sapiens
acttttgagttcctttaacaaaacaaaatgtaaactaatgaagttagaggggaaaagtgggataaccctttttagtataattaggtaagctttgaaatttttcctatctaggaagtataaataacctgaggagttattagagcatacttaaaattttccaaatgaaaaaggagttttaaaattaaggtgatgatgatgatgcctgatatgtattactatatgccagataatgttccaagtgcttttacatgtattaatttatcttcactaacaattctaggaggtagggtaatgtcattatccccaatttatagatgagaattttgagcatggttccttcatatgcccaaagtcctataactaattattgcagaaccatgatttgaacccaggcaggggaattcatagcttctgtattttgaggtattatccttattgcccttcagttgccagccatcactagttgctcatttctgtgcaacaatggtcttattccaggttgcccacttttcttggactatctgttcttttacaagatgactatacttacaggaggatagatcctcatcagttaggcaatttattctttccatacttacctgattctttatttaaaggactatgttcaataaaacaaaataataacaaaaaatgaaactataatccctcttaggtcaggaaccggggagaaccttccaacagtgttgccttttgttaattctttttttccacttttgggctcagcctaaagtacaatagcaatctaatacattagagtcacatttgtaggtcagtactataaatactactttccatactgtcctggttggccaaaatagataacacattttgcttagtggtaactattattctgtaattttgtcacctttcgctttatcaccctgggggctatagatgagcttctgaagtgaacatttcctcctaaattttaccaatttgtaggaggctattattatacaataccaatgtcttgtagttaggcatgtatccatgtcctactataggcaaaaattttgtgtggcttagccttcttattggataacattgcctacggaagcatggctggcaactttttaatcttgatatatga

SEQ ID NO: 55625 - DNA, 1912 bp, Homo sapiens
atcaaacatctttccattaacctaacctgaggggaagtctcccttttcttaacttccaagacttctatgaatgaaacttctttgtcttaagtgtctaggattaaaacctgaacagtggattatttgaacagagaagctgaaaacaaaataatcttaaaacagtactcccagaccttgcaaaactatttaactgtgatgctgttttcaatagctggactacaagcaacaacaaagcattctggattccctgtgaggatggataatgctgtaccgattgtaccccaggcaccagctgctcagccactacagattcagtcaggagttctcacgcaggtaaaagctagagcaatgtggatactcagtattgctaaacactattgagattcagatattttgtcctagaaaatggtatttcctttgactataagatctttcttggtcatgattcagtggacttaaaatgaaacatctctatggaacaatatactaattcctaacactattgcaactctgccattgtcttccttagacttgcagggaaaaaatatccagacattcttgagaaatggtcttctgagtaagtttactctaattttgcggggtgaagcgtttttttttgttgttgtttgttttttaaatgttggagctcatataaagataagtatatatgtagcattttgattctaaaatataagcttccacttttgcaccctttgtgtcccttttgctcactcttttagaatttcatcacagttgagaggctggatcacatcaggatgcctcttcacatattacattccttcattccgtgtgtttaaccagattgtagaaagctttaaaactttatacttgctatggaacattcgactaagatgatagagaaaattgtaaagtatttaaatagcaacaaacagtatattttatattttatatataaatgtttgtggcctatgacacataggaaattctcaaatccaaaaactctattttgtgaacaggaggaagaattcttaataaatgtctctgtttcatagaactgatcccctgaatctagcccaaggaggattcctatacttctttgttttaggccattggcatttgactttgtgggccaatgccatacaaagttgaagggggaaagttgtgtttggtatatgcattttagatgctatcaaattactgttcattgtcagtaataacttggggggaatgagaacccttctgaatccagatatcctgcctccgtgtttgtttcactcacctgcctaatctacgtttcagggaagctgtacaccactaatggtagcaactctccaccctcaagtagccaccatcacaccgcagtatgcggtgccctttactctgagctgcgcagccggccggccggcgctggttgaacagactgccgctgtactggtaattcccctcacttgattgtgttactaacggagtttctttggtttctttcttttttgttttttcctgtttgtttttgttctgtttttttctggtttatttttcaaaaaaattttttagcttagtctttgcagagggcatggaagcatgtgccatcttgtggctgtgttcttgctacatcttttaatgtctcattgttttcctccccaacatttgctgtagcactgtctgactgatggttatgtggctctgtaaggagccagatcccttgattcttctttgccagcctagtgtgataaaagctctcgatgtagcctcagaagagcttcaacactgttacttgttttctgccttttaccctctgatccttgagaatgaaggaaatggcctttaatttggctcagctacaggtacccggatggccaaaattgagctcgttggcaagatagctttctcctttttttgctgttttaaggttctaaaacttttctgcatg

SEQ ID NO: 55626 - DNA, 1011 bp, Homo sapiens
gttttcattttaaaagtctttgtcacttccagattaattttcttgtaagcagaaaacctgagtgtgagggagtcagatatatttccaacttgattgatccaagccaatggttttaactcactcatctgtagtttcgaggttggaatgttagttgacacttctcctttgctgcttctcttaagtttgcactagccatttgctaagctttgcatatttttgttcttcctctgtcaaaacagttcgtcgcttggaacgccagatttctgcctcacattggaatgttatttcttgctttgtattaaactacatgctttgtcttgtgcaggtgttggcttatggaaagacgcatggtgtgacttaacatacttcttttattttttgttttgttttattttgttttaaattctgcttatggtagcagacgtgtttgcagtttctctgctttgaaggcttcttgtttggaaccagtatttgtaacaagtagatctgttacttgcagaaatatttttaaaacagtgtgttgatggccttgcaatttgaaattcaagaaacagaaccatatgtacccaagcattgtaggtaattgtactgcagaattcaagtttaaaaaggaaacttccaaatccgttcccattttttttttcaaaaaatgccagaatttctgtgaggaagaagtacagaaaacatttgttgctcagtttattgcaagtgacatggcttttttaaaactagaaatcatgtattttcttgtagtgattagtttttatgtggaaatattcctgcaaatgatacataaaaacatattttaggtaactattagaaacaaagtatgatgctttctgcttctaaaacatcttactttttgccttattttgaaattccattatgtggctataaatgatgaagttagctttttcttgctggcataagattttttccccaaaaggattaggcctttggtcatccacatctggctccattttccaaatactacccttttaaaaaagggaa

SEQ ID NO: 55627 - DNA, 1049 bp, Homo sapiens
caacagtgtacaattgttcccttttttccatatccttggcagtgtttattattgcttgtcttttggatataagccattttaactggggtgagataatatctcattgcagttttgatctgcatttctctaatgatcagagatgttgagcaccttttcatatgcctgtttgtcatttgtaagtcatcttttggaaaatgtctattcaattcttttgcccattttttgatcgtattattagatttttttccatagagttgtttgagctgcttacgtattctggttattaatcccttatcagatggtaggtgctcaactttaaaaaaataaaatgcagctgcattttggctaattgcttttgatgtctgtttggtcctgattcttcagtggttttggaattcactcttctctttctttctgttggtacaggaatgcccactctcatggcaaccagtacagcactatcatgcagcagccatccttgctgactaaccatgtgacattggccactgctcagcctctgaatgttggtgttgcccatgttgtcagacaacaacaatccagttccctcccttcgaagaagaataagcagtcagctccagtctcttccaagtgagtctgtgttacagctgatagttaaaactgtgccagtttgagagatatgttgccttgcatttggaatattgtatagacatataatatagatatgaagcagcaagtagctgccaaattgaggaagagcaaatcatttcatctgggcatgtacaccaggtgtgtcctggttttatgatggtcctttgtctctgctgccactttgaatctagggcattttatgatgtttttattttactttacagagtgaaatttaatcctgggataaagggcttataaaagtaaaatgtcttttgtattttggtgttcttgtccctggaaactcttgccagcatggtgcttattttcactggaacttatatagttaaatgtatttgcttaatgattatgtaaaaaggaatcaatgagtaaattggaaagcagtctggggaaaagataca

SEQ ID NO: 55628 - DNA, 4479 bp, Homo sapiens
tctactcataactattaagcctggtgcttttttaggtctcctgagcaataagactaagccagtcgcttcagtgagtgggcagtcatctggatgctgtatcacccccacagggtatcgagctcaacgcggggggaccagtgcagcacaaccactcaatcttagccaggtaagtgctatgggctactgccttctgtttgggccctgcactgttgttactttctggagaaccctgcttctggctggatgctgaataaagccaaatgaagccccttttgtgtcaaacaattttgtgttctatggcttacgtcgtaccgcatatgctgtgtctcttcattcactctgtaagtgtgttcaggatgtacattctaggttttccatcagacctccctaagtctaccctggaaggttagagaaacgtctgggatttagaaagagcctggggtgctttaaccatgtctgtgataggcatatgctttgagaccagattctctttatcccccaggccataagtaagctgatccttacattgtttacttgagtcaagagattgtgaaaagctcattggccaccaaattcaactggttctaggtcctacttgttgctggagtctgcgatttgggacttccccactctccgaacacccccagccccaacctacccttctgcttctctcattactttattctatttgtgttcactcttagaagctaaaattcgagtgcttgtatgatgtccaccagtagtgagaaagtgtcagtatgagggtatgtgagagagagcacatgcaagtgaaaatgtaagtttgagttagtgcatgtattttagtttccacatttcaagaggggtatgaagaacttagaggacgaaaacaaaagaaagcaatggtaagaaataaaggctaggaaaaattcaaatttactgacgccagaatagggtgagttgagtcaccagttattaacttgcaggagtggggaaccctatgatctcttgattctccctcttcctgtcatacttacaagcaaaatgctgttacctgagccagattaggatctatcttgctaagaggcagaaggaggggtggctgatttctgacagcattcaatgccagtgtgggagattatgtgctatacccattcgaaaacagtacaagtcagaacctgagctcttaacttggcctttggtgccctgagctggagtgacctcaggattcctcacttcttccttctttcttccagaaccagcagtcatcggcggctccaacctcacaggagagaagcagcaacccagccccccgcaggcagcaggcgtttgtggcccctctctcccaagccccctacaccttccagcatggcagcccgctacactcgacagggcacccacaccttgccccggcccctgctcacctgccaagccaggctcatctgtatacgtatgctgccccgacttctgctgctgcactgggctcaaccagctccattgctcatcttttctccccacagggttcctcaaggcatgctgcagcctataccactcaccctagcactttggtgcaccaggtccctgtcagtgttgggcccagcctcctcacttctgccagcgtggcccctgctcagtaccaacaccagtttgccacccaatcctacattgggtcttcccgaggctcaacaatttacactggatacccgctgagtcctaccaagatcagccagtattcctacttatagttggtgagcatgagggaggaggaatcatggctaccttctcctggccctgcgttcttaatattgggctatggagagatcctcctttaccctcttgaaatttcttagccagcaacttgttctgcaggggcccactgaagcagaaggtttttctctgggggaacctgtctcagtgttgactgcattgttgtagtcttcccaaagtttgccctatttttaaattcattatttttgtgacagtaattttggtacttggaagagttcagatgcccatcttctgcagttaccaaggaagagagattgttctgaagttaccctctgaaaaatattttgtctctctgacttgatttctataaatgcttttaaaaacaagtgaagcccctctttatttcattttgtgttattgtgattgctggtcaggaaaaatgctgatagaaggagttgaaatctgatgacaaaaaaagaaaaattactttttgtttgtttataaactcagacttgcctattttattttaaaagcggcttacacaatctcccttttgtttattggacatttaaacttacagagtttcagttttgttttaatgtcatattatacttaatgggcaattgttatttttgcaaaactggttacgtattactctgtgttactattgagattctctcaattgctcctgtgtttgttataaagtagtgtttaaaaggcagctcaccatttgctggtaacttaatgtgagagaatccatatctgcgtgaaaacaccaagtattctttttaaatgaagcaccatgaattcttttttaaattattttttaaaagtctttctctctctgattcagcttaaatttttttatcgaaaaagccattaaggtggttattattacatggtggtggtggttttattatatgcaaaatctctgtctattatgagatactggcattgatgagctttgcctaaagattagtatgaattttcagtaatacacctctgttttgctcatctctcccttctgttttatgtgatttgtttggggagaaagctaaaaaaacctgaaaccagataagaacatttcttgtgtatagcttttatacttcaaagtagcttcctttgtatgccagcagcaaattgaatgctctcttattaagacttatataataagtgcatgtaggaattgcaaaaaatattttaaaaatttattactgaatttaaaaatattttagaagttttgtaatggtggtgttttaatattttacataattaaatatgtacatattgattagaaaaatataacaagcaatttttcctgctaacccaaaatgttatttgtaatcaaatgtgtagtgattacacttgaattgtgtacttagtgtgtatgtgatcctccagtgttatcccggagatggattgatgtctccattgtatttaaaccaaaatgaactgatacttgttggaatgtatgtgaactaattgcaattatattagagcatattactgtagtgctgaatgagcaggggcattgcctgcaaggagaggagacccttggaattgttttgcacaggtgtgtctggtgaggagtttttcagtgtgtgtctcttccttccctttcttcctccttcccttattgtagtgccttatatgataatgtagtggttaatagagtttacagtgagcttgccttaggatggaccagcaagcccccgtggaccctaagttgttcaccgggatttatcagaacaggattagtagctgtattgtgtaatgcattgttctcagtttccctgccaacattgaaaaataaaaacagcagcttttctcctttaccaccacctctacccctttccattttggattctcggctgagttctcacagaagcattttccccatgtggctctctcactgtgcgttgctaccttgcttctgtgagaattcaggaagcaggtgagaggagtcaagccaatattaaatatgcattcttttaaagtatgtgcaatcacttttagaatgaatttttttttccttttcccatgtggcagtccttcctgcacatagttgacattcctagtaaaatatttgcttgttgaaaaaaacatgttaacagatgtgtttataccaaagagcctgttgtattgcttaccatgtccccatactatgaggagaagttttgtggtgccgctggtgacaaggaactcacagaaaggtttcttagctggtgaagaatatagagaaggaaccaaagcctgttgagtcattgaggcttttgaggtttcttttttaacagcttgtatagtcttggggcccttcaagctgtgaaattgtccttgtactctcagctcctgcatggatctgggtcaagtagaaggtactggggatggggacattcctgcccataaaggatttggggaaagaagattaatcctaaaatacaggtgtgttccatctgaattgaaaatgatatatttgagatataattttaggactggttctgtgtagatagagatggtgtcaaggaggtgcaggatggagatgggagatttcatggagcctggtcagccagctctgtaccaggttgaacaccgaggagctgtcaaagtatttggagtttcttcattgtaaggagtaagggcttccaagatggggcaggtagtccgtacagcctaccaggaacatgttgtgttttctttattttttaaaatcattatattgagttgtgttttcagcactatattggtcaagatagccaagcagtttgtataatt

SEQ ID NO: 55629 - DNA, 1099 bp, Homo sapiens
caggttgagatccgtagcattttagtgtccgagaggataattgctaagggagcagagacctcttcacaccttcatgcgcttagacctgcctagaggctcagatggctcagtggcactgctcacagagaacacaggctggaggacatggagtcggggtaggggcctaggtgaatctcagctaggctctttgcacatttagcacctctgcacatctggtttccttttctgcaggagtggaaggggatattgaagcctggctgagtttgctctttttttcccattcctgactcccgagttgggcctctccctgcctgggagttgtaaccctgcagcctccctcctgatcccccatcccttcaggaacggctggcccagtgccaggaccagagtagtcggcatgctgctgagctgcgggacttcaagaacaagatgctgccactgctggaggtggcagagaaggagcgggaggcactcagaactgaggccgacaccatctccgggagagtggatcgtctggagcgggaggtagactatctggagacccagaacccagctctgccctgtgtagagtttgatgagaaggtgactggaggccctgggaccaaaggcaagggaagaaggaatgagaagtacgatatggtgacaggtaaataatctgaaagcaggcccctaactcttctcagaaccgatattcttccttccttgcttcttactctttttttcgctttgtcccagtccattgtggctctgtcttctggaatctgttttagggaaacctctgtaatgccaggtctattaaggagaggttctggggatccaggccgctgtggtacccgctctttctcaattctccctaagattggaggcaaccactgggcaaatgctcactattctccagatcacccaccctgggggagttcctgctggaggcatctaattcttgcctctatttccttttcctgtgcttttctcatcagactgtggctacacaatctctcaagtgagatcaatgaagattctgaagcgatttggtggcccagctggtctatggaccaaggatccactggggcaaacagagaagatctacgtgttagatggg

SEQ ID NO: 55630 - DNA, 1216 bp, Homo sapiens
taagttaatttggatatatttgtcatatcaaactacaaagtgtacaaagttaagtttagcccttttctagaaagtgatctttaaaattaaaaatgctcctcttttaaattcaccaaatttatgtgtgggaaggcaccaaaatgattttgtaagtgccactgcaatattccctttcaagtgtggcctaaatttcaatcttaaggatggaatgcatgtctgctccttgttctgaaaaatgtaggcatctactacattttaaaacacagtgaaacatatacataagcctataaaaaaagatttgtgcaatttgaaagcctgttaattttttatgtagacatacctacacacgaaagggttaaattcacagccttactagttccttgcttccagtatttcaattggtctcctcccctcattattattattactactagtactattatttttgcacatagttaactgcccttcaatatgattcttaaaaagtgctgtttctgtggtatcgtattctctaaataatcatatttaattttttaaaacaaggttgcagtttctaattgtttcgttcctgtgtttttgctggtgtgtaataaaagcaagttttttcttttcatggttatttaatacattagctgcctgtaaataattcttgttataatgctctggaatgtgttgtagaagttgtattagattagttttaaacccttgtttgaaagccacattgttttggttatttctattaaattagaaaattgaaaaagttttcaaatgaatttctttttttcttcttctgtgagttgaaacttaatcatagttttaaatcattttaaaaatttacactgtgtgccaggcaccaaagatacagtagtgaacaagaagatatagtcgttgccttcacagactttagactctgtgttagagtaatcaatgttatgatagggattaacagaatataattgtaatgcgtaggaaaggatctaacccaaactttgttgccaggaaagcaatttctttcactcataaaaggacagtggacaaggaaaagagagagtgaaaagagaatacaacatgtagaagactgagtgagagagaacatgtatgtattccaggaactgaaaagttaattaactgaaagttaatctgaaacagtgtaagttggagtggtaaaatactacactcaaaaattgagcagagtcctcttcaagcagagagtctt

SEQ ID NO: 55631 - DNA, 1023 bp, Homo sapiens
cttttaaaaaaattgtagataatgagtcataaatagattctgccaactgaggggagaaacattttaagtaaatatttttcagtatttggggccttaaaaaataattgtgtttccttaaaattacatgttagatagagtttttaggtttttttggttttaagattggttaaagcaatttaaaagccacttttttgtcaacatttaatagcctccacttctgttaagataatgtatactgctgaggaattactattaatagctatcaacataccaccattaaattaaggtattcactttagattttttattaaagcttttttcttgcacactgatcgttgtgtttctaagctgattttttcagctctaatatacctatggttaaaaagtataaaaacttaaattgatatttagatatatgttttcctattagtttatgttttaaaaagacaaaattgtatctgtcagtccctgaaggcagtttgtttttatactctctcacatttgtatttgttttttaaatggcagtattttagaagatttggagaaaagtccacataataatgttttcttaaaagcttttaaagtttttgctgtacttcaatttacttcttccatcagaaaactaagaacaaagtgttgctcagtctgttccgctgacctaaatttgtgttttcagcacttggctcagccaattcactgagtgaaggaattgctttatgaggcaaagcatgtgaaagttctaaagtatggttagattgtaggtcgtgctctatatggaaacatcaaaccattactacagagaaatgataaggcattggatccactattgaaattattatttttggatcaacaagttggtactttctgacttctgtatcttaacataagggaattttaggtaatgctaagtcagttgtctcattttttgtgataagttttggaatttttagttaattgaaataaataatgcttttaaatagaagtaaaaggtttataagtgtgcaaattgtagatttatcaatt

SEQ ID NO: 55632 - DNA, 3052 bp, Homo sapiens
agtatggcacagagtatattagtaaaatctcactagtttgaagttatatttagtcccaaattctgtcttatttttcagtgcagttaaattattttcaaataaatatgctttcatgaactatagttgataagaagacccatgtttcctgcctcagtaataaatagtttatgattaacatattgctatacagatagaatttttattaagtggtttgttgaaagtttgtcagttttttaaagcaacgtttcttgtataatatgcttcacaaatatttttctcttggatagattgatgtgttcagaccaattcctattcagattgaccttgataattcaaaataagacaattactgaggtttcacagtagctttagtaacagggctttgtaaagaaaatggttccatgttctgtagaattttagaaaagcactttatctggttatagcaatttgttctccctagtatggctgacttttcgtcgccaatcctatgcagtctcataactttagaaaggattataatttcccttttttttttttgactctggtatcctttttagatgatgaaagttgttcaagtttatgcagacacacaagagattaatttgaaggtaagcttttcagaccatgcaaacttggtgaaggaatatgcattaccaataggtgaatattcctatcttttgcttgcaggctgattcagaagtagctcaggcagggaaagcagttgcattgtactttgaagataaactcacagagatctactcagacaggaccttcgcacctttgccagagtttgagcaggaagaggatgatggtgaggtaactgaggactctgatgaagactttatacagccccgcagaaaacgcctaaagtcagatgagagaccagtacatataaagtaaaatgacatggatttaaatcaattgtttaaaaaaaaaaaaacgaaaaaaaaaaaaaaaacacaaaaaacccagaaaacttttaagtgttgctggaatatcctgcctacagtgggcacctccttgaagaagctgatagcttttacacagtattagattgaaataatggacagaaacacattcttgtcaagaaagggggagagaagtctgtttgcaagtttcaaagcaaaaagcaaaagtgaaatgatttgaggatttctgttctaatggagatgattctctgattgttagaaatggcaaatattgatgattgtgtgctattgattggtgcaggatacttggtatacgagtaaatacttgagactcgtgtcacttgataaattttctttttggactaggtcgcacagttattaaaacaacttttaaccctcccccttcacacacatacatatcaggttgttttctagttaaaaacccaagtagctcagattctactttaatgtcagtgcagatttgcattgaatcatgccattatgttttttctcatttttatgctgttgggtcttagtttttaaattgatataaagaactcagcaatggttttattttctactcatacttagggtttaggaaacactaccactagttatcatttaatcaacttcaatggtctactgaaacaaaaatggtaacttttcattagtggattatttagagttatagtagttgtttccagaaaacacttcctcacaattgtacttcccaatcaaatcatgtgatcatacagttattcccatgaaaggcagaatgtttgtttcaaaattaatctagttttctgtacatttaaatttgagaaggtgacaactggctcttttccagtcttccttcatgtcagttttctgatagaccactattggcaaacagtatctgtcaactaccaaatgtgtaaaattttctgtatttcactttgtcttatttgtaaatagtgaactaaaacttttggcagatcagcaacatttgctgagcctgttttttaagctaatgtgtattcttactaatgttcctatcaagaatggatttgtaatatatgctgtctatttctaatgttcacattcatattttgaggttctatcttattttaatagagaacagacttctcaaaaaatcttcagaagcagcttattattgaaatatcgaaatattgaaataaacccggtggggttagattactcatctgtccaccaagtgggacatttgcatggactgggggcttaaaggacttagaagagacctgtaagtaaatcctgaaaatgagccaatccccacttgaatggttactggagtaaacccacctttaccaccccaattacagcacccgaggccgataaaccaacttggctctggttcatttttcttttcttcatttgtgatgctcagattcaaaatgtgtgttctacactgttacaggcttctcttttgtttgattaaagattttagtcctacttttgtatggacacattagaatattcagagaccaaaatagaagaatttgctgttagatatttttcagaagtcagcagatttgtggcaaatcatttatttgcctttttaaaaattcatttaagcagttcagagagtagactactcagaaaattatttcacgtaattgtctaagaggtcaatattttttaatgcatattgaatcaaataaagtgctctaaagaaattattatacaaattcctttgggttgtttttcttttcttaacaaggggtgggggtaaacaggaatatgattcaggctttctggttgtgtatttaaagagtattgattttattattactattgatttactttattcctggcttccttttcacttttctttcaatttttaaaaaataatttaagccgttgaaaatataccaaactgttgaaacattttactcaaattttaaattcctaaaaatgttttttaataagagggagaaaattatttaaaaatacttatgcctatgccaatttccctcttttttcacaaaatccatgatttcagtttgtaagtagacatatatctaagggcacatttttggaaagtgaggaatagcagcagtataacttcattttgtcaggcctttgagttctaatattttgtattg

SEQ ID NO: 55633 - DNA, 1826 bp, Homo sapiens
aatgttttctttttatggactattaaagtagcttcttggccgggcatggtggctcatgcctgtaatcccatcattttgggaggcctggcaggcagatcacttgagttcaggagttcaagaccagcctggccaacatggtgaaaccccctctctactgaaaatataaaaattagccgggcgtggtagtgcatgcctgtaatcccaactgctagggaggctgaggcaggataattgccaggggatggaggtggcaatgagccacagttggcgccactgcaccactgcactccagcctgggcgacagagcaagactccatctcaaaaatcaattagtcaatcagtcaataaaatagcttctctaactttacttttatcccaagggtagaaatttttcgccagagttggggtcagaattccctagcgtgaacactaaatggttaataaagttagtaaatttttcttatgttcttagtcttacttcctctgttactaagtcaagacttcgtgatgtaaatgatattccctgttatgttttccaaaagacatcatattctaattgtaacattaatatattttgtaaatttttttctttaaaaaaaaaagaaaaactcctaaggagtcataaaattctggtaagtcaaatgttgcctcaaggctactggttggttacccttgctaattgctttctttccaaatcttattattaaaagtaggactttggggacttggactaaccatgaagattggcacatatgccacataagatttggttttcatgaagatgtaaagtacatacgtctatactcaaaatttgcaagcagctggctctataataatttttttccctaaaattaatatgctatgcattttcaaattaaacagtttggcatttttggagaattcttatttgccattatgtgcttattttagataccaaactactataaaattataaagaaaccaatggatttatccaccgtgaaaaagaagcttcagaaaaaacattcccaacactaccaaatcccggatgactttgtggccgatgtccgtttgatcttcaagaactgtgaaaggtttaatgaagtatgttaacttccaacctatagagtcttgatttgttagtttttgtttgtttccttgttttatttttctgctgactttaattttattaaaatttttttttctgctaaagtcctgtcaaaagtaacatctgattgtattaacagctccagtgaagaaaatttattgtgtataatttggagtatatacttaaatataataaattaagaatattatcaaatatccttttctaaatgagttgaggattggcataagtatggaaagtactgtcagtagttacgtatattttgtggaatatgattataaacagcttacgttttgggtactattaggaaagttatctgtacccatgtccttgcattttattattgacaacatgaatgtagaaccttaaaataacaaactaatctctggtgacccatcttgaatagtagcccagagtatataatactaagttttcttatttcagcagtgtgactttgattaattttggttatgttttttggtttggggagttttttgttttttgttttgttttgttttgtttttttttttttttttgagggtaagtttgagttagccatgccttgagaagaaatgtattatatacctgtttcagggaaattgtttttattagggataaaatcgattctattattgttatggaagagtttcattgtaggagaagaaaatggaatttaatgagaatccacaaaatcttttaaaagattaatactaaagtctct

SEQ ID NO: 55634 - DNA, 1052 bp, Homo sapiens
tgtgtgttctaggttttgaccacgaaaaaagaactgatttacttgtggcattttaatacatgccaaaacagtacaagatacctgagaaactctgcaacctgtgctcttcttcttcataaataactgagtccacataatggtgatactgggatctgagagaattggtcttaggccttatgctgcaagtactgctcatcactactaagagacccccttttaatgcggaggtgccatttttataatgcattccagaaagtaatcaattgatgcgtgactaggaaaatttagaggagtttttaatcacatgacttcacctgacgagatttcacaactataaaacctcccttttttcaaaaaattattaagaaaataaaccaggccccagtccagggaagtagcttctctagagcaggctttcttataattacgtggactaattgcctatttccctgtctagtggggactggatatgcacattttgtagagatattggaaagccagaagttgaatatgattgtgataatttgcaacatagtaagaaggggaaaactgcgcaggggttaagccccgtggaccaaagggtaagtgtcaaataagttgatttgtcactgggattcagtagttgtctgcctatatatacacctttttttttcctgtgtagcatacacaaaacctgataacatttaatttttaatcctgtcatctgatggtatattgatgatttctgaagtctttttttcctctaaccctgaactacagacccttctatccagattcctcaaacttaacatgtcccaactaaaatcttaatttctaatcctctccctccaagcacaaaaccaagcaaataacgacataaaaaactgtattcctcccccagtattccccttaattgaatgataccaccattcatttctgttgctcaggttagaaacctattagaaatgaaataataataactataatatgattttcttaccttacatcataatttctcatctggactattgtagtgatctcttaactgctctccccgcttctgctcttgacct

SEQ ID NO: 55635 - DNA, 1050 bp, Homo sapiens
aggttggtgaacaatttcttttatgttgttgcagccttcctacaatatagtagaatgataggtgagcagaagaatattatagaatgcttctaaaatgctatgcaaaagattctgggtgtgaaaaggggtgtgccataattagctctctcaaggaaaagtataaccctatgctcacttcccaatcaatagcttaacagtttaattaatttacttattatttgagtgagacattatcagaggagcagaccccttaaaatcatatgttagcgtgcctgaataattttggggttattgtcatttctttatggcactattgtgatctataaaataaatttgttacgtcagtatatctatatgcatattcacataactgttaaatacacatatggcatacaataaagattaaatgattcttcaagaatttgtcatcgttttgttttagttgagcagtcctgagagtagcttgacaccacctctctcaaccaacctgcatctagaaagtgaattggatgcattggcaagcctggaaaaccatgtgaaaattgaacctgcagatatgaatgaaagctgcaaacagtcagggctcagcagccttgttaatggaaagtccccaattcgaagcctcatgcacaggtcggcaaggattggaggagatggcaacaataaagatgatgacccaaatgaagactggtgtgctgtctgccaaaacggaggagatctcttgtgctgcgaaaaatgtccaaaggtctttcatctaacttgtcatgttccaacactacttagctttccaaggtaccagtgaaataattgatttttggtgttgattttcataagctaaaaataaataacagaagaatgttcagggcagatggccttctaaccagtgcacagtatttctataaaacagggagcctgttattcttttggtattagcttccagagaaactaacaataaaatatctaagatctaagtagtacattaatgttaaagagtagatttcatctcctggcctttagtttatattcagtataaggaaaatagataaaact

SEQ ID NO: 55636 - DNA, 1076 bp, Homo sapiens
catgcttcagacctggaatcagccactttcccaggaagttctggtagtgttagcaggaaagcaggaaaatagtgtttgaggataatattctagtactaatagcactcattgctactgaattgttcattgtttcttaggccttttcagtggacagagctaagaaataggagtgtgtgtgtgtgcgtgtgtgtgtgtgaagaaagtgcttcaaaccataaaatgtgtttttagggtcttctgaaagttgctgcataattttaaagagttttaagctaggctttataccacattccccttaactacattatgaggtatccttatcttctgtaaagttaattgtctattgtcttcactttagtgaacattacttttcatataattgtttttatttataccatatagtcaaacgtatgtgatctttatttgttgtttcttattagctgtgggtcatcaggaagaactgctgagaagacaagtcttagtttcaaatctgatcaggtgaaggtcaagcaagaacctgggactgaagatgaaatatgtagcttttcaggaggtgtaaaacaagaaaaaacagaggatggcaggaggagtgcttgcatggtaagctcccactggagtctgacagggacttaaggacatcacttcattgattctttcagctctgagtatattaagactaagtagtgggtctagaaacatttatttttgaaatttcatgcctggcacaagccagatatctctttttctaactcaacttttttgtctaagagtcagctgtaattaatcagaaaagacttaattgtattaagtactcatttgaaattatctttgaatttgtatttagtcaatattcttcccatgatgctaaatcagattgtatcttgtcctgaaattattatttcagtagtcacattgaatctcaggccacaaaagatctttgggattctcctggacctgtgagctcagcattaagattgctgacatgaaagaaatttattgatcagagttttgtgataggaagtttgtcttttggcttacgtattactaatcattctggagttccttgagtggaacat

SEQ ID NO: 55637 - DNA, 1064 bp, Homo sapiens
gattgaagcaactccaaacaggttaacagtctagaagtgttattgaatgtatttttctaacgtaaattaaatgttatttttttcttactgaaacacaccacctacttctttctagaggaagaacaattcacatgtaaatatggattttccatgagatgcaacattaacatatttttaaatcacataatttttaaggtttaataagaattatttcaggacttctgaaaataattaatgggaacctaagtagaatattttatcaaataacttgttgagggatggcagataacgttttcttggtctgttttgttgactggatagtggtgccctgaggaggattctgaggtgatgtctggacacagctgagagaaactggttgatgtctgctaatggttacacatgcgtccctgactttgtgactaggtctgatttccaataattttttagctgggttataataatcttgagttctgtgaccggtaggtagaattccaaatattcttatatgcattgatattcattttgacttactactttttaggtttatccaattctcacacacctgtgagacccccaagtacttctagtactggcagtcgaggcaggtgagtatattgataattatttttttcctttttgttaagaaaaatagcaaatatgtataataaaagtagaatattacagtgaacccctttatacttaacactcagctttaacagtgatcaaataatggccaatcttgtttcttctatacttctgccaattcctttctggtctgaattattttgaaacaaatctcagtcatttcactcgtgactgtttcagtatatatcacttaatgaaaggaactttaaaaatttataaccacagaaccatgatcacacctaaaaaaatttaacaactcattctttaatatcagtagagatccagttaatgtttagtgttcccaatttttgcaacaaatgcctttgaaaaaaaaaccagatgatttctttgaatcagatgcaaataagctctatacattgccatcagtttatttgtttacatcactatcagttaatttg

SEQ ID NO: 55638 - DNA, 1564 bp, Homo sapiens
caaatcttcctgttgacttgagttgcagctagggattcacctgtagtcacagctttgcaagtgcatccttggccaacagctatgaccacagggtaacacaactgctattgtcctttgattatccctccaactaacctactgcctactcctaccttcagcccttcatgtctctggcatgggttttgttttgtttgtaatcccagtactttgggagactaaggtgtgcagattgcttgagctcaggagttggagaccaatctgggcaatgtagcaaaatcccatctctataaaaaaaaaacacaaaaattagccaggcgttgtggcgcatgcctgtagtcctagctattcaggaggctgaaatggagggcatggcttgagcctgggaggtggaggttgcagtgagtcaagatgatgccactgctcttcagtctggacagcagagccagaccctgtctcaaaaataaataaaagaagaatatgaccatttcttttatgaaatagtataagatttaaggtaatattcatacttaaataattttttttactctttcttacacattttgtcatttaatcatcggagttctgcaatataggtggcatgttttaaggataggaaactgacgttcaggttgagaaccagcccagaatcatagttatgggtcttctggctttatcgtactgcctctaagtaagggaagggctcatatgtactgttaactgtgcccttttttttttgtagtaaggggccttgtgtgtcaagctaagggctttctgtgggctataagaatttttcagagtttcagagctgggtactaacataattacatttctatttaagtgaatgattgtggacactgaaatggagggatactggggacaagaatactgataaataggtcctgcagcaattttgagaaacagcagaagtgtcagagcatgtcagctattttcataatagaacatataggatttgttttgctctgagcacctagttgtttgctgaataatacagttttatctaaataaactttatactgtgtgggccctcagtggaccctaaggaagcaataataaggctcagcttgatattggataatctgttagtttattaataaactgagtataagcagtgacataaaattaataacttctctgctttaatcaaagcaaatttgtctttatcttctttctcttcagttggaagatgctggctcaagtagtttagataatctactaagtagatacatctcaggcagtcacctacccccacagcctacaagcaccatgaatccttctccaggtccctctgccctttctccgggatcatcaggtaaagcaaacgggtattaccttattttttaacaccttaaaaaaacagtgtcagtatctgtcttagtcagaattctccagaaaaacagaataagtaggaggtctacttgaagagagaaagggagattgagagagatttattttaaggaattggctcatgtgattgtgggtgttggcagggaggtgaggcaggctggagacccaggtaagagtattgttacagtcttgagacaaa

SEQ ID NO: 55639 - DNA, 4212 bp, Homo sapiens
cattttgtcttatatatttaagagagattttaacttcattctcatgccataccaggaggtggcactggtgacacaaaatttttttggcctttaaagtatattaagattacataaatttatttctaaagttagctccttatgctataaataccatatattagattaatctaataggaagacactatttttaacagacatgttgatagaaaagtgacattaactaacattcatttctatatgtggaatatcctttttagcttagagaactgacttttagtcccacttttgttagtggcttttcctctgatgataggcttgctaaataatcatggagcttattcacttagcccatttttaaaggaagtataggtattgtgcccatttgcattagaaatgtggggttgattttttttcatatggaattctacagcgaagctcttgttctgtttcagaatgttacaaaggaaagacagatgaagttactacagcagcagaatgacatcacaggcctttcccggcaggtgaagcatgttatgaacttcacaaattgggcaattgcaagtggcagcagcacagcactactatacagcaagcgactggtgagacacatactgtttttatttttctttaatggactttattaagatatatattcagtgaattgcacctgtttaaagtatacattttaattttggcaaatgtaaccaccaccacatcaagatacagaaaacttccaccaccccccaaagtttcctcattccactaggcagccactaatctgatttctgtcattttttagaatttcatataagtggaattatatagtatgtactcttttgaagatacctagtatcttaatgcactttattacccaaaatggcagaaattcaagtatgtatatttgatttgattgctaatttaaatgttgatgctgcctaatctgaggctgacactgtgggaatatatgtgcttttttttcttaatgtctttatcttatgatttcccaattgatatttaattttgagactaatgtggatttttttccctttaagattactttccagttgcgtcatattttgaaagcacggtgtgatcctgtccctgctgctaatggagcaatacgtttccattgtgatcccaccttctgggcaaagaatgtagtcaatttaggtgagaaataatgagttttatgaatataacttggaacactgaattagaaggagaaaatacttaaagcaaatttagataaaatttttaactttataaaactaatgttttacattttatgtaaaaatatgttgttattcattggaaactcactttagctgtggttttgtgtggctgttattacatcttaagaaagttgagcgtctactctgtatattgttttttaatgtgtgctgtttctagtcccccgaccctccatcttttaaatttatattgactgtttcatatagaaatcttagcaaatgattcattgtctggaataatttcatagatttttagttgtttaattaagccaaattgtgcattagcaacagacttttaggatgctaatgtgtccagtagttaggtcctgaggaatgtttgaaagataagagtagctcttttcacatggaagagaaatggattttccttttgttacagcgtagtatggacctaaagaccatagatgaaagttacagagagctcagttaaaacacatgcacacaaacttcctagcaattagagagctatttacagattgagtaaactcactttcagaacagttaagtcctaaacagtgggaattgtaaaagcagaggctggttgccctttttttttaaaaaaaaaaaaaaagtaatctttgcatataataaaaaaaaattatattcaaatttagctatagccttagttctgacatcagccagctgtttttgtgtgacgtagtagctaagaatggtttttacattttcaactggttgtaaaagcaaacaaaaaccaaggactgtgagacagatcttatgtggcctgccaagcatgaaatatttactctatagcccattacagggaaagcctgtcaacctgtgccttaaatcacatcttcctaaaatttggcttctatccctagaaggcaatggctccataaaaagcaaggaaaaccatcacgtctaaggatataagttgtttaaagcattcagtatttccacagaagacgattttgtgacattgtaatgctctgccttgcatattttggcaattcaaaggcagatggaatcagtattggcaatcttgagtatccttgagtaagtcttgtcatgggagaattgatttagattgattagataggcctcttctaatagataatctcttttactgtcttaattttctgtatgtctaagtaaaaaagaataaggacagagagtatatttttctgaataaccaaacgtcatttattcagctttggaatgtattaagtttctgatcatcatcatcatctttaaactgactccattccctgctgtactgttggagctttgaggtgctgatagttgtcagaggaaagaggaaaacatggtgattactcaacaaagtagatgatttagttgattatatgcaaattctcattttttaaatttttcaggtaatctagtaatagagagtaaaccagctcctggttatactcctaatgttgtagttgggcaagttcctccagggacaaaccacattagtaaaacccctggacagattaacttagcacagcttcgactccagcacatgcaacaacaagtatatgcacagaaacatcagcagttgcaacagatgaggatgcagcaaccaccagcacctgtaccaactacaacaacaacaacacaacagcatcctagacaagcagcccctcagatgttacaacaacaggtaagtatcgtgttactacattattgatagaaattatgaagccctcaacactacactttttcctatataattaagttacacatttcaaagttactagcaagactgagcagagttcaaaagtcagagtttaaatatttgctatggttatgatggtgatgtaagggagctgtgaagaaaggcagtaagtaaattgtcttgggaaacaaaattaattcactaatactctgaaaggatgtaagttctcatcctttcacatcaaatcttttttgttttccacgtataattttgtggaccaaaggaccagactgtttctgcctaggatctgatatgttccttaggcatttgttcagatctttcctatacctgtgtgtcttttgctctctccactgccatcccaatcaaaactattactccaggatgggatacgttaatgttgatacgctttaaacacacatatagagaaaaagagggggaacaggtaagagagagagagagagacaagggaaattagggagtgatatacaaactagtcattaccagtcctctggggattggggctagcgataagaattatttatactttttactttatacccttttatcttgactgaattatttttatgattacattttataattgagataaatttattttaaaattattacataaattgcaatttctactttttgtagcctcctcgattgatcagtgtgcaaacaatgcaaagaggcaacatgaactgtggagcttttcaagcccatcagatgagactggctcagaatgctgccagaataccagggatacccaggcacagcggccctcaatattccatgatgcagccacacctccaaagacaagtatgcctagagttacatttgtaagaatcctacaattttaaaattaaaagacgtcattttcttaatcactttttgggagcaggtcattgatgtgtttgagaatttgattaatgctgtatatcctcttgtcccagaaaaataaacatacacatgagattttgtatttaattttaagagcttttaaaaaatgctttaagtgcatcatatactgtgggttaagaaaccctgatgtagttaacccattcaatttgcagaagtgaaaaaaatctaatgagctggtgattttacccacaatcacaaaaagcaatgataaaatagcaagaacattagtttcctgaaaatgctgctctgctcttttaatgtggctttttgatcctaatatataaaaagggctttgagagtaacagagctaactatatgtattattattattatttttttttaccttttctctac

SEQ ID NO: 55640 - DNA, 1199 bp, Homo sapiens
gagtaattttgaagggagtgtatcagaacccatgtttgaagtggctaagttataaatgaaaataaatgcttctatgtttaactattatcctttcaaaagataattattgcttgtgacattgtccttttgcacattgttcttggaaaacgtcaaggttaaacagaaccaatgtgccacatttgacactatccagaagtcactggtgtttgtgcatcacattcatgtcatagttacttaagtagattgccatccagcttaataaactgtcctttatgagcataatttaaaattactaaatattagtttcattatttgtctatgtacataacttgtttggaccaaattggtcaggtctgctgaaacatgagttgtacattttgacaaagttttcattttaattactcggttaagtgcccagttggatgaatttctgtaacagttgatgattcagagacctaggataagttgataacctaatgatgcatttctcttattcaggataaaagaagtaaatgagactaacaaacgagtagaacaggaaattaaagtggccattttcacccttatcaatgaaattaataagaaaggaaaatctctcttacaacagctagaggtatggttcaaagccaaaataaaacaaaaactgcttctcttgctctttagctgtttttaatgtttattgaaaactattttagatggattggggggtatggaaataaaggaaaacgtaaaataaggtttttaaaatttacttttggaagagaccttttctagttagttactttgcggcccaatttaataacactgactttagctgtataccttaggaaatagtgatgtcctcttagaaatcaaataattgttactaagactgggtatggtgactcacacctgtaatcccaacactttgggagcccaaggcagacagatcgcttgagccccgggatccagcccagcccaggcaacatggcgaaacctgcctctacaaaaaatacaaaaattagccagggtggtggcatgcaccagtagtcacagctactcaggaaactgaggtgggaggatcgactgagcccgggaggtcaaggctgcaatgagctgtgattgtgtcctgcactccagcctgggcaacagagtgagaccctgtctccaaaatgaaaaacagaaaaagaaaaaagaaatgttactaaaatgtgatgtac

SEQ ID NO: 55641 - DNA, 1880 bp, Homo sapiens
tcatagtattattacttttgtgattttagtgcccatatagacaattacacagtaattgtgaactcatttccaatgatttgtttcttgactgtgccttagctaggcatttagttttcaggttgtaccatggaccttgccataactgacacataacctctcaaatctgctgatctcactgataaagtcagttccagcttgtttgtttggctgtaccaaccagtactgtaccctgatctctgatatgagttactgtcttagagttttagctggtctttcccttctattcccttctttgggtcttttatatttctgtttgatgattttcctagaatgtaaatgtgattattacattctggttagaattcttcagaggttttccattacttagagaattaaatgcacaaatagtgtgctatacttggcccttcacagtttgcctctggattttatcagttattgtctcatattctgacttttgtatatttttctttggccatattgaagtatttatgtgtggattttatcagttgttgtctcatattctgacttttgtatatttttatttggccatattgaagtatttacatgtctcaaacatgcctctgtacctagcataagatgctgttcttctctgctgtgcttttcttggtattgaggccgatttaggcagtggtttcttgtaaattatatatacgtgaattatatctcttgtcacagtatggtatcattttgtatttgtgactatttgttagtagtacaaacaataatggattctttagtccatgtaaaaaggacatagaaaaaaactaaataatatttgttgacttaataacttaaaaacctaataaataatttacaaaaaggaaataaaagtagcaaagaaaactattattctagcttcctagtagccaaagaaatgttattagagtctatatttgcactattatgattagaaaattttaacatatagcattcatgctgacaaagtaaaactggtgttgatgtgatgttttttattgatttaacccttgtggaaagtttgacagtacatggcatccagaactgaaaaattattttaagtgtaattataaagacaagataaagaataaaagtcagatgtaaatttgcatgttcattattattataattgcatttaaaaatgcatagttaggccacatgcagtggcccactcctgtaatcctagcactttgagaggccaaggcaggaggattgcttgagaccaagagtttgagaccagcctgggtaacatagaccttgtctttattaaaaaataagtaaataagtacatgtataattaaaagattaaggaactatatattacagtggtagcagtaattttgtgatgttggaactatgggtgatttcccttccttttatagtattttctataatgtggttacgctttatgatttaaaatgtatacaacttatgccaatatttgaatttttaaaaagatgtaatcctgaatcaacactctaatataagagcactcaaccattatctgagtaatttttttctttcataatggcctttcagggtcagagttggagggagatgggtgattgccagttaaaagttgctgttgagataaggtatgagtggccagcatagagttgatcacttaattaaggtttcaagattgactcatttagctgttctttatttccaaaatcttaatcataaatgttttgttttaaatgtagttttgttttggttttaaggtatcagtttttggaagaagcttttcaaaatcagaagggtgcaattgagaatctactggcgaaacttcttgagaagaagaattatgttcattttgcagctactcaggtgcagaataggtaagtttgttgccttaaaac

SEQ ID NO: 55642 - DNA, 1002 bp, Homo sapiens
catgccactgcactccagcctgggtgacagattgagactttgtctccaaaaacaaaacaaaacaaaacaacaggattgttaaaagaaagtcgggagatgaagggcaaaggttttcaatctagtattctctttttttgagacggaattttgctcttgttgcccaggctggagtgcgatggtgcggtcttggctcactgcaacctctgcccctgccgggtgcaagcgattctcctgcctcagcctcccaagtagctggggttacaggcgtgagccaccatgcccagccttgatctagaattctgtagctaaagtataaatcaatgtgagaataaaatgtagacatgtttcatcatgcaagtattgagaagctttgcctcttatgtacctctttttggaaagccattagagaatgtgattcaccaaaataagttagtaaaccaagaaagtaaaaggtaagggaatgcctaaaatgacagccatggggtaagataatttagaatgaggaatgaaaactgaggatcctgtgaagaaggtctccaggaaaaaaatggaaccatgtctattaaatttgttatattgggtcatttgaaaaataatgctgacaagtttggcatgtggtagttcatgagaaacattagcgattgcagcatggggcaagatggaataaatttggagagaatatattttggagaaatgtatttatttctcctgaaatgaatagtcacttttaagaccacactctcttactcttcaatcctcgtttgaggtggagatagggttgactcgctgaaactagaatttcttttccattgacagttttacaagaggaagacccaaactgcatccttcattaccaccaccatttgcagcctctccatcattatcagccttgtatctactagactaatattgttacattttttatctgtatttttctgttacccaagagagtgccacaagtgccacactcccagacgtcccctcatctgtcacactttaatt

SEQ ID NO: 55643 - DNA, 1029 bp, Homo sapiens
tatatttttctttctctgttgagtatcacaggatgcttctactctggttatttctaaggattttttcaccatttaggcatgccgttagacctttgctggatttatcatacagctcctgttggtcacatgtcatcactgcttttttcccctaattccccaaactttttatcaccattgcgtttaaattagtcctgccttggtcttcagtttctgatagtatcatgacatcatcagtatactatattattacatgtggggacccgaatcaactctaaatttctcctaatcaaattatgacagtaagctggtgagtggaaataaccctgtggtgatagagtaagtgcaaattgggatctctcccactcaaaggcaaattgtggttggctctttttgaggatggaggtaaaataaaaaaagaaattcacaagattagtccctgagtactgttttcctttggcctgctatatattttatatgttttttgtactgttgagaccatattaggaactgctgatgctatggcggaactacttcaggctttcatagttcactgttagtctccatgagccatctgcttttttcataggccacacaggattattgtacaaagaattcattggcaccagcactccgttgtctaattcttcattaaaatggtaatttctttttgtccaacaggtaatttcatcaggcagtaccttacactgtccaaaattaacaacttctgagggcctgggtggttctggtggttcctaattagcatttctcatcaacattgacctcaaggtgaacttacgtgctttctgttttcaatattagacaggtgtacttttcagtcaaacatactgtctatcccaatagtacattcaggtaatgaagacgtaaccacctcacataaaggcagctgagacattctagttttaatctaaatgtttaccttaatcccattagctgtcacctttcaatttaaccttaacacctgttaggacttcaacaagatttagaattatggtgccttgggcctccctg

SEQ ID NO: 55644 - DNA, 2244 bp, Homo sapiens
tataaagtgcatcactctactccctgcgtccattgttattataattgccttccactcttctgtagtcttaccttcctcttcctccccctgataaggtcacttgatcacgtttaggacccgctggacaaaccatctccagagccttaatcgcatctgtaaagtcccttttaccatgtaaattaatattcatagtttccgaagatcaggatctggatttcttttggggcaattattcagctaaccacatattataatgaggaagcacttcttgggaggcatcataatgcttgttttttcttttcctaaatagagtatcacttttacccaaatggaataactcgctgggttattttactgagctcttgatgctcatttctttggtcttctctgtgatgaattaatgtttctatatggacatcatgcacaatttctttattcctgaagaatattttaaaatgttgttattttatgttgtagttggtgtaatacggtgcccagtatgccgccaagaatgcagacagatagaccttgtggataattattttgtgaaagacacatctgaagctcctagcagttctgatgaaaaatcagaacaggtatgcttctcaatttttctttatattcctatcttgatatcaaactgtaagttataagaaaaacatgtttggatagttaagtcatttagggtggttctgctatggattcctgtttcaaatagaaagttaaagatagctttcttatatactctcaaacttagttaaatgagactaaagctattacttaaaatgtcaaatttgggccaggcatggtggctcacgcctgttgtcgcagcacttagggaggctgaggtgtgaggattgcttgagccccggagttcgagaccagcttgggcaacatagtgagactccatctctacaaaaaataaaagtactagccgggcgtggtggcatgcgcctttagtcccagctacttgggaggctgaggttggaggattgcttgagcccaggaagttgaggctgtagtgagccgtgattgcactactgctgtccagcctgggtgacagagcgagagcctgtctcaaaaaaaaaaaaaaaaaaagtcaaatctgcacagacttcgtgttctcagccttagatttttacctacatgaatgatctgtaaggaaaaggattttgttgaagataaatggataacaaaataattttattctgtgtacagtgaaatagtatattgaagaacaagtttttttttttttttagatctagattttatgtatttaatttagattagtgcttatttcttcttttaggtatgtactagttgtgaagacaatgcaagtgcagttggcttttgtgtagaatgtggagagtggctatgtaagacatgtatcgaagcacatcaaagagtaaaatttactaaagatcacttgatcaggaagaaagaagatgtctcaggtaagatagatgcattgtaatcattacaatgattacagttaacctccttcttttgcccctatagaattttctacttattctttataaactttggatagcaacatcaataggaatttagaaaactagacaaaaattttatgtttggttaaaaaatatttgttttattttgctacagagtctgttggagcatctggtcaacgccctgttttctgccctgtacacaaacaagaacagttgaaacttttctgtgaaacatgtgatagattgacatgtagagactgtcagctattggaacacaaagaacataggtacagaaatcataattgcttaccaggaaatactataaaaagtgcttgtaaagtcattcttcttcttaaagcaaatattgattatatgtttgtgtcttaatcttttaaatctgtattttacatattttaatttcttgagcaatatatgttttggtaaattatttaaagatttccacatttaaatctaattgtcttatgaatgtttgttaaaatgtatcattttgtaggtttgggtttacaagaatggagttatattatgcatttgtttgctactcctgtgattcaaataagctttttcttggtgtcctatagtatttttggctgtaatctacaaaagcagtattcttttaaacatcaaatcacaaatacactgatttcatgttacatataaaatttgtagaaaagctagggatttatgaacaactaagcagagttactgaccctctaatacatacctttgtattttagccttgtaccctcag

SEQ ID NO: 55645 - DNA, 1062 bp, Homo sapiens
catggctgcagctcgaatgggctaggcacagacaggaagtcagacaaatcagccctagcccccagcagcagcgctgctcctgctgttacctctcacaccactgcactctctagccccttattaatgtgtgcacatagggtgggaatagagatgaataagagataggtgcatggtggagagaggaactagacttaggcatggttatacttctccagtttgaggtttctggcacgacttgacaatctttttccatccagcttctttttcctattctttggataattcattccagtctttcaacacttaactcacaggactctcttatcatttggactgggctctgacttaagtaattagaggctgtaggtataaattctctcaactcccctctctatctgaaaatatatctgtaatttttcattattttctaagggaaaggagagtggtgttgatgaccaaagctttggtgtgactgcttgagaatattggaaagagaagctagggctaaatgaaaagattgttaggtcatgctaagagtcagctgactttaagcgcattatgtaattttaaaagtaaattggtacagtggtaacaagttaatcataaatggttaatggaaaagtagttgatccttgtttgacttgtgtttgtttcagttacacagacaggtatgtatttgtgtcctggcctttgatgtaaagtgtacttcctgtggtttgcagttgaaaatgtttgaaagctgtctcctaaatttgagagctctgtttcttctgcttgacttgtaaatattggtgtaacaagggttattgtccttgataatattcttcctcagcagtcataactacatttcacatttgagttatttacatgctggtagctccctccacacccttcagctccagaaatatgctagttaaacaccatctatccaaaacttactcattacatttctggctaaaacactttttcctcattttgagtagttatgtaattatctatgcattacccacaccaggaacttgggaatcatctagaatttctaatttgtttcctcattgtaac

SEQ ID NO: 55646 - DNA, 1262 bp, Homo sapiens
gtggtgagttaattaaaattttcccaattaaatgagaattttattcttctcattggtagacctgtattacaaaaaaaattactcaattattatattttgaatttgtagataaaaattgtggaaatttttctttcattatgtaaatacctacatactatccttgatacttttttcctaaacaacctaagttatttactatgccttgtgatgccacatcccatgttttcatttgatgggacatgttaggtgttggttatgaatcagatttcaggcagtgttgtgtgtacagcctgacctgttgtccacaatagatttggaagaatgagaatttacagggttctacttctaacatcacaaatgactgccagaatgaattccacaaatgaattttggaccagtctggcctgtcatccatgtgtggtttattaatagaatgctaaaattcaaattacacaactcatttcttttcccatcactgagggttggcttaaatactatccctcacaaagtaaatacttaagcaaaaagctaatgtcagtcaaaagatccccatcagttttttgtctgccgtagggcagatatgagggtaaggtattgagaatcatttcactgtattactgtgcttatgaatctgaagtattgaaagtaataagagcactgcatttcagctgtccttcgtatattacattttctgctttgtgttgaacattaccttcatttgttgtgaggcatataaaagggatgtatgtaatgaaccttggacccactgaatctcgctggagaggtaagagattatattaaagaacagtataatacattttataataaattagtaataaatttgatttcagtaaaccagatatttgttgaaatatggttcaaaagaattagtcatagctgaaatttactatttctgctcttaatgttggtttggaggtgattccctctttttcatttgtgtattatatgattttagtccttatgcttttggctgtaatctaggctgctcttgacatccatccaattttctcttctctgttttccttcctcaatttatgttgaatgctttcaaagtagattatctgaattaataatggcaggaaagaactagctgtggataagtttatttgaatctgtctagacttctgttccttgtctgtaaaataacatattttgttatgttttatcttacgttaaagataaaactttttcgtgttatcttatttgcctataaaaatcctctcagagggaagactcattct

SEQ ID NO: 55647 - DNA, 1027 bp, Homo sapiens
agatcataagatagtaggtggcagatttatacatttatagttcttcattttggagtacccataacagttcagaaaaagcctccctttagtaaaatgtaaaaatgaagaaagtacttattaactgaagttaaacttctaaaaataggtcactatagatctactgatttttttcatgtttatgacagtctatctaagccaacttcagagattgggctcaggatggtagataaattaacctctgtctcttctttggccacaaattgcacatctatccctagccatttgactcaaggggaagtgggaaaaagaacaaggatggataaacataaatataccatttttagaaaaatatttaaagcctatgccccagtgatgagtaaatagcatgcactatatggtactaatgagtacatttgaatgcttatatgctatttatgttccttttgtgaattatttgtccatgtgttttatgtttttctttagattgcttacattttttgttttgatttacaagaattcttgacaaattctgtatactgatcctttgttgatgatgtaggttgaagatttattctgagcctatggcttggtgtggtagccagcctctaagatggccccttgttccttttctcctgttattcacaccgttgtatggttgctgtccagttgctcaaggctggtctccgtgaccaagagaatataatagaattaatagtgactttattaaaaagtcattaaagccatatatacagttttttccttgctctttgaatcccttgttctgggtgaaaaacagctgtcattctgtgaaagatactctagtagtcctttaaagaggccatatggagaaaaattgaggtcttctgcaaagacccagcaccaacttgccagctatgtgaaagagccgcttttgaggtagattctctatcctaatcaagctttcagatgactgcagtccttcctggctgacatcttgactgcagccttcttagaggcactaagccagaactgcctgccaagtccctcc

SEQ ID NO: 55648 - DNA, 1232 bp, Homo sapiens
tggaggtgagtcctcagtacaatggttgtggcacaatagaggaaaggtcagggaaatttcacaggaaaggaaatccatgaacaggtttcttgaagaatgagtacctcactgggttggagggtattcagggcacaggacacccttctacatccctggaactaaagactgtgtagggtgattggtggaaattagattggattgatgggctgaaaagataaaggtttcacagtctcttaaactcttgggatccaggtgtaaggacttcagaatattttgggatttttcttttttctggcaaggtctgttatgtgagacttttatcagggtctgagttaactctatcaaacacgttaatgtttctacattgaaacacgtgaatgtcacgctaatgggatagacgataaataacctcccagcattcacagtgggttctgttgcaaaccaatgaaaaaaattaaaatttcaaagcttttgaatttcgggactgtaggtaagcgattgtggagctgcactaaagggcttggaattcatcctgtagagtgtatcctcgacattgtggactgaaggatgttcctggagggctttcatatcaagaggataaaaggatcagatttctgatccagaaagatcacttagggcacttgagggatgagggaaggcaaggctggagacaaggagaccagttaggagaatcctggcggttatctaggaaagaaatcaacatttggaatgggtagtaaaggaatgatatatcaggtattacagaatgaagcattttggtttgggggaacggtagggtttggaaatctactttgccatctcctacttacgacttgggcagatgaccttttcttagcttcagttttctcatttgtgaaatgggaaaaaagtatataacctcatagggttattgagagaatgaagtaagataaaatgtgtaaagtgattagtacgtggtagttactaatgaaatggtagctagtatattaatagtagtaactaatagtggctatgggaatggagggatggggggagtgtattgagattggtgtgagggagacaaacgtagaattccacattttttgtttggtggatggcaatgctattaatacatattcagacactgaagcagggctggggtgagggtgagggctggggtgtagggaggataaaatgttttcagattgggatgttttgggtttctagcattattggtacatgtaggtaagaat

SEQ ID NO: 55649 - DNA, 1095 bp, Homo sapiens
gagtgtagtggcgctatctcggctcactgcagcctccgcctcctgccgggttcaagccattctcctgcctcagcctcctgagtagctcggattacaggcgcacgccattacacccggctaatttttatatttttagtagagacggggtttcaccatattggccaggctgcccacgaactcctgacctgacctcaagtgatctgcccgcctcggcctcccaaagtgctgggattacaggcgtgagccactgcgcttggcctgaaagcttctactaccattgttgtaagggcatttgtcacccagctcaacccaggacacttaaagtgggacctcagaaggacgcagtattggttatatccgtggctctccaaactgacatacataagaatcagctgaagggacttttccccctccgtcggctctctccctcacttcctgattcaggtctggggactggccctggcatctctgctttgaaaaactcctccgttgattctgatacgtagcaactcctgagaatcaccttaagatgccaaaaatagctgttaaagagtttcttcctcactcggtcttttcagcctatttctgatagatcctcagttcaaaaacaaaaagcaaaaaaaaaacaaaaaaaaaaaccaaaaccaaacaaacaataagccccgctttagtgctccacggccacccaaaggaacgcggctggtctacgcacagcagagacccaggaggtcccggcgatcgagcggcgcggcaggtgaaacttccgcggagacgcccgggacacgctcgcagggaccggaaccgtcccggctaccacccttccgtatgcaccaccgctgtgtcggagttcataaccaaccccagccaaaggctacccagcgtcaacggcctctggctttaaaaaaaaaatctcccttcgggttaaagagccgcggcactgacgcaaggaactggcttcgagggtccgggaccgctccgcgcccgcgaaccgagttcccgcctccctcgggaggacgtccgtgcgtacgtgcgcgtgccgcaaccgccctccttcaaacgcgcgacgcgagggcgggggcgccgcgtgcgcgcgcg

SEQ ID NO: 55650 - DNA, 1467 bp, Homo sapiens
ttttccacaattgtgccttgatttttttttaatggaaagttgaaagtgaaggttaggccaggcatggtagctcatgcctgtaatcccagcacattaggagaccgaggtgggtggatcacctggggtcaggagtttgagaccagcctggccaacgtggtgaaaccccatctctactaaaaatacaaaaaagtagccagctgtggtggcgtgtgcctgtaatccagctactcgggaggctgagtcaggagaatcccttgaacccgggaggcggaggttgcagtgagctgaggttgcgccattgttctccagcctgggcaacaagagcgagactccgtctcaaaaaaaaaaaaaaagtgaaggttagtgttatagctctgggtgaacatgtgtatacatttaaaataaaatcttctaagagaagttttacattgagtaatttttttcttttcttcccccccattctagttgggtatccctggtcagtaagaattatgagattgaacggactattgttcagctagaaaatgaaatctatcaaattaagcagcaacatggagaggcaaacaaagaaaacatccggcaagacttctgaaaagacaatttagcaggtagaagaaaagttgggctttcacaaaaggcatctgaacttttaatgaactttgaaggacaacagcatcttcccaaaaccattgatgtttaagtgtttagaaatcatagaaggtgtaggctgctgtggtaattctatttgtatatctcaacagaattaaaatgtctagcttggtggtatttttatagccataaaagaaaatctttaggctttcaaaataaggatgactttagaataatattgtgtcatagaattaattttcagccatgtggaccatattttgtatccaaggatccttatttaaagctttcaacatgtacaggaagttggaaatttttggtttatgactttgtctaataaagagatagttctaaacacattcttgatcaccaaacaacttcagaaagacagtgactgtacagttatcattatcatcatcatcgtcatcatcataggtaacagttatatcaagcttaatatgtgctgaacattgttctgaacactttaggtagatgaactagatgtatgtgaataaaaattatttggtcctcacaaaaacctcaggaggcggttactgtttttctcatatgtggacatgtaacagacaccagttaaataacataacttgccagagttttatagctgaaagtgtcagcttttttatagaaagttgtcagtcaggttttgaacccaatagtccagctccagagttaatgttcttacttctctacttgtaaggaattaaattgtgtaaaagattcctgcccaattcagaaaaaatatttgcaacatatcaaaaggtagtgttgctaggtgtggtggctcacgtctgtaatcccagtgctttgagaggctgaggc

SEQ ID NO: 55651 - DNA, 1032 bp, Homo sapiens
gaagttaaggtaaattgttttttcctattacagaatgaagtttaagtgaacctttaataaatagaaaataggaggaaaaagaaagcaaagagactgcagccagatgaaagtaaacaattgatccactctctttgttcaacatctgacactgggtttgccctacctaagtagaggagaaataggcctgaggtctgaaaacatctctgccacttgcagcttgcaagtctgcaaacatagaaaggcacttttagagtgggaaaagttgcagaataacacatataatctgatttttaaaaccaatttctacacacacatataggaaagcctggaaggacacccagcaaaaactcaacaggagttatcaggaaaaaggagacatgcatgagaggggggacttgagacttgtaatctgtgtgtgcttgtgtgtgtgtgtgtgtgtgatttctcacaatgagcatgttttatgaaacttgtaatcaaaaaataattagaagaaaggtaatttctacagttagcctataactgtacataatattgttctcatgggattaagatattctcttgtgttatagagttttctgttgatttaggtcttacattaaaatgtaattgggttgtataaataattttttacagaaaacatattcaagatttaaactggcagagaaagaacatgcaactcacagctggatctaaattgagagaaatggagtcaaagtgagtatctataattccatcatcttttaaattgtttagccctttctaaggtcgattcaataatatgattcaaatagcattcaaatgggatgccacaggtaacaaagaaatgctattttctgaattcacccttccccgtctctgcctctttataaggtgttaaagagaactataaacgagaattgaaccattggcgaaggatcctttgctaaattgaaccattgctaaaggattctggtcttagaataccctgtttttagtctagtatttttggccttgaatagaactctacctttattctccttttaaacggaa

SEQ ID NO: 55652 - DNA, 2078 bp, Homo sapiens
acagggcattacatggcaaggtaggggcacacaagagaaagacaaactggcttttataacatacccactctggtgataacttattaacccatgaatggattgagccttcataacccaatcacctcttaaagaccccacctcttaatactattacattggggattaagtttctgtatgaatttcagaggggacaaacattcaaaccatagcactgtcgaactgattctgatatgcttctggaattaagaaccactggtttaggattaatccttttctctgtgggctccttaatacatgccacttttcctgaatgtgaagtgagtgagtgagtgtgtgtgtgtgtgcttcagattctagagagcatttaactcagagaagaattagggaaaggtaaacaattcattataatgggtagtgtagcttaaatctgttctttggtgattgttaatttttagttgtcaacatgatcttagaaatcttttttctgatttacacatcagactgacataatgagaaatgaatttgaaagactggctgctcgacaaccaattgaattgctcagtatgaaacggtaagaatattaaaatggaaattaaaatttagtttgtagtaactcagtaatgagctgagatttgtgaagaatgtatttgctggctaatattggcagtgttggccgggtgtggtggctcacacctgtaattccagcactttgggaggccgaggctggtggattgcttgaatccaggagtttgagaccagcctgggcaacatggcaaaaccccatctctaccaaaaataattaataataataataataataataataaacgtacctgggtgtggtggcacgcacccgtggacccagctacttggaaagctgaggtaggtggatcgcttgacaccccccaggagatggaggttgcagcaagccgagattgtgccactgcactccagcgttggggacagagggagacccagtcttgaaaaaaaaactatatatatatatatatagagagagagagagagagagagagaggcagtgttgaaggactgactgggtagtatgaagagagaatagaaggagtcatatcgcttctcatttttttctctaccggcgcatgggtatgttagtggatgggtgggtgtgagtattttacaaaaatggtagcaaacttttttgtctactgctttttccccttaatatattactgacatcttaatattattaaatattcttcagtaacatttaatagctaatgtaacaatcttttatgtgaatgtaatgttgcttatttaaccagttcacattgaagtgaacataatggtgctaaatcatatttgtaaattgattgttagcatatatcggtttcttattattgcaaggtttacatccttagtcttctgtagtttttatactatatggagactcatgggacattctactgagaagagatgtaaaggcttggcagtatagatggttttattttattttgttgtttaatttcagatatgagcttccagccccctcctctggtcaaaaaaatgacattactgcatggcaagaatgtgtaaacaattctatggcccagttagagcatcaagcagttagaattgagaatctggaactaatgtcacagcatggatgtaatgcctggaaagtatacaatgagtaagaacctttttcttcatcttctgttttttttgttttttctcttttctttccatctcacccaaagttttagtacattttaaaagtatgggaggtgctgggtgcagtggctcatgccagtaatcccagccctttgggaggcagaggtgggtggattgcttgaggtcaggagttcgagaccagcctggccaacatggtgaaaccccatttctacaaaaaaaaaaaatacaaaaaattagctgggcatggtaacgtgtgcctgtaatcccagctactctggaggctgaggcatgacaattgcttcagcctgggaggcagaggttgtagtgagccaagattttgccactgcactccagcctaggcgacagaatgagactctatctcaaaaaaaaaaaaaaaaaaagaaaag

SEQ ID NO: 55653 - DNA, 1365 bp, Homo sapiens
gtggaaggatcgcttgggcccggggggttgaggctgcagtgagctatgatcacgccactgcactccaacctgggcagcagaacaaagaccctgtgtctacaataaaaaaggaaaaaagtctcgcacagaggaagagaagattaaggggagaaggtgggagtaagcagaggtgggaaaccagtttatctctccccgccaaatgctgcagccagttccctccaaaagtgttaaggggctccctttccagatatcaatgttttggaggaaacgaaaagccccaacttcaaatcgccgccattcgcaggcaaaaaaaggggcagtaagcagaggacaggaaattgaggcctttcgctgacgcagacaagccaagacgttacgtcacgtccgcccaaaacaaaccagcccggcaatttctagataccgggcggacccgccttcaaaattagcaactgagcatgcactaacgtcaatacggagggaacgtgattacatcagtgtcaggcgccggcgtaattaaatataactgagtttacgcagacgcagaaaacgcaggcaaacctgaggtcctcagaatggcgggcacaggtttggtggctggagaggttgtggtggatgcgctgccgtattttgatcaaggttatgaagcccctggtgtgcgggaagcggtgagtgcggggtgtctttgtagctgactcactgctagctggctcggtactgaaagaaacatgttacaatttgccacttctaccctggtccctattctctttcttaggctgcagcgctggtggaggaggaaactcgcagataccgacctactaagaactacctgagctacctgacagccccggattattctgcctttgaagtaagtatgtcttgagcctaggtgtgaacgagaattcctgtgaacctttattttggattgagagctttaaattccagttttaaccattgcctgcatagctactacttacctactgtataggtgtcagtctattgaaaacaactagatagataagtcttctccgaggttcttattctaagatccataggaagactttctggggctccacaactcacttaatgcaaaaatttgtggctaccattctttgagataggatccatgcgtaaattctcaaagggaccctctcctgccaagattcactctacagcaagtgatctagggttttttaatatgtataagcctaattacctaagctctttagaaccactggagagtggcatattaaagtctagttatttaccaaatgtatgtgatacgactgaaaggacaaaccatatccaagtgtatactacttttttctcagccttctccttttttctgtaatctatccgatgttttta

SEQ ID NO: 55654 - DNA, 2198 bp, Homo sapiens
ggcctcatcacaaaagctttataatcagatcagcaatatagccttaaataggctgaccataaaccatgatgctagtttcaaagtgttttggagaaaaagcagcatttttctcaaaatttgggatccctcatcagagtggtctgtggggccatttcccagagatgaacttccctgatataagtttatttatttcatgatatgtttgcatatcatcattattaatcatttctaggacacattccttggagaatcttataaaaaccatggtcctttttcccagaaaaatgtatttacagcatataaataaattttgcacataattttaggctgctcatataccccatgaagtctatctttggtactccagattaaaaacacttggtttagagggacttctgaggcaaaagaggatttcttacaagtctctaattttctacttcatacagaaacacatttatgatttttcagtaatagttaattagtatgatacaagagaacaggggtgtggctagcctaaaataatgaataacctatatgctacgatatttatattttgtctttgaaatatatgccccctaattaggccctgtccttcactagctgacagaccatggacaaattaggccttaggctgttatttcatctttatacaatggggttagattagatcagtggttcccagctctgactacattttataatttccagagaacttaaaaaaaattttcccctgggctccaggaaatctctggggagaagccaggtgattttaacctatagtcaaggttgaaaaccactggattacatgatgtctgagttcttttctgccgctacaattaactagacatatggggtttggggttcatttttgtttttgttttgggggttaaacacatcaactgagtttgagatgtcagcttaactcttgggctgttctgaatgactgacctgttaatcccttacctcaaataatgtacaataaataaaaatgaattgagcattcactgtacttttctttccctttaggaagcaaaatgaaatttctgcaaaagaaatgaaatctctgattgtctccatcctgaatatacaacagaaagtgccaaagaaaatatttttctaagggtcaggatcccatgaagtattctacaaaattcttgaaattttaaaaggttaaagagcgagtcaggctgttagaggaggattctcctgttgctgctgtagtaatcactggagaattgttgggaatggtctggcaccatgccatctttactctgtctccattttttttttatagcagccttttctatgtgattcttgggctcattctctgttttgtgctttgtctgtgaaagtagttgtgtttcacaaggaaaagccttgttgttgttacatttaaaaaatagctcaaagatgagaataatgagagaaatgctgagtttaaggtagtagagagacatgatggaaatggagaacactagccttatacacataattctcatcactgaactatcatggcccctttaaacccatgggctgtttgacctgggctaaggaatagactcatcacatatctccattgttttgccttatattatatctaggggaatctcacttaggaggaagccctacttgtaatattataaggtactgttattaagtaccttataaaattagacatcttgcaactcctcctccaaattatgtggcatttgagtagtttgcttgtgcctcacatgtcaacattaaactttgtggaggctggatgcagtggctcacacctgtaatctccaccactttgggaggctaaggcaggagtttgagggtgggagtttgagactagcctgggcaacatagcaagatcccatctctacaaaaacattttaaaaataagtaaataaatttaaactttgtgaaattatagctaatatgaaaatgtcctttcaagggcatgggagccacctttattttttagtgtccaccatgtgccatgcactgtggtatatgtatgcatatcatctcaaccaatccttaaatcaaccttatgagatagatatttgcatctccattttactaataaactgaggctgggtgctatggctcacgtctgtaatcccagcactatgggagtccaaggcgagtggatcatttgaggtcaggagttcgagaccagcctggcaacatggtgaaactctgtctct

SEQ ID NO: 55655 - DNA, 1062 bp, Homo sapiens
tggggagaaacagacacacataaagttttagaaattgtataatagaaatttgtacaaggtacagtgggagcaaaaatgaagtgaccatttattctgaatattgaagtggaaaggaagagttcataaagcctcctcagagcagccctccgcatataacctgtatgtaggagtgtgagctctgaaacacagggtgaaaagaagagtgtttcccaggacattttcagaatcaattagctcatcatgtttgaaacactatttgtggatgatcttcataatataacagaagacttgtagatgagagagatctggtggaaaagtgccagaaaattttacaaagtatatatttttttaatatagttaaaatatacaccataaacatgaaagattcttcatgtagggaaggagacttcagactgactctttagccaaaatatatacagtcacttgtggaattttggagaaataactagggcatatttgagacttaatccctcaaatctcaaacaaagaaaaatctccatttttttttcttcttaaggtatctgatgaggatgaaattctaccaccaaaacttcaagctgccctgatgcagattttggaagaacgaaatgaaatcttgactcaggagcagaatttttcacaaggtatgagacaagtgagccaaggacttaaggttaagggttaaggtagtaaatatttactgaatgcccagcactatgttaaaggatataccaaagtagcattagattgcctgtgcgctgaaaatcctataatcagcttccttgcttatcctcagtatgccaggtcctcttctatttcaggacctttgcacttgctcagttacatttatagaatgctattcccgcagatatccacatgactcctgccctttcttcctgtaggtccatgctcacatcatcttctcactgaggcccttcctgactgtcctatattaaattgtacccattcctctagtgctccttatcctcttccctttgctttaattttattcaaggctcttagcactatctcatattctacagcataagttccgtgagaaca

SEQ ID NO: 55656 - DNA, 1835 bp, Homo sapiens
ttaagagttacctccctggggctggagatgaggtaagttagctcattttgaaaagatttgatagcactaaaaagcaggacttacactagtaggcagtttccagagcccaaggggatagatttcccttttccataaactgtaaagaatatgttttatttccataaagcactggagaaatatccagttgatctgtgacatagttcttcctagacccaggacccagagattttctaccatacatagactgagtccctttgtaatgacaatttcatgtgataaatgaagactgtatatactattgtcagaaggaatacaggatcttgatttacagcacaaaaataagctgttgggtcctggcattagtataggaagcttcacagaccccgtgtagcagacctttcttgaatttaacttatataagaataacaggatccatagcgttggcactagggattgttttccaacattagctcacctgattcaacttcttgcatttcagtccattgaactctgccgaccactagattcccgattggaacatgttgattttaaatgtctctttaagtgcctgagtgtgtgtcatctcatccgggtctgtgcctctctccttttggagcgtagggtaatctttgttgccaacagcctaaggtaagaaataagtgaaatatgttacttcacactggtgttttatttgttccaaattttaaaattggggcatttttttttattttactattatactttaagttctagggtacatgtgcacaacgtgcaggttcattacatatgtatacatgtgccatgttggtgtgctgcacccattaactcgtcatttacattaggtatttctcctaatgctagccctccccccatccccccaccccacgacaggccccggtgtgtgatgttccctaccctgtgtccaagtgttctcattgttcaattcccacctatgagtgagaacaaaaatttgggcatatttttgaaatgtaggatcagtctctcagttatctagtggtatatagtggcatggataattttaaatggtaaatcatcaaaaagccacttgcgttaggctataccaatgacttttgtgggttgtaataaatttcccttttaaatgcattttgcttaccctattgtcaaaagttggtaatacttttctaagtacactaatttttcgcatgagaaattgtggaaatgagctggattaagattgaacattttcagtaaagtaagtttaaattttaagtaaaatgttaaaaaattaatgactgtttgcatagtttttaatctatgatcactaaccagcatcaatttttaattctttaacataataactgaaatgtcctccttatgttactctatatatgacaccatttgttttctcctctggctagcaccctgtcaaaatgtggccatgctgtggtagctacactgtatccgttcacctggcagcatacctatatcccagtcctgccagcatctatgattgacatcgtgtgctcacctacaccattccttattggaatcctgtcttgctccttaccacagctccaggacctacccattgaagaggtgagatagaagaatggaacctaatattggagcattgagaagtaaaaataagtgatcttaagagtggtggaattgttattaatttagttattactattttatgctatttataatatttctattaaattattataatattgctgtttataatacttctagtattaagatgggaaaattcgatagtacacataaatccaaagctgtatcttatttacagtagtaaccttgggctcattcttgtgttattctgaagggta

SEQ ID NO: 55657 - DNA, 1563 bp, Homo sapiens
tcaaggctgcagtgagatctgtttgcaccactgcactccagcctgggcaacagagtgagactgtcttaaaaaataaaaataaaatttaaatgaaaataacccgattaatacctagagtggatgaataagaaaacaaaaggaaccaacatcaacagcttatctcatacctattctctcactccagtacaaggcaagatattcttaaggcctgggcattccttaggaggagtgtaacttgcaatgaatgtaatattatgcctcctcttagatcacttgaaaacctggactctagttttcaattgttttttccatggagaatgccgtaagtggttgtttggatcctaactagatcacaaaatgactactgttggactctagttttcaattgtttgttccatggagaatgccataagtaattgtttggatcctaaactaactattggctcttttttcagtgaaacattctcctttgtcttgactggtgaagatggaagccggtggtttggttactgtaagaagctcttggtaagtatcagatttgtgttacagacagggttggtcaaggaataattgagtcagagtaggaacttcagaaacactatctctagatgagtttgagggatgctcaatgatctgtgtattaaggaagctgtattagctttaaacagcaagaggaaggtgggggttaaccatggagtgttctagaagagaaggggtatggatttattttatttgtttataatagaggaagtaactgatgacatagtggctgaatctcagtctggatatatttgaaatagagtacaatgagctactcgaaggagctctgagttactcaccaaccatattagggcttttttcttgcttgggtggcttcactaaacctagaataaaacatgctatcatttttagcacttttcacatctttcagtgttcactaaagatgagagccttggttactgctccgtactaaagagtagtaaaagataattaatagtccaaattagtattaataaaaatgtatgcggcttgatttttttgttgttgttgtttttatcttttagccagtaggcaaaggaaagcgactccctgaggtatactgcatggttagtcgcctaggctgcttcaatcttttttcaaaggtgagtggagaatgagctgtatgaaaaatggtgtcctttttgagctcttaatattaagtggcatagagtttaacatgttacttcagaaaggttccctattagtaaactaggaaccacgtgcctgaaggcttaaacttacatctctaatccatttgctcttgctatatcatcttcattttggtttgctagaactttcagcttaagggagaacatagtccaaagcttatcttgtctcgtgtctttcttagaccaaattgcaggatatcattgtcactgtcaccttctttgcccctcccttagtgagatgaaaaggggcttctcctttaaaaataagttgatttatgttagtaacttttcttcagggtataatgatacctcccaagagatatgatgcttatttaacttttattgattgcagaag

SEQ ID NO: 55658 - DNA, 1144 bp, Homo sapiens
cgactaggtttttgttctcagtacattgaagaatggatttttatcttataccccacggttcataaaaatactgggttcccatttagtgtgtgaatcctgaattaagattttacctcttgataggaaacttttcactaatctctcttacagtagatgctgagatatccacagataccatttctaagtaaaaacaggattcttttttcttagtaactctgttctcagtgcatcctcagtgatttccagaattgactttttaatttagttaagcagtacaaaaccatgctgaggcttatcagcaactactcaggcttatcagagaccttttttcctgagacaaggctgagttttttatttctattccccacttacatagtataatttaagtcacctatggtgttatctttttcaggatgatcatggctataagcagtccaaagacatggaagagagacttaaagttattccaaaattttgttttcctgattcaaaggactggatgccaacctcagaactcaagaggtaaatgggctaatttatctgatttctattcattagacctgcaaaaataaatcagagtatttgagaaatgggtacagccattagtgaagctatgtgaatactgtggcaagtcaaggatgtggtaggaggaaaggaagaagcagaactagaacatttcctatgtggggcttaaaaaaataaaaacgtggaataatttcagtgtcaaaaggaaaacaaatttgagagtctcttcagtttgccagttctacaaaaaaaaaaaaaagttctattttacatacaatcagaaatgctcccaagtggacagaaaatgaaaaaagacttggattttgagactcaacctagaaacagagataaaacagagcagtgtcttcatctttatcttctttcttcttcaaattaacagaataatccacagcccagcttttatgttcctctgtggaacctgtacaaagggaggctccagtttgggaagtgtagtatattaagaaaggaagttattaaaggatttcttccaggtatctagaggaaattactacttttaattaataaactatcataatctctgaattctgcttgtaaatattaatagatgcctgctttgttcaaaactataattattgat

SEQ ID NO: 55659 - DNA, 1466 bp, Homo sapiens
ccctggcctgggctggtggtgccacttgtgggtgactacttggggattgctcaactgctgtgggttggaatggtggcccccatgggaaggggagatgcctggcttaacttcccaacccctagtcgaaacacagagtctcaattctgcagctacccagagaggaaacccagcaccttgtgggccacttgtgtaccggattgcagactgcagcacctgggtgtctgggagagtctacagtcatcccccaggatcctcatgtctgagggagtgtgacattaaatagcaaataaaaactccattacagaggccacagaagaaaaaagatgttttatatttaatttgttctgctttttgaacaaggggctccacattttcattttgcattatgctatctgaattatgtagttttccttagtaaggagtgatccctttaatagggacatttagtcactctcctgcttattacttggacgacttctttcatttcagttatctgcttggccactttaggactgttgggtttataaccctgagttacatgtttcactaaaaaagctggtgaagtacaactgtactggaatctaagagacatttcctgcatggattctcattttcaaaaagtcctcaaaaatatccctgcagtaaataatcagtaagtttaatttcttataaaatttctcaatgtagcctgaaagtacaatgtcacagcactgttaagtgacccagaatggctacatagtttgtttttttttaagaaattaaaggagctgtgcacagtggcacataattgtaatcccagctagttggccagctgagacacgaggatcactggagcacaggagtttgaggccagcctgggcaacatggcaagacctccttctcaacaacaacaaaaaagaaattaaaagggagatcattgttattagttatctgaaggcaatatggtaattagacttaagggcttgtttttatagaggacaggtcatactaatttctaaatgtctggtttactgaaatttagactgtcatataagtacagtaccagatttatgcaaaaggatcttctatgctaaaattttacaagaagttccaaaccagcaattaggtagcaaagattctatgctaaaggaaatgattatatatggggtggattctcaaaatagtatcttttatgttttctttttttgagacaggtttctctctgtcacccaggctcgagtacaaggcgcaatcatgcctcactgcagcctcgtcctcccaggctcaagaaatcctctcacttctcagcctcctgagtagctgggactacaggcatgtgccaccacacccagctaacttttctattttttgtagagatggggtttcaccatgttgcccaggctggtctccaactcctgggctcaagtgatgcgcccaccttgggctcccaaagtgctgggattacaggccagtgcatctggccgtat

SEQ ID NO: 55660 - DNA, 2170 bp, Homo sapiens
tgtctgattttttatagccactcaagtgtaattatttaagtaactttgatatctctgacattgaaaaaggaaatatctatttgttatttataggcatttatattccagattattgtgctgtttactttctagtagaatatagaatgcaccatgcatttctgactctctttgtccaagcacttcatggtgccttcatccttcatctaacgatgatgctttctagttatcacagcaagttatctacttcctatttaagtgactgtcatactaagccatggaaaaagtagaagacatgcattatcaaagctgagtacagggcagttccagttcctaatctgacaccctaattttatgattaatagtcttgtgctccctccactggcctgaattgctttaggtgtttgattctgtagcctgactgaaggtgaaatttaataatcatcaggttcagcctagatgtgtgaagatgactaatttagggctgttactactgagaaacaggacctaaaattttcttgacttgaactcagccctttgaggtaagtaaagctttgactagagcactgaatgtactggataattccggggagccattccaggatgcattttttaaaaatgctcttaatattttgatctatagtataacttcttttgggacagaatgcattgtatcaaaaagaaaggaaagacaattagaggttgagtctatcagtggctcggaattatacataagcaaatcactgggacgtgtagactattttttctgcaagtccacagtttccttcagtggggaccaccccagattgctcaaaatttagagataaatgagaatagaggatagatgctatccagttttaattggtattgctatgactgtttaaatagtatgcttccataattttattcttttaagaaagtcagctaatggatgtcttcttccacttaatttttttctcttgtgtgtagcaccatttactgatacaagtatatattcattgttagtaatatgtggcaaggagagaagggaactggacagtttcttcaatgtgaggaaaatttttattttaatttatcaaactccccctttctgtacttaggactgaattattttatcagatctctgccccctgccccgtgccacctggcaccctgtgatttcatggcattcccagcagtagcatctgttgtcagtctagcgctttttcgtgacattttccatgtgtcctggtttgatgccatgaaagatgggatagcatagattatttgttgggacatacataagtattggttgggacatggaatgtcagtcccactgctggccagaagtggagtgaggcccctgcacacttgtgagggtctgcacttcttccccctagtatgtcacagccttaacaggtatgtctatgtggcagatgctggttattcaacattcattcagcagtgactgtgtgaagattaatcctatgtgggtcatgacctctggatgctgaaaggaaggtagggctacagagaaaaaaacatttctccatgatttcattacagatcgccataaacgcttagcacaactgcaaccgtcttccaagaggaatcctcactaccagaccttggagcgggatcttattgaattacaggagcagcagctgtttgaactttttgtggtggtgtctctacagaagaaaccatcaggaataagctatattccccaggtcatacaacaattccctggcaaggtaggcacaaggaggccaagaggcattcaggaatgttcctgtgtctctgtgtacatgtatttcctgtcctcttggtttttgttatctcaacaagtttttaccaatactgttcttgtggtaggatctggtggctttgaaaacatcttatgttaggtatgagctgcaacccagcaaaacaaagcaaaacaaaacaagctcattttcctagttagttttttaaatttttggctctgccatttaataatctttaacaagttacaaaaccttagttttctcatccttaaggaggggaataataaatgtgacagaatagggtagtggtttagagcatggactctgtgtgaaagctctgcatttcccacttactagttccgtgactttaagcagttacttttctttttctttcttttttttttttagatggagtcttgctctgttgc

SEQ ID NO: 55661 - DNA, 1051 bp, Homo sapiens
gaggcaccatagaagaggtaggctgacttggtaatatctctctcctagttctcatgttttcctgttattctaaatttatagtctggttggtgtttagattcttgtttagccctgttggtgtttgcctttgatactctatttggaatatacaaacaactatgtggatatagaaatagaatccactctgaactagactcttaaaactggtctgaaatgcaattagtttctagaattagggatgagaggggagccgaggagtgaagtagggtatgggaagaagatgtagtagaggagtttcctctttgagctttttactctcttttggtaactatcccaacttgatacaaccaagtggtttggagaaaggctcagcagctttattattccttactccaagtccccaggtttgtgggtttacattgttctcatcctcatgtacttcctactgttggacaatacaaatggaaactccttctctcttttcaggtgaaaccagtgggaacgaaagtgatgccgagtatctgccaaagagtgagtgagtcaatggggctgctcccgttgttgtgatgatcatgggttaggtggagtggcacctacctttgtgactaagcatgttttttcccacatgaagttccattttgtagatgatttccttattttcagagcctgttgaggtttggagaattaaacagtcagaattaaacactgtcagatgtttgacagcatttaaagtctcccatagtggagtgaggcaaaacagtatggttcttatgatggaatattcttaggggagcggcagagagctgcatgtccagacatatatgcagtagtttcctggcagccaaaacagagtgtgtgaatcatcctctgagcagtaaatatctgattttttttttttttttttgagacggagtctccctctgtcactcaggctggagtgcagtggcgcaagctcggctcactgcaacctctgcctcccgggttcaggcaattctcctgcctcagcctcctgagtagctgggattataggcatgtgccaccacgccaagct

SEQ ID NO: 55662 - DNA, 1232 bp, Homo sapiens
gaaacctgagaaacttctttacaaatggtgagaaagaaattatgttatcttcatttgaaatgattttaaattaaatataggataaatacatttctggaatagctttgactttgtatgataatacaggcattaactagatgatgctggccaggtgcagtggctcacacctgtaatcccagaactttgggaggctgaggtgggaggattgcttgagcccaggagtttgagactagcctgggcaacctggcaaaaccccatctctaccaaaaaaaagaaaaaattagccggatgtggtgacacgtgcctgtagtcccagctgctcaaggggctgaggtggggggatcacttgagctcaggagatcaaggctgcaatgagccatgatcgtgccactgcattccagcctgggcgacagagcaagaccccatctcaaacaaacaaacaagcaacaacagcaaaactaggtgatcttaccagtacatcttctcctgttttagctccctccaaaacctcagttccttcaccggaagactatggaagtaaagaactcacaggcttatttgcggtcaaagcttacaaaagatacaactttgccggtcactttaacggaatggaagcttttccgagctggtgaagttgcaaacacgaaaaggaaaaatcttccaagggtaaagactccagtgctttcattctttgactcttacttcagcatttccatgaatgagaataagtaaactttagaccgaaatgaataataggttagaactgacctactgggattagaagacttagaaggcagcgttatgttttaaatttttgctcatgctagagaagtgcatgaatggcttttgccagagtttcgttgtggatttttaaattgatttagatggggacttcacttcagttaccttagctctcattaaaatcgtctgcctatttcaaggaagcaccagaatcttatataaaagggcgttctctcaggatggcttcagtgttgttctaattcactcattcatatgattgccaaagtgagttcagttttgtgcttgagtttacagattttcagtaatgaaaaagtatatgccatttatttggggcaaaaatttccaaagaaaaaaacaaatctattacttgggaatggaaattatcagcaatcataataaataaatgacttctccctcaagggagaaaaggcagtaagtctgtacatcatctctactagaagcattgcaac

SEQ ID NO: 55663 - DNA, 1777 bp, Homo sapiens
tggtgtgcacctgtagtcccagctatatgggatgctgaggcagaagaaacgcttgaacctgggaggctgagcttgcagtgagctgagatcgtgacactgcacttcagcctggctgacagagcaagactcagtctcaaaaaaaaaaaaaaagaaaaaaagaaaattaatctataggagctgggtgtggtggctcagtcccagcactttgggtggctggggcaggaggatcacttgaggccaggagttcaagaccagccaaacactagacagggcaacatagtgagaccctgtctctataaaaaaaaagaaaaaagaaaaaattagccaggtgtagtgatgtgttcctgtcgtcctacctacttgcgagtattacttgagcccaaaagctcaggctacagtgagccatgatcacttcactgcactccagcctgggcagcagaatgagaccctgcctctaaaataacataaaataaaaattaaattcaaaaaaatctgtagggaagcagtaacattcttccacttcatttagggcatgctggcctcagccccacttttccttacaaagtgagcttaataaaggaacccaatgaagaacatgaatgtgattggctacaagcatccaattttctcatggtgttcgtaaggcacagcctacttcattattcttagatctctgataaaacacctttgtaattttgcacactagttctgtacttatttatttctgtctcccataccaatttaaagaagattagaattttctgtaatcctagcactttgggaggccgaggcaggcagatcacctgaagtcaggagttcaagaccagcctggcggtcatggtgaaacctcatctctactaaaacacaaaaaagagctgagcatggtggcacgcgcctctaatcccaggtgcaacatccctacagcaatgtagaatcgcttgaacctgggaggcagaggtttcagtgagccaagactgtgccactgaactctagcctatgcaacagactgagattctgtctcaaaaaataataataaaacaaacaatcaaacaaataaataaataaaaattttaaaaaataaagattagagttttgaaagatataactttaaaatatatctccttttttaaggaaatcctttgaatttgaggatattcagcactttcgaaatcggaactcacagacgattcgtgaagaacttggaagaaattctgggtcagcactttattacacacagtctgaggacaatatctatgaagatatcatatgtaggtgttgacaactttgcagttaaatttagtgattatatatttggtgaagcccttaattgtaggatggtattttcttctataatcaagcatatattgctctaggtttttctctttagcatggaaacgtttggtgtataaattattttattctctaatgaattttacaactaatgtgatagactgctcagcttataagtacatgtttataatatattattttgagaattcttttagctctgttgaacccataagcttaaattgctgttgatctggaaacccacatccctacagcaatgtagaataagaaagctgaacatagttagctttttctttcttttgccagctgtggttatctttgcatttaattatgttcatgtaaacatttttttaaattattttttaagatcccaccaaagaaaatccatatgaagatattccagtgcagcctttacctatgtggagatccccttcagcatggaagctaccacccgctaaaagtgctttta

SEQ ID NO: 55664 - DNA, 1056 bp, Homo sapiens
aggttgcagtgagccaagatcaccaccactgcactccagacttagtgacagagcgagactctgtctcaaaaaaaaaaaaaaaaaagaattaatttattacaaaaatattgtatactgctatgtataatctcttctaaaacctcattctacctaactttaggaaattaaatatggcagaacattaaagctgacaatctgaaaaataccacaaataatgttttgttagtattattatctcaccatcttaggagtgcctttatgtagttgaattacttaatagattacaggtatgtttttacatatgcaatgtatatgaattatgtagggataggtgggcaatgttttagtggagttttaaattaggaaattataaaatgtgttaacatatttttgtgtcattttaacaggattattcaagatcaggttgtagccattttcaacaaggatcactgatcaaaattttctttttacaaagagatttacaagttaaacatgaagggaaaatactggaatcatttggattctgacaggataaagaatacaatatttcacatttacttgtaatggaacctttgtaagattcatcacttgtcattcacccagttgggaacatggatgttggtttttctcgtactactgttcagacactgtcaagaagccactgcaaaaacatcaaacaaaaaatttctcaatgggaaggaagggctaatggtatatctaatccagaaaagtggtgtccaaaggactttggagtgagatataactgtcaccaagagatccgtcttaagaaaaatcctatagctgagagaaagagcaaaaacttggatgtaaccagccgtgaaaatgtgggtctagatataaatgaaaataccaaaagccatgatcaaagtgagaatgaaaataagaaacatgaatatgacgatacacacttctttaaaaatgaatcagaatccaactgggtatgttctcgggtcaaagaaattgaaagctgtaaagaagatgtcttagatccagagacttcattacctccaggaaacttctatacctcacaaatac

SEQ ID NO: 55665 - DNA, 1119 bp, Homo sapiens
tctagggttaatttcatcctgctggtaaatcatgacctcttgtttctcttctgaattacctgggcattcaatgaggttgctcctctgttgttggactttgaaggtttcccagagctagtgaaccctgggttagcttaaaaatctcccatagtttttctttctccactagttgtttgttgtctagcctcatgtagtattatcctatgcattagcaacttagtattcaaccaaagattcaaggggactctatgtagatttctggagctttttctctatgttgctctcttttctgatactgtgccctgaaaattccatttgcctcagtctccatattccaatcttgttatcctcaactcggtaaggttgccatgtctgtttgggttctccctcctgaccctactttctggagtttccagggagaaagctgggccatcataggacctgcctcattttcctctcttctttcagggatcacaatcttaagctgtctgttatccagtatctgaaagcacttattttatatatttttccagttttatagttattgatgtgggaaaggcaagcctagttcagctactccatcatggccagaagtgaagtttccctggtccctttcataaattttcttttcttttcttttctttttttttttgaacgaatctcgctctgtcgccagactggaatgaagtggcgcgatctcggctcactgaagcctctacctcccgggttcaagcgattctcctgcctcagcctcctgagtagtagctgggatgacaggcgtatgccaccatgcccagctaatttttagtagagatggggtttcactgtgttggccaggatggtctcaatctcttgacctcatgatccgcccgcctcagcctcccaaagtgctgggattacaggcgtgagccaccacgcccagccagttttctttttaattaaggtaaaattcactatttttacagtgtaccccttcattattttgtaaatcaggttttagaatgttccaaattcttccaagttatttttccagatgcttatatctaatcaaataaaatattttaaaagatttggagtgagaaacttgccctatccaagacttgaattggtaaaatagaa

SEQ ID NO: 55666 - DNA, 1072 bp, Homo sapiens
tacctccccttcagtcttatccctgactttcctctttttctaagtgtctccagcaagaatgagtgttaagagtcttgaggtcatggcaaagacatacacaggtatttgctataaggcaaattcagaattgtaaaagtataacaatatgcaaataggtgtaatagaagcacacaaaaggagtgattaactctggggaaagggctaaggaagctttcacggaaaaactttcaactgatcttgaaagtacatggtgtattcagagagaaatttatagtacctgtcatttattgagcagttactgtattccagtcactgtcttaaacattttatttactttatctgatatttaatcctcacaaccttataaaataaatatctgtatctgttgtgccaaaggatgctaagacatgtatttgttacttaacctcttggtgcctcattgccttatctgtaaaatgagattaacagtagtatctacctcatggggttgttacaagaattaggtgagttaatatggttaaagttagtagagctatgcctggctcatattaagtgctcagtaagtattatctgtaaacattgtgatcattctacagataagaaaacaagcttagaagggttaattggactaatgatttacaaccaagaaccaaatctatgttagtgtttgaattctaactcgaacattctaactttggactgctaatagttccagattatttggcattattggaaaatatgtagctggtgagtaaggcaagtggcaagagtcagagcttgaattagagggtgaaagaccttatatgtcatattaaggagtatagactttatcttatctcttgcacaccatgaaatatttacctgcttaattttattagctgggcgcggtggctcacacctgtaatcctagcactttgggaggccgaggcggacggatcacttgagaccaggagtttgagaccagccggcccaacagggtgaaacccgtctctaccaaaaatacaaaaattagctgggcgtggtggcatatgcctgtaatcccagctacttgggaggctaaggtaggagaacc

SEQ ID NO: 55667 - DNA, 1295 bp, Homo sapiens
aagagtgagactctgtctcaaaaaaaaaaaaggataattatgtgaaaagagacattttatttaattatatggacagttaataacattgcattaatataattaaattctaaaagcttaatgttattaaagttagttttacgtgccattttccacactgtggcattttgtagaacttctgctgaaatttctcatttgactgttgtgcctgagtggtctttaaaatttagctacatgtcagctctttttatccaccaggtgggagtcagataccagtccctgtgtctctgtacttccctaagtctggggatatgcctcaagcactttgagtggttgtcttgaggtttcagtccctgtcttgaggtaggcaagaggtatatccctctttccctgtaggaggcagggaaacacaccacctagtttccttaaagaagtcctctctgttgtcccttgtaatcctcacaatttaataaattgtaattcttctcttatacagccttaagggtagtgaactaatgtcagcagagccaatttttggcaacctcactttctaagccttgcacttttcttagaatatgggggtattcgactcctattgttttggttttggcctttgaggccctgctgaaactcggagaacacaggaaaagttgcatttgacatcctgttgcattagtttatattattgttatgtctaccaactaacaagtagtataatatacagtggtttagtgcacaaactttggagtaaagtagaactaggtttgtgttagtttgggtaattaaccagttcagcttcagcttccccattcacaaaataataaaactttctactattgcaggtaatagtaactatctgttagggttgttgtaagaattaaatgaaggccaggcgcggtgactcacgcctgtaatcccagcactttgggaggccaaggcgggtggatcacctgaggtcaggagtttgagaccagcctggccaacatggtgaaaccatgcctctactaaaaatacaaaaattagctgcgcatggtggagggcacctgtaatctcagctactcgggaggctgaggcaggagaattgctggaacctgggaagcagagtttgcagtgagccaagatggcgccattgcattctagccctggtgacaacagtgagactgtctcaaaaaaaaaaagagttaaaagtagtaatgaaagtagatacatagcatggtgcctggcaaatgtaaacacttaataagtaataattatttaaaatatatgctatacaggtcaggcgtagtggctcacatctg

SEQ ID NO: 55668 - DNA, 1132 bp, Homo sapiens
ctttccggtcccattggaggcccatgctctctctccttctttaggtctttgctttatacccttgtttcttttcttctctcctctttagcgactccttcccactggtgtttgaacaagattaaacttgtataagaaacaagtttagaaagatttcctggacttcacgttcctgtccagctccactctattgtctattcgtctatttggataaactccttgaatggattgtctacagttgatatttgcattcttttttctcatccaattctcaattcacttattttccttcagcctccatgccactgaacctgctcttgtccaagtcctaatgaccaacagacactgcagtttttatcttacttgaccttttgacaatgtatctgtcaattgttgaccactctttccttcttgatagagtctcttcctttggcttccatgattccacacattgatagtacttctaccatcttttgtctactttcgtgacttaaactgccatctgtgatacatgaggacttacctaaaatgtctgagaactgacttacgcttgattaccaatgttttggagtttataaagctcaattctaacagaacatgatgatgtataaaaataatcttaaaaaataaaatatgatggtacagtaataaagtaaaaataaatatggtacgataagaaacaaacaaacaaacaaaagaaaaaaatgagtttgaaaagttgacatggaaaccacagtgagatgctactacataccagaatggctaaaattaaaaagactaacaattccagtatgactgaggagtgactgcaacctcatatattgctggtgagagtgtaaattagtacagcctctttggaaaactctggcagtgtccacttaagttaaacatatgcctacttggccaggtgcggtggctcaggcctgtaatcccagcactttgggaggccaaggtgggcagatcacctgaggtcaggagttcgagaccagcctggccaacatggggaaaccccatccctactaaaatacaaaagttagccaggtgtggtggcatgcacctgtagtcccagctactcaggaggctgaggcaggagaattgcttgaacccaggaggtggaggttgcagtgagccaaga

SEQ ID NO: 55669 - DNA, 2182 bp, Homo sapiens
gacccgagtgatacccgggagactagcttggccacaggagacaacgttgaggtacagacaggtaagagtcggggtgattcggcgcggggttttaagccgcaggggcttcggactctcggggctgtcggcatcacccttctgggcgtcgggtgcggggctgtggcgccgcggcgtagtcctcggacggtgcgagccgagctggcggaggtggtgtctccgcgccccgctgtctcggcacctcctccgtccggaggagcaaccggttgttgggcccagctttgggacgtcctctcgtggccgcacgggttgtggcggagcctggctgaagacctcctcgctacctcaggggcttggggacccctaggctgggcgccgctctctgctggggaagagggagggagcgcccggcagcctggggaaacgcgggctttctccaaaattagccagtgagcttgaacttcgacatgctgggacgatgcacttccaaacaatattttgctttttttggtgttttgattcttaacagcatctaatacgcacaataccgaaagttgtcaagtagaattttaatttaaaagtctgacagtggaacacctaagagcttttgagtaactagagctgtatagcagctgatgattagattatgagtcaaaaggctcaagtctagggccagaacccgcggaaccagatgtgatacctcggccaaattaacttcctgggcctctctttccgtaactgtgaaactggcaagttcatgcctatgggtattctcagggtcaaatcagatgagtgacagtattctacaaatgtcagatatttgaacgtgcgtgtggagcgtgtatattctgtgaagcaactactacttgcctggtacatagtaggcactttacaaacgtttaccctaaagctagtgattcttctgcagtgttttagataaagtgatagatccttgcttactgtgtaaataagttgtttaaacttttcccacaaagtgacccccattgtttgagtgtgtcctatttttaaatgattgatgaaattttctagaatagcacagtggtgttatctatacactgttgctgaatcatttaccgcgaagtctgtagcaatcaaataatctacttctttgtcttagctaaatagttgtagtttaagatacctgctaaagtaagctgggaatattgttccaaatcaagactttaatttgtttttgtgaattgacgggctgcttataggaagatttaaatcttccaaaatattgttaatatatagccatattttttcatacagcctttattatagacgtttttgttctttactatggatatgtgtgcgagggattttagcggggagatgggaaataaaaaagaaaatggcagttttgtaacctgtaggcttttgctggggatacttgtaggcctgttctgagtttgccaggcagaaaccaggaaatgtagtaattatgtgtcttggtctttcattagttggggtgtgtgtgtgtgtgtgtgtgtgtgtgtgtgtgttgaatgtggcagtacgttttttaaatgcagcaataaaggaagaatatttatttttcttaatgacaataagcagttttctaaagctggaaattatattacttttaaatggtctgtagtgagtcttaagttataggcaagaattttagaccactggataccaagatcaaattaaatgaagtagtagagggaaagttactagtgaatgtaatttttgtgtgtgttgctttagaagttttacttaaacatgtttcagcaattcagtggaggatgggtcttttgaagctactttaaaacatgagttttaaacgtactccatgtataaatttttctgtgatttacaatttcttgatcttggaggtctgaaaccttacattcacattgttttttgagggcctactacacaataggcacaagattatatttatgtaagagcagtatgtaattcctgtcatctaggagattccattctaccaagtgggctaaaataagtactgaaaaaacaaaagctgtttttaaagcggatggtaacaataacaacatcagctatcattcattggtacctagtctgtgccaggcagtattctaaattctttacatgtattagcttacttaatcctcacaacagcaccatgagggatgttattatgattatctcatta

SEQ ID NO: 55670 - DNA, 1005 bp, Homo sapiens
atgttgatattggtaaatttcctattgagactgaacgtatttccatccaggcaatcaacactttatttgcttccttacccccatatcctctgctgcctctttttggaaactttgtatttagcaagaattaagattatgatttgggactgttttgctgaatcctttggatggcttacttccttccagagtgttcacttttctactgaattttcttgtgaatcactccatacccagaacctgcgattccaatagcagttctatttccccagggaacgaggcatgaatacgtttctgttccgacctcactgtggagaagctggagccctcacccatctcatgacagcattcatgatagcagatgatatctctcatggcctaaatttaaaaaaggtgagttggaagctctcttcttaacttttacattggagctagaggaatcttttttcccttaaccaaccatactgtcacaagtcattatcgacactgcaatcataatcaagtagagcataaaagattttttagtttagtgcagttcattctacagaaagaagtaaagggacttgctcaagattaccttgctagttgctgtcagataaaagttaacgcagatctcctgacttctagcttagaatcctgacaagggataattcagagatggcctggctttccttaagctagtttttgccagatttcttgttatagcatgcttcaagatgtttttttgtgagagtcagaactttcttgtagagagagagagaaaaaataatgtttcaaggcaaagtcttttgcctgagacagaccatctaacgtaggccattatagatcaaataaacaatctggtttgactcaatgtttctgaaaattaatgtatcctaagtacatttattctaaatagcatttacattgaaaaactcctaaattctccttactaagagacttgaagaacaagtgataattttgttgaaagctgaagcttaaggcagaccatgagattgtagtgtttct

SEQ ID NO: 55671 - DNA, 1652 bp, Homo sapiens
ctgcactccagcctgggtgacaagagagacttgtctccaaaaaaaaagttacacctaggtgtgaattttggcacaaaggagtgacaaacttatagttaaaagctgaataacttcagtgtggtataaaacgtggtttttaggctatgtttgtgattgctgaaaagaattctagtttacctcaaaatccttctctttccccaaattaagtgcctggccagctgtcataaattacatattccttttggtttttttaaaggttacatgttcaagagtgaaaataagatgttctgtctgaaggctaccatgccggatctgtaaatgaacctgttaaatgctgtatttgctccaacggcttactatagaatgttacttaatacaatatcatacttattacaatttttactataggagtgtaataggtaaaattaatctctattttagtgggcccatgtttagtctttcaccatcctttaaactgctgtgaatttttttgtcatgacttgaaagcaaggatagagaaacactttagagatatgtggggtttttttaccattccagagcttgtgagcataatcatatttgctttatatttatagtcatgaactcctaagttggcagctacaaccaagaaccaaaaaatggtgcgttctgcttcttgtaattcatctctgctaataaattataagaagcaaggaaaattagggaaaatattttatttggatggtttctataaacaagggactataattcttgtacattatttttcatctttgctgtttctttgagcagtctaatgtgccacacaattatctaaggtatttgttttctataagaattgttttaaaagtattcttgttaccagagtagttgtattatatttcaaaacgtaagatgatttttaaaagcctgagtactgacctaagatggaattgtatgaactctgctctggagggaggggaggatgtccgtggaagttgtaagacttttatttttttgtgccatcaaatataggtaaaaataattgtgcaattctgctgtttaaacaggaactattggcctccttggccctaaatggaagggccgatattttaagttgattattttattgtaaattaatccaacctagttctttttaatttggttgaatgttttttcttgttaaatgatgtttaaaaaataaaaactggaagttcttggcttagtcataattcttatattcactgaagtgcctttatagaatgctaatattaatttcaaacttttggatgtgacatttggaagtgttggaatatctgagttcctcatttcatcataacatcaaatatatcaaagcctgctttaaagtattaccttggggatgattcatagctatttgtcagatttgcatacattaagatgccattggagctcttttgtctcgtttttgcattactgcacaatctagccatcttggtataggtggaggagcattgatgctaggggctggagaacttgaggcccgatataattttactacgccggcccagtttcttcaattgcaaaatagaagagttgaattaggatatatcagatttcccaaccttaaggagactttaaaaagaataatatcaaacctaggcattttcaactaacactggaatactaattttgga

SEQ ID NO: 55672 - DNA, 3364 bp, Homo sapiens
tatattttttggggggggttgggggggatggagtctcactctgtcgcccaggctagagtgtagtggcgtgatcttggctcactgcaatcttcgcctcccaggttcaagcgattctcctgcctcagcttcccgagtagctgggactataggcgcctgccaccacacctggctaatttttgtatttttagtagagatggggtttcaccatattggccaggctggtcttcaactcctgaccttgtgatctgcccacctcaacctcccaaagtgctgggaatacaggcatgagccactgcacccagcctaatctttgtatttttttgtagagaccgggttttgccatgttgcccaggctaatctcaaactcctgggttcaagcagtctgccctcctcagcctcccaaagtgctgagattgcaggcatgagccactgtacccagcctaatcttgtttttcttatgttctgataatatattcccgtttttagggagcagattaagcgagtaaaagactcggatgatgtacctatggtgctagtgggaaacaagtgtgatttgccaacaaggacagttgatacaaaacaagcccacgaactggccaagagttacgggattccattcattgaaacctcagccaagaccagacaggtatggtacagctttcagcatttgtgcaagagtttgcatcagttgattaactctggtagagatgtgatccatattcatattctttgttgttatgcatttttttcatttttatttttttattttttatttttttttaggcagagtctcactctatcttctaagctggagtgcagtggtgtgatctcagctcactgcagcctctgtctcttgggttcaagtgattctcctgcctcagcctcccaagtagctgggactacgggcacatcatcatgcccggctaatttttgtacttttagtagagacagggttttaccatgttgcccaggctggtctcgaactcctggcctcaagcaatcctcccacctgggcctcccagagtgctgggattacaggtgtgagccaccacgcccagcctgttgttaggcatttttagtagtgttctttttcttaacgcttgtttaaacccaaaatgaacttactaatattctgttatggcatgtttactcctgcattaacatccacaaatatttcttgggaagatccttgactaaaaatatttataaacattagttatttctctgtcaacaccagcccgtttatggcttaagcctcctgaatggagtctttagtttaatgtagttttgttccgtgtttctcacattacccttttcctttgcatgaatgtttatttggcaaaatgtgccatttttatatcagcctgttcttgtgattcaataggaatgtgaaatttagtgttctcttccttaaatcaccatattttattttatcagctattcgtttagtaattggaatcttatgtccacataaagagatacaaatgcaagagagcttataatttggattgtgtccgttgagctagctctctcattttttttcattttttccttttatagggtgttgaagatgctttttacacactggtaagagaaatacgccagtaccgaatgaaaaaactcaacagcagtgatgatgggactcagggttgtatgggattgccatgtgtggtgatgtaacaaggtgagcatatggtttcttggcataattacaaatcttagtatatagtattgggcaatttggaggagtgctggtgttattgtctatatgttttttgagtttctgcctatcctcttctgcacattttccatatgacaccctttctgaaagtactgaggtctaaagtgtttaaaacatttgattattccacaggtatctttatatttttggtaacattagaaattataagacattatttatgaaatgtaggcataccctattcctggcaatgaccaggaatttgaaggatcactactttgaaactagttaataaggacatggtttctgttctttttttacagatacttttaaagttttgtcagaaaagagccactttcaaggtaggacaagtttggaaatgtattctcattcctgttaattttgtatatttgtttttcttatactctgaatgtgtcacttatacaaattctgtttctatttcagctgcactgacaccctggtcctgacttccctggaggagaagtattcctgttgctgtcttcagtctcacagagaagctcctgctacttccccagctctcagtagtttagtacaataatctctatttgagaagttctcagaataactacctcctcacttggctgtctgaccagagaatgcacctcttgttactccctgttatttttctgccctgggttcttccacagcacaaacacacctctgccaccccaggtttttcatctgaaaagcagttcatgtctgaaacagagaaccaaaccgcaaacgtgaaattctattgaaaacagtgtcttgagctctaaagtagcaactgctggtgattttttttttctttttactgttgaacttagaactatgctaatttttggagaaatgtcataaattactgttttgccaagaatatagttattattgctgtttggtttgtttataatgttatcggctctattctctaaactggcatctgctctagattcataaatacaaaaatgaatactgaattttgagtctatcctagtcttcacaactttgacgtaattaaatccaactttcacagtgaagtgcctttttcctagaagtggtttgtagacttcctttataatatttcagtggaatagatgtctcaaaaatccttatgcatgaaatgaatgtctgagatacgtctgtgacttatctaccattgaaggaaagctatatctatttgagagcagatgccattttgtacatgtatgaaattggttttccagaggcctgttttggggctttcccaggagaaagatgaaactgaaagcacatgaataatttcacttaataatttttacctaatctccacttttttcataggttactacctatacaatgtatgtaatttgtttcccctagcttactgataaacctaatattcaatgaacttccatttgtattcaaatttgtgtcataccagaaagctctacatttgcagatgttcaaatattgtaaaactttggtgcattgttatttaatagctgtgatcagtgattttcaaacctcaaatatagtatattaacaaattacattttcactgtatatcatggtatcttaatgatgtatataattgccttcaatccccttctcaccccaccctctacagcttcccccacagcaataggggcttgattatttcag

SEQ ID NO: 55673 - DNA, 1033 bp, Homo sapiens
gtatttgtatatttagtcataaacacaaatgatgtatatagggccaggttataattggtggaggtatgtttagatttctttaagtaaaataaacagcacaaataaaacagtccagttcatagcttagtgaaatacactgggtacttaatctgtagcctcctggctgcagtagagttgtcatttgagttactgtgttttcttaatcttttccaggaacacagtgaccatatttcttttctgcaggcatatagaatttggtgggttttcttttatgtagggtgatattggatactttttgtttgtgattatatattagcaatttgagggacaaaccagataggcagaaatgggcttgaatagttagatgcttatttaaccttggcaatagcattgcattccctgtggtttttaataaaaattgaacttccctccctccctgcccccttaccctccacacccccaggattcttacagaaaacaagtggttatagatggtgaaacctgtttgttggacatactggatacagctggacaagaagagtacagtgccatgagagaccaatacatgaggacaggcgaaggcttcctctgtgtatttgccatcaataatagcaagtcatttgcggatattaacctctacaggtactaggagcattattttctctgaaaggatgatctttgtgttctgaatctttatggggaaatgaggttaccacactagggaagatagagctttttaattatgggaagagttggttttaggttgtttgacattgagaatctagggtaattactgaaagttaatactggaatttattttacataatatactgttactataaagtttgataatacataagtgaagcttgctactgggaatgacttggaaccagagttgttgtaattagagatcacgaaggaatttcagagaggaaaacatctccaagaaacatctttcagtatgtaatggaaaagataggccaggcacagtggctcacacctggaatgtcagtgctttgggaggccaaggcgg

SEQ ID NO: 55674 - DNA, 2213 bp, Homo sapiens
aaatatagactgttatcttgttggccctatgaaattctgcacttttcattatatactctaccttcattaattacttctggcaagatgttctgccttagcactcagttgcattcttttcctttttcttcctgttcattatgctttaattctgaggaccatatgagggtagaatatattatcttttaaaaattacaaaaatttgtataggcaaaccatttcttaaagttgatggccaaattttaaaatgttatttttcatatcatttataatcttgtcacaatccacttaaagaagtttggttatatttcagtgaaaattttcttccagagtaggttttttttcgtgggttggggggtaactttactacaattagtaagtatggtgcagaatttcatgcaaatgaggagtgccagcagtgtgataatttaaacatatttaaacaaaaacaaaaaaaatgaatgcacaaacttgctgctgcttagatcactgcagcttctaggacccggtttcttttactgatttaaaaacaaaacaaaaaaaaataaaaaagttgtgcctgaaatgaatcttgtttttttttataagtagccgcctggttactgtgtcctgtaaaatacagacacttgacccttggtgtagcttctgttcaactttatatcacgggaatggatgggtctgatttcttggccctcttcttgaattggccatatacagggtccctggccagtggactgaaggctttgtctaagatgacaagggtcagctcaggggatgtgggggagggcggttttatcttcccccttgtcgtttgaggttttgatctctgggtaaagaggccgtttatctttgtaaacacgaaacatttttgctttctccagttttctgttaatggcgaaagaatggaagcgaataaagttttactgatttttgagacactagcacctagcgctttcattattgaaacgtcccgtgtgggaggggcgggtctgggtgcggcctgccgcatgactcgtggttcggaggcccacgtggccggggcggggactcaggcgcctggggcgccgactgattacgtagcgggcggggccggaagtgccgctccttggtgggggctgttcatggcggttccggggtctccaacatttttcccggctgtggtcctaaatctgtccaaagcagaggcagtggagcttgaggtaagtttatctcatgcatagtgttcggctttgggctgtggaatgttcaggcgtttcactgatgccagaaatggagcagaatctatcagctggagacaaaggccttgggcgggggtccttccatttggtgcctacgtggggagatctttggagacagaagggagaatgggaaggagttgcggcctggaggcttcctgctagagctgagaagccttcggggagtaataggaagggggatttccattgcttaggctgagggcggggcccaaggactgttgaaaaatagctaaggatgggggttgctagaaaactactccagaagtgtgaggccgatattaatccggtgtttttgcgttctctagtcactttaagaaccaaatggaaggtcacactagggttttcatttccattgattatagaaagctttaaagtactgtagatgtggctcgccaattaaccctgattactggtttccaacaggttcttgctggtgtgaaatgactgagtacaaactggtggtggttggagcaggtggtgttgggaaaagcgcactgacaatccagctaatccagaaccactttgtagatgaatatgatcccaccatagaggtgaggcccagtggtagcccgctgacctgatcctgtctctcacttgtcggatcatctttacccatattctgtattaaaggaataagaggagagaaagtaaaaagttattttgggtatacattcagttatgcaataagcttaacgtgtttatagagaacagttcatttttattagctgctgaagtttctaaaacctgtccagtttttaacagttctgtaaactattgcaaactcagtgttgagttcattcatgagtttcttcatatataacagctctattacatgagaaacacaggccatagtagcgagactgtctgattgtatgggagataataggatggagataaaggattcagagatgagtgttcttcaatatttatttattagctagttgaagcagctgagaccag

SEQ ID NO: 55675 - DNA, 3506 bp, Homo sapiens
gcctgtagtcccagcgactcaggagctgaggtgggaggatcacccgagcccaggaaatcaaggctgcagtgagccgttgatcgccactgcactccagcctgggtagcagagcgagaccctgtctcaacaataacaatgacaaaaattcttcacttaccctgtaatcatcaagaggatggttagaagcttctgcttcccacctgtttttctcatgttttccactattgttgactgagtacatttgcctggatgctgaaaattgttaggcagctgaattctttggcatagtttttatctgtagcctgcaccgggctccaggcaacttcatactgtagggcagggctcagcatatatggtggccttttcttgtgatcacagccacaaccatttgtttacatattgtttttcgttgctttctcactacaacagcagagttggttagacaggatgacttgcaaacctaaaataatactctccggccctttaggaaaatggtttttggtctctgatctggaaaaaggaacctatgtgagggagccagaattcgaacaaaaaaaaaggaggtggggtgtcaaatttatctaaattgtttttgcctgtgcccgcctagttgtttactggctcattgagtatgggacaaaagtatttttggttggctcatattgtgaacttgggaagaagatagtcctgtgaatattggcaacccatagtgcttaaaatttaggcaatgggattgtaaatgacagtattttttgttttaatttataaatgcagtttaaaattgttcatcagctaataaagtactgatgggagctgtgacattctcatttggttccatggtagtatttaacatttaggatttcatttaagctttaaggtgaaacttctgagtactgaaaatgtaaatatattttaagtaacataacacatttttagcagttatataaacttcctagggtcatcagcagaggactgttgtgaaatactagcttttagactttgtacctgttttacaggcgatatgaaaggtgaggtctatccatttggcatcgttgggatggccaacaaaggggattgcctgcagaaaggggagagcgtcaagttccaattgtgtgtcctgggccaaaatgcacaaactatggcttacaacatcacacccctgcgcagggccacagtggaatgtgtgaaagatcaggtaagtgccagcatctctgtatctgaatttgatccttctatgagttggtaaccaaaaccttcaaatattttcagccaaggggaaatcatcaacattcattcgtttttttatttctacttcaccttttttcagtcatttgaggtagcttaataaaaacagaaaactacacaaaaagtgactatattagcaatgagaaagtaagattggtattagtaactaatattatgcaatggggaaaataagttaggggtgagatttccagaatagaaggactatatggttttgtacacttttgcttagagcttcttttgcatatcacacaaacacagaaaccacgttcaaaagtacttaaaaaataagcttagggcaaacaaacttagtcttactcctgagatctcagggaaatctgagtcctcagaatgtttttcatcagtacagagaataataacattttgtatggctgctactataacccagcttaattctagaggggatccaaacaatatatatgttgaagtaacagcttcctgatgagtttgcttaattcaaaaagcttagttcataatatacgaaggaacaaggcaagttttatttgtttggttcaagtttgtgatatagtgaatggcactttcagagatacatttcttccctgacaggttttgccacaggcagctggactggagtatcaacattaataccatgttttatacatccttttagataggggcaggcattgtgcttcattcagagtgaggtgtggcatgccctctcttttttacctacttttttttttcagtttggcttcattaactatgaagtaggagatagcaagaagctctttttccatgtgaaagaagttcaggatggcattgagctacaggcaggagatgaggtggagttctcagtgattcttaatcagcgcactggcaagtgcagcgcctgtaatgtttggcgagtctggtgagttttgttgttgtggtttgattagtaactaccctggagtgtctcaactttatagtctctgttttgtcacatcacttttctgtgccttgtcttctgccacttattatttcttgatacttcctacttctagttgaatacaaaaagattgtttagtacatgttttttaaaatttttgccaaattcttcttcttccattaagtcatttctaggttatatgctacttaaaattctaatagtttagccatgctgattcataatgccgctttgcttccccagagacagtctcacagtctgattcggttacccaggcgctatcacgactcactgcagactcaaccccctgggcctaagcaattctcccacgtcagcttccccagtagctgggactacaagcatgcgccaccacatgcagccaattttattttttgtagagacatggtcccactgttttgcccaggctgatctcgaacttctgggctcaagtgttcctcctgccctgtcctctcaaagcgctgggattacaggtgttagctaccacatctgctaccttgtttttttatgcatctgtggaactggtcactcttgattgcattcaagtctagggtctgcaaatgattccttccattcctattaagttgggaccttgagttggggataataatacataaacaaacttgtctgtcctgtctttctagctaggtatatgaggcaagagtcccatcataaaaagtgagtcatttgggcagttaggtggaaaacacactcctttgcaagtgcttgctgtctgcccaccaagtgtggtttcttctcatcttttgacttaattacagtgagggccccaaggctgttgcagctcctcgacctgatcggttggtcaatcgcttgaagaatatcactctggatgatgccagtgctcctcgcctaatggttcttcgtcagccaaggggaccagataactcaatggtatgagggcatacaaggcttgggggaggccaactgatagaccaacataaaatatgtggtcctatttaaacaataggtcaggaaacttaatgaagcagggagacttccatattgcttataactagttaggactttctacacattggttcagccccctaacctaatggttgcttacagtaagaagcacatttcttttcttgatgctttgaagacagtttaggtaatgaatgggtcaggagtgcttactgtggattttctcctctaggaaagaattagtactgcataagatgattaaaaataatgcttttgtagtttcatttcggaatagtgaatgtactatgattgttgtgcgctcaaatcattaactgcagggttttttttttct

SEQ ID NO: 55676 - DNA, 1044 bp, Homo sapiens
acaaagagaataaagtccttgcatcatctaagagtcagcgaacataaagtgctgaatagcaggtcatttgggagaaggaaatgaaccttgataacctattcctttaccacatgggattcttagaatttctgttctacataaaaccactgttctcccacctctaaatatgaatttttaaacaaatgccatgacatcacacccctaaaaaggccatgggagtatggactactaactttaactcataatatgatatcaaattgcccttccatctcctaacgtgctgcttttacttccttttccatccccacttcccagtccactcattcttcagcactggctgtgggatatagtccaaagcaagggttttatttaggcatctctaagcctggtgggatatagtccaaagcaagggttttgtttaggcatctctaagcccgggactagacagattacattttcccacttggtaagaactagctcttttattcaggaacacaactgtaacttatactaagactttgaagttgggcagacctagatctggacaccgttctagcatataatcttggacaaataacttaaatctttgctagctcagtttcttcatctttaaaatggtaataccttcagccttagatggttctataaagtatgaatcagtatgtgcatcataaatggtaattattgatattgcatgaggtcagaccagcttcctctaatcactcttcccatgacttgatctctttggattatctcctcaaagttttttggttcctgtatttaaaattaaaagtcagctggggtcgagagtaggggctcacacctgtaatcccagcactttgggaagccaaggcaggcagatcacctgaaggtcaggagttcgagaccagcctggccaacatggcgaaaccctgtctctcctaaaaatacaaaaattagccaggtatcatggtgggtgcctataatcccagctacttcagaggctgaggcaggagaatcacttgaacctgggaggcggaagttgcagtgagctgaatcatgcca

SEQ ID NO: 55677 - DNA, 1035 bp, Homo sapiens
taaaatactgtatatgatgtttagaaagacaacaatacatgtaataaagatgaatcaggacagtatgtaagtattgtgatttacattttagagaccaggaaaggcttcttaaaaaatgacatatggtcacctggaaaaagtaagagatcaaggcatgttttatttatgaatacttattaattccttaaacaattttatttaaacaattctatttaggaaaagcaggcattttggtagtttagaagtatttaaagtccagcagctgttctaaaaatagaacttggcttcaggttccctaccccatttcaatagcagccagccaacctaccctgttaacatttgtgctgttattttttgcttacttgtctttctatgtagtagagatgaaataaaattgaaagatgtacctgcctttgttttgtagtgaatggcattactgaggaagctgatcccaccatttactctggcaaagtaattcgccccctgaggagtgttgatccaacacagactgagtaccaaggaatgattgagattgtggaggagggtaaggatcatcactatcaggctgtttgaaatttgccataacttcagatgagcacctataaagttttaaaatatggtgcttattgcagttgtttttaggtttaaaactgaattaaggaaaagtgacctctctcatgcttgctttttatttttataccccttgaaaatgaggtcagtctgggtttaaatagtgaaaacgtgactgctttgtgagcacatgactgatacatgagcaactatgagttatattgagatagacttaacaacaaactctgataaccaaagcttttactgttgagtgtatgataatcaaatattcagttccttcattagtatttaaatcagtaagcattcagttctgtatttttgcttcctgtaaaagtttactgtttttttcccccctacactacacatatgtacataatctgtttcttaatagctagagttctatgaggatcctatttctcgtttctagctcaggcttcctttcat

SEQ ID NO: 55678 - DNA, 6092 bp, Homo sapiens
catgttttaagaaggtttaacaatttgttgtgttgggccacattcagagctgtcctaggccatggtttggacaagcttgcaattaaaccagagtcaaaaaggttttgttttggcagaacttcacaaattgttttttaagagtttgtgtctgggagtggcataaaccaaccagattttttcccaaacatgttttatgaactcattttctcagacataatttgcatttagttacgtttgggatcatatcatctacactataactcagtgttgccagtggaactgggtacattgaatgaaaatttaagtttcttgagttttttttaatcctttgcctttgaagaactggttgtatttgacacagtgtatttaactttaaaagtttgtaagtctgaatgtgtgatttttttttttttttttacattttcaaaggcaagatctgttttgctttacggtatggaaaatataacttggctactgtcaggacttggcaaggattaaatgtcaaaatattgtttaggtcatatttaaaacttacagaatcacttctgcagtgagcagatatgtagtatgtaatacaatagcagattgataatttgtgttcattgtttcattaaacatgagtatctaccatgttccaggtactcttgatacagtaagccttacaaagctgataatttagtaagaaggaaaaaaaaaaaagagaaaagattgcatatattttattcttcagatgtaaattttaactctttcctgggcctaaactcatgcaatttttgaggtagagactggagaagtgcctttgtctactttggaattatggtctgtaaattagtgaagtttctggagattatattgtcattagacttgggcttttatgaaatacattgtgttcacgtgtttacgttcacatgtggtaattttttctagtgcatatttgccaggaagtagcaattggagagtcttagaaaattgctcaggttaagttactttgttgaaagcaatgagtttgtacttaagtgagaacagttcaaatgtggatacagtatttgtgtcacatcagagaaaattcctgatgaatttaacttgatggtggttgtaaagttgaatgttgccttcttgacaagtttcacagccagtgaaaatattatttgggtttcagggtgtgattgctgccatgagagatggttttggtttcatcaagtgtgtggatcgtgatgttcgtatgttcttccacttcagtgaaattctggatgggaaccagctccatattgcagatgaagtagagtttactgtggttcctgtgagttgtttctgagaaaagttgggaggtgtttcttgatgctttctttttcaattgaaagttaattttgttttatcatttttaggatatgctctctgctcaaagaaatcatgctattaggattaaaaaacttcccaagggcacggtttcatttcattcccattcagatcaccgttttctgggcacggtagaaaaagaagccactttttccaatcctaaaaccactagcccaaataaaggcaaagagaaggtaggttttgcataatccaaatgatttttgtagctgtttatttctcttctgctttaacagcacatagtaatagagtacatataatcagcggaagtttgtctctttcagaatttctgtcatattaacagtgaactaaacaaagtaaggtttcttaaccttgggattattgacattttgggatgaatgattctttactgtgggggatgggatgtttagcagcatttctggcctctacccactggaagttagtattctgaccccttttccctgcctcccattgtgacagccaaaaatgtgtccagacattgccaaatgtcccctgggaggcaaactcattccaagtagagaactagttatataaaatgatagtactgtcttccaggcaatttaaaactttcaaagttgggtgtatcctcagttcacacatttaaatttcatttattgaaaaatccactaaataggaaatagaaagatgtctgagatgaattctcctttcaagttaataacaaattgagagttttatagaaacaagtaattcatatagaatataaaatattgctattgaaggtcagcgatagtgctctggtgaaaattaactggtagggtatgtgatggttttactaacagatggagacaggaaagagcattcttcacagagtaaaagtatagatgagaaaaattcagggtttctttaggaagcaatgagtaactagtccgacaggaatttttttttttttttttttggttttgtgtgtgggtttttgttggtgagggaggttaggagaaataaggatgaaaaatcaggatccagctagactgggagggtgttgattgctgctctaaagaatttagaccttattgtcaggtgcggtggctcacacctgtaaacccagcactttgggaggctgaggcgggcggatcacgaggtcaggagattgagaccatcctggctaacatggtgaaaccccatctctactaaaaatacaaaaaaattagccgggcatagtagtgggcacctgtaatcccagctactcgggaggctgaggcaggagaatggcgtgaacccaggaggcagagcttttagtgagctgagatggcgccattgcactccatcctgggcgactgagtgagactccgtctccaaaaaaaaaatttagaccttgttctgtacttcaaggaaaagatttcttttggataatgacatcaggtatgtgctttgggagagtaatggcagcaatatgaagcctagatgggatggagaaagacaaaagatgaaaaggattactatgaaattacttggatagttaaggtagtccttgaactaggcacacagatagtgactatagacaagtgaaggtacatgagagatactggaaagtcatgttataatttaataattgctattagccagaaagagcaaggctagtatcttgcttatcacttactgtagcttgggaaattatttcacctctgagcttcagtttttaaatttcaaaaatgattgtgtaatagtttaaaaagccctcgaagtacctagctcataataggaatttcgcatgtgacagatgatactgttaacaaaaataaaaatacacttcagttgggcttatttttaataacttttaattcttggaatgctctgcttcccaaatgtgtctggcaaaactggcttgatgaagagagcctttgtgtgagactttccctgccattttttgtttttttttctttcttagtccaacagtaccctagtaaatcctctgtcatcatgcttcttacagtatataacatttacctgttaatgaatctgtctctgctgcactggactccctcagggcagggattctcctatctctatttaatatatttgatgtatagtatattgtcagctgttgatgttgaagttggtgagttaagagcaaaaggtgaacagtaagcttttgagtttggttgtggaaaagttgatgacattggagtcagacctgagttcactgacattgttcttaaccaaactcaaatcctctggattattttgcgctgggttttgtaaccttggtaaggtttacttaattcctcagatttccccaatttgtaaaatgagggaaaagagaaactatggagatgattttgtacaagattaatttgataatacataatacctggtaatgttgtaagtgttcaataaattattatatagcagttatggaaggaatgtgattggtagaagaggaaaatgaattggttttgaatatatcgtagtttgtaatgaggactggagtttaggaaggaagtcagggctagagtagggacatgggcattatcttcatagaaatgttgaaaccataaaatcagtataatttatgtagttgctgtacactgtcattacttaacggtgtgattcaatacgacacacctgaactttcttagacttttatttttttagtcaagtgcagtagtgagaaggggggaaagaggagaacaaggaagttcgatctgtaactgactgaacaatcgagataacccactaccttcagaccagcccttagattttttaagagttaatcattcttacacgtacgatgactgaaatgttgtttctccttgaagtctggtattaaaaaaaattgttgaaatactagtatgtcataatttttaatcatctactttatgtcaagtacttgaactgtgctagatcatacaccaaattatcctgcattgttaagtatattgattgacattatatattaaatactgtgcaaggtgctgtgtgctactaaaagaggatacttcagcagcttctttaggaaatactaaagcttcttgcccttatagaatttccacttccttggaagtaacatgcccagtttaatttctgattggctatgaggagcgcaggtgtattaaacattttcagtaagcttttttctcctcaatagcaaaaattagattcttaagattgaaagaccaattaaaaattacagcagactgagctaggcttaaggcaagactaccttttattcatatgaataatcttttagaaaatgctggaataagacatttttacagctgtaccaatcctttggcacaagaatatgtaagaactatagttgtttttattggtttttgttcttgagattgttttcattctgtttttgactgtatctctttaggaggctgaggatggcattattgcttatgatgactgtggggtgaaactgactattgcttttcaagccaaggatgtggaaggatctacttctcctcaaataggagataaggcaagataattctgctcattcgagagagggttaagagttgtcatcttaatcataaatcctgcaggatgggttcttcaaattttatcaagttttgctgaaatatattttgtgtttaagagaaatacatgaatatcttgtatttgaaagcagcttattaaaagtgtctgtcaagctctttgttaatcaaagccttgttaatctagctgtttaaacgttagataaaacatgcttaataaaatcgttattggtaagaaagttaaaacagttactactgaaacattatcaaagtaaaagcacaccaaagattttacgttgttgttcattttttctcatacttaatatgtttggtttttggatagccctctagagaaattcagaatctataaggaatacagactgaaagataaaagtttgatcctttgtgaaaagtgggatgagacataaatgttttggtgaaaatcaatttcattgaagtaataacaaaggatatttggaatgaaaagcatgcgctgggggagttataggtcttgttttctgagttaaggagattggtgtggaagtgatatggtgttaatgagcatccttaattttcacaggttgaatttagtattagtgacaaacagaggcctggacagcaggttgcaacttgtgtgcgacttttaggtcgtaattctaactccaagaggctcttgggttatgtggcaactctgaaggataattttggatttattgaaacagccaatcatgataaggaaatctttttccattacaggtaaggcgtgactttcaggaactttacagctaacttaccatccattctttggtgttggaataaaaaacatttagtattgattgattatacttgttgaggttcagatttcatattggtagaattatggcaagatataaactgaagttaatcactgatcttactatatacagagcctgtggccaaaagaaatagaaaggcctgtgccaccttattttttgtgttggtaccatagagttggccatttggtgtataatgtagtgtaagagtaaggggtctgactgggtgtggtggctcatgcctataatcccagcactttgggggctgaggcaggtggatcccttgagcccaggagttcgaggccagcctgagcaacacggtgaaactccatctccacaaaaattaccaaaattagcctgacatggtggtgcatacctgtagtctcaccaactcaggaggctgatgtgggaggaccacttgatcctgggaggcagaggt

SEQ ID NO: 55679 - DNA, 2265 bp, Homo sapiens
atatttcactgttaacctcaaaagtagtctcttaaaattccttggttgctaatacattatcttctttaaaattggctgtttaattgataatattaggttgtaccaaattatattattgtgactacagtataattttacaaaaattactggttttaagttgtaatcataaatttgtacagagtggtaataatgttcttggttttttattttgcttcaggaggcatttggctttattgaaagaggtgatgttgtaaaagagatattctttcactatagtgaatttaagggtgacttagaaaccttacagcctggcgatgatgtggaattcacaatcaaggacagaaatgtaagacagtcagttaacttgatctttggccttttaagatcagagttggtttatgtttttaagaaacacttaaaattatgtgattcttccttcctctgtccccccaccacctccaaccccttctgatttagggtaaagaagttgcaacagatgtcagactattgcctcaaggaacagtcatttttgaagatatcagcattgaacattttgaaggaactgtaaccaaagttatcccaaaagtacccagtaaaaaccaggtaaataatctttttcaggagagtcctatttcgcctcagtagtaatagaataatatggtgtggtatactgagattttatcttattcagttaatataatgtggtagtggaacaactaaggacctcttgttacgtatatttaaactaaaagagaaaccagatttatatattcataaatatggtgtttttttttttttttttctttttttgtgacagagtctcgctctgtcgccaggctggagtgcagtggcgcgatctcggctcactgcaacctccgcctcccgggtttaagcgattctcctgcctcagcctcccaagtagctgggactacaagggcatgccaccacacccagctaatttttgtattcttagtaaagacggggtttcaccctgttggcaaggatggtctcgatctcttgaccttgcgatctgtccaccttggcctcccaaagtgctgggattacaagtatgagccacctcgcccagccaaatatgtatttttttttactgggtgatgaaaaaaggccaaagaagaaaatgctaattaaattggaaagcacctgattggattagactgcagttcaggtgtacatttgttccctcctctgcccctgccctacccctccagtttgtggggaaggtgaggacacaagtggtgtcattcctggaaaaattccttaaataaaatcttttggtaccagagtgctgggtcttaattgcattgttgtaattttatggttgactcgtgtgaccatagaccatgaagctttcacattggacttatgttgtcaacaccttttttcgcttcagggaactaagttaaaaataacatgggtttactatgtgttcttcttgtttgacttagaactaggaaggatgagaaatctccagctaaaatcgtttttccttctcatcagaatgacccattgccaggacgcatcaaagttgactttgtgatccctaaagaacttccctttggagacaaagatacgaaatccaaggtgaccctgctggaaggtgaccatgttaggtttaatatttcaacagaccgacgtgacaaattagagcgagcaaccaatatagaagttctgtcaaatacatttcagttcactaatgaagcccgagaaatggtaagtgttggatattactggatatgtatctaatatgcgaaagccaatgttatattcaagtttatactactaaattaaaatttttcttaagttaaatgaccctaatgggcatttaccttgttaaggtgattaagaatcatacacatttgagtcagtctgggttatctctggcagttatcttggaaatatatgtgaaaaaattttttgaatggaaatctggacaggattactaagatatttttagagtcagtgattctcaggcccttaatatgaagagtaagaaaattcaagttcatcattgtagaaagtagattttcccaaactatttcctaagacatttaattagtggtttctgtttttaggaaacacaattcttcctccagtgtggtccagggaagccaaaagattgaacacccatgatctagacactagatcacacataaaatacactaacagcaatgatagctgatgagcttttttaaaaaaaaaatcataggcacggtggctcacacctgtaatcccagcactttggga

SEQ ID NO: 55680 - DNA, 3016 bp, Homo sapiens
ccagcttgggtgacagggagactctgtctcaaaaaaaaaaaaaaaaaaaaaaaaaaaaagtttttacatgtgaagtgtttggcttactaaaggactgaaattatgaggcctctgtgcatttttaaaaaacgtttgagaaaagagtcagtataatagctaacaagatgcatgctataggaacattgttttggttaatcctcatggcagtcctgttaggaattattctccttttacataagagaaaactgaggtacagaggagtttaaaaaaaaaactcgccaaaggttatgattgttaagtcatctcatttgtagtatgtgtaaatgccataaaaactaagattaagacatggctatcttagcataagatggtggttctgaaacatttgtgtgtatcagaattagtggaaggcttgttaaaacacagattgctatacttgatccccagagtttgtctttggctaggactagagttaggcccagtatttcttttaagctcccaggtgatgttaatgctgctggtccagggaccacactttgaaaaccactggtctaaggcaattcaaatgctatgttaagtatagcttggaagcaatatatcgtttcgcaaaaatcagttcaacaaacataacacattatttatttttagatgatgttgaatttgaagtatcatcggaccgacggactgggaaacccattgctgttaaactggtgaagataaaacaagaaatcctccctgaagaacgaatgaatggacaagttagtgactttgatgctttgtgtttttttagggccctgcatttgcatatctttcacattagaaaaggaagattctccccatctcctcagtttgcacgaaagagagctatagtatataaagattactattttaaaattaatcaaaagcactggcatttcttgacctgaaataaaaatatggtcaagactcaattgggtttttacatataaccctgagtcaatgcttacagtcaatttacatactgtaagtttgaaacttggcagcatgacatcctcttgtggatcatattaaaatgcatccctgtatatagtatagaggatattaaaattcagtttatattgcacagtgctgctcctgaaatgattagcaatggaaatttttttttttttgactggtaggttgtgtgcgctgttcctcacaacttagagagtaaatctccagctgccccgggtcagagtccaacagggagtgtatgctacgaacgtaatggggtaaacttgtgtatttttcttaaacctttgcctgatccaccatgtgatctataagcgtactttaaaattcaaaatagaaaacgtaagctgcaattgttaaaatcagttttaaatttggtttctaagaggcttcaaatgcagcataatcaaaaaatttaaaaagaaaaattccataggacttccaagtgtcttagtttgcccaagtatgaccttagttagaacattaaggtaaaatgttccttttaatcacttttttgggggttgtgggggggatctttttctggtttcttttaagcactaacaccagctttttttgtttggaatgccttatataaaattgtttttttgaaatgtaactatagtctctgggcaaatgcttccacgtgtgtaagctttttgaagttggattgctgctcagctgtggactcgcagaagtcatcagcaccatggaggggaagtgtgtgtttatatgaataaagtgacttgtcataaagcatttaattttaagaaatttggcttaaaatgccagtataagaggtttttaagtaagtaaatcacagtatacagtgaatatgcatcctgccaaaatagtaataatgatttattaattcacaggaagtgttttatctgacttacacccctgaagatgtcgaagggaacgttcagctggaaactggagataaaataaactttgtaattgataacaataaacagtaagttctttttttttaaattttctcacctaagcggtttttttttcccccctccattaagaaatttgaatagagttaaaaacctaacttgtaagtctggatagttttcatgaactttcaattcatcaactaatgctttgaggtctatgaatattgtattacagccatgatgcagggtctcagaggaagatgataattaaaacattgttaggcattttaaggacttgttctagagatcagtgaaggtttttcaaaaaatagtgctttgaggtaagttttgagggaggggtatagtcactatagagaggtgagaaaaaagcattatgattagaagtatcatgacatgttgggggaaaatggccaaaagtttggtcgaactgaccagaaggtaaagtttgagcattcttctatgtaggaatctgcgttgtttaaaacaaggaagtgtgattggtttagatctttggaggtggtggaagtggtagacttttgaaaggtggggatgctgttgaccagaggcagtgatgtgagagttaacgtgaaagatgaccgcctgatatggatagactaagaggatggggtggaggagtcaagtcatattgagaagatagaatcatcaatcttaattgatttgataaaggtggggttggaattaaagggagtcccaaatactgtttttctggcctggcctactgggcagatgatggtaccataaactgggctaaggagacataaggagaatgttcaaggtgggaaaagaatcatacttatcttggcaatttttgagtgtgagatgtttgtgatatatctgggtagagatatcaaatctacagttgcgtgtataggtctgagacttagacctattaagtctaaggtctatttcctgcctataggggaagtatatagagctgtagaattcatcagcatacacagttaaggaaaatgtagttaagaaagcccagggagaatattatttttatcttggcataggagagatgagagatgcaagaggagaaggaaattaaaatagaaagttggagaaagtgctagtaatgt

SEQ ID NO: 55681 - DNA, 2677 bp, Homo sapiens
tcaatagaaatctaatttatatttcgctaaacccaagctaaaaatatatattgactgtgaaatgtgcattaaattgttattgatcatagttatcaacattatgctatgttataacagctgtttgagatggagaacgtttttactgtgtcatcagatcctcatccctctcctgcagcccctccttcactttctttacccttatcttcatcttctacctcatctgggactaaaaaacaaaagaggaccccaacttatcagagatctgtaagtcaggaaagcagtcatctcagcttaccttgctttgtgttaagagcatgacctaggattgccactcattctggttgaaatatcttgccgactcaccttctaacttcccgaatcatttttttcaccttcactcttgaaagataacttcagtagattagggtcttactgcccaaagtatatctaagaatcagaagcattattatcaccttggatcttaataaagatggaaaatttcaaatccccatacctactgagtctgattttatattttaacttctcatttgagaagccctggtttacagccagaccttcttggtttgaatcttctactatttgactttggcaagtcatttaacttctctgtgtctgttttctcattggtaaaatgaggcgaatacaatactttcttgtgggcttttgtgaaagttaaatgagttaatatatgttaaacacagaacagtggctagtgtagaagaattaggacgtaaccacctacaggtgtggtggctttgatttacgtgatttgaccatcacacatatcgttgactcaaactttggtttatctttctagaatttgttactcttttttcctagtgaaaatatatcctttttattaataatgcccaacattccacttaaatggaaatacttataaatcagattttcagtgaaagggtctaaaacataattgtaatgatttagaaatgtcattactgtggtaaattatagacctaggctttgctaaggatttcgtcctgttttgtgcttcacttatagtttttgttgttttactcaaagaagggaaatggaacatccaatgtgatagtattttatgacctaggcagattccattatattgcttttaaatagctcctatttcactaaagaatgggaacgaagtgatagttacagatttcatcagtatgtaaaaagtgaagggtttcttttaggtaaagatttctttaaatgtacctgtgaaatgattcagcatttttaaaatggaaatgcttttgctgtcttggagttttgttgtttcagaagttttctactgcactattttggatagtctttcattaaaggacctaagcatgaattactctgaaattttctagtttaagtattgcatagaaagttcattttattgtgttaatctctactaacttgaaatatgccttccaaatgcatgacttactaaacagtattaaggtattggctgaagtttcaaaatagcgttaccaaatctcttaagagtctttggtagtttgtggtcgctgtctcttaatattaattacctttgttctgaaattgttgttttagtaattttcacttcatgtaaaggcagcatttgctaatgtagttgctataccttaatattaaaccccagaaattctatttttgtctgataagtggaaattctaccataatttggggcaattccccaatataataagttgtttcctctgaaatgttttattagctaaattaatgctgcagtaataaagtctataatcttcccttcattttacttttttttgcgtttttatatggaagatttagtgacttattaaccagacttaatatgctatggagataatgtacagatatgtatatattctttttctttttaaaacagatgagctttgatccaaaccttctccacaacaatggacataatgggtaccctaatggtacttcagcagcactgcgtgaaactggggttattgaaaaactgttaacctcttacggatttattcagtgttcagaacgtcaagctagacttttcttccactgttcacagtataatggcaacctgcaagacttaaaagtaggaggtaatctgtcagttctcctttgtaaaaatgtaatcacaaaatttgtcttgcatatcaatttgttcatgagtgtttttcaaaaagttttatgtaaattaaaacattttggacttttagttgtactgtttagtgaagaatatctgtataaaccagcagaatccttgaaagattatatttgcatatatttacaataaatgcttggaagatttcattgtttttccccataatgatgactgtttacccgtaagattttaagccagtacgaatattgaacttttgtaatgttacttatgattattctgtcaggtactattttgggtagtacctgaaaaaagtaatccttagagtgtcacctcttagaagctgggcgcggtggcttacgcctgtaatcccagcactttgggaggccgaggcgggcagatcacgaggtcaggagatagagaccatcctggctaacacggtgaaaccccgtctctactaaaaatacaaaaaattagctgggcgtggtggcaggcacctgtagtcccagctactcgggaggctgaagcaggagaatggtgtgaacctgggaggcggag

SEQ ID NO: 55682 - DNA, 1020 bp, Homo sapiens
cctaccaccacctttgttagcatctttaattttttataaacaaggttctgttaaattatctacttccatttgtcctatactttcatgtaattgtttttgtgataacttccattttgcttgttttttgatggtgctgattaagaaatatttgcaatgccattaaaatatagtttagccaaattattaggaattctttgaaaagtattaacatgtcacatgtcacatcaacttatctaaagttgtttgagtggtgtgtttccctttggaaaaataaaataaaggcttcctccaaatggataaaggctagggaaagagagctctagtcagcaaagattctgggagaaggggaaggctttttcaactcttttggtatgtgtctagggatgagacggagactcgaacagtagagcccagattccaacattcttgttggggaacaacttagagtcttaaaatgctagctttgatgctttctaattctggttcagtctccctttgggtgagaaaaagaggatttctatctcctacctgcagtgatgtgtggcaggattggagacttgagaatggggatattttgcagctttaaggcatatatatttcagatcatatcattgtgttcttgtttaatagtaatcagaactatagtctaaacatgaggccaagtgcagtggctcacgcctgtaatcccatcactttgggaggccagggcgcagtgcaggggccggatcacttgaggtcaggagttccgagaacagcctggtcaacatggtgaaaccccgtctctactaaaaatacaaaatttggctgggtttggtggcgcacacctgtagtcccagctacttgggagactgaggcagagggatcacttgaacccaggaggcagaggttgcagtgagccaatatcgtaccactgcactccaggctgggtgacagcgagactccatctcaaaaataaattaattcagcctgggtgacagagcaagactgtgtctcaaaaataaattaattaattaaataaac

SEQ ID NO: 55683 - DNA, 1007 bp, Homo sapiens
tgaattcctgaccttgtgatccacccgcctcggcctcccaaagtgctgggattacaggcatgagccaccgtgcctggcaagattagatattaaggctttcatttcattgacatgatttatagaaatagatttaacgaagtcctttttgtttagtgtaatctttgtattctgaatattagtttactacatgaacattttaatatataaatgcatccatagctgtctaaaaattacatgtttacatatgtacaaagaaaccacaattgggatgaagattattggcagtaaaacatggctgtggttgtacagttgtgaaatagttcagttaaagggggcacacagctaagaaaacagatttggtaatgcaatggaacccccagattttaaaggggggttttgtaaaatcagtaaaaatagtacgtaattaggaacaaatatatatagaagggtagaattagccataaaatggcaagaaagaataaggcttataaagcatttgtttgagatgtgaaaatagacctgaattgtttggtgaatgatttgatccaggttagtctaaaggtgacagacaagagaaaagcaaaactagaaaattcctgtcgcgctcctagttttttctgctgaatgcaataattttcatacttgaaacatagcaaagcaagagaaaactgaggccccagatgagtgagaaaataacaggattacttggcggttgctagggtgctagttgctaggtgtgtgatagtagtcaaatagagacctatgacaggaactgtaaatgtcctgatttttcagtcagatgtgggaactattgagcttacttttcatccctagcaaaaaccccagagccagtgaataaataacttggcagactagctcatgatagcataatggtcaatatggagaaatgttggatggatagcagttagtaagagactgattttagagaagtctccaggtgtatgctgccagatgctatcctcgccctgcttttttcagagacctaa

SEQ ID NO: 55684 - DNA, 2964 bp, Homo sapiens
tctcttctatagacatttctcatctatttactgcagcagtgcaaatgagatttctgtttgcttactaagtcatctcctttaggatttcaagacttaataccactttcatcaaaaactaaggcactgtttcctgttacatcacgttgaaatgcttcataatcgggctccgctacacctgtcacactacatatcctatttcacttcagcccagctctctgttctagccaggctagcctgttgattttcctctgaaacaacaagccacacatgttgccacaggcattcatgcagaagacttcacttgatgctgggcttagaaaatcatagaatgcatggtcgctgctctgaagaaagaatttagtggcatattctcgcttgacttatgtgctgtttcatgcctagaatactcagctattttctttctcctagaattctgcctgattttccaggttcacttcaaattccacttatttaaaagccttggttgctttgatggacatgcagttgtggataaacaataaataatatttctagatagtctgtgacataatagatacctagatactaattgagcaaaataatttttggcatttttgtcctatactctgttttttttttccatgtttacatcttgtcttttcagcaagattgtctatgctctcatggcagggacttcttttatgttttccacagagctagatccttataaaatacttgcactaaattaaacattatgccatgtaactgagcttatttgggggaagaggtcaataaagactatggaataatttgaggtcttgggtatgagataccaaaggaggtagttgctagtacttgagagattgctccaaataacatcagatgagcatgcttccaagtttcctgcattacttgcatgacccatgattctaagttaatgaaatgagtttgtccctcttctcacccactgtccctgattattttatgtatgttatacttaatgtcttcattttttacctttagtatgaagtgtaacagaacagactttaccacctgaaactgctgcttcaagttcagatcaggcaaggaacaaacctcgtaacaactaacaagaccaaagaagagtacacttaagttgaagacacaacacttgatctgaaacaagaagtttgtgcctactcaacagctttgaaagagcacttcccaacgctgctagtagtctttgttttcttcagtgctgtactgtgagattgcccggtacagcagcagttgtattctttattagcttggtagatcattttctctcgctcttttttttaatactagcaactttcatcctttgaaacgtgtgctgaaaaagaagaatcagcaaatactactgaaagtgcaatatttgagtatcactgcgaggtaggtttgtaatttcctattaagaatcagttccataattctagatttcctgattatttggtcaaatataaaatctttatttgttcttttctaaaggtattcagaagacagtttttctattctcaactagtatgaaatatcaacactatctcttgttagataaggacagtatttatggtcaaacatttttcataccagattatattaatacatgctgatctctcgacttgctggtctcttagagaagctccgtctgtactatttagaagttaggatttcaaataagaatgtgcattgcagtctttctatgagggtctgtgaaactttggtgatatttgctactgacgtctgtttctttctctctactgtcttcaatgttagcttcttgaggaaagaaccttactttatatccatgcctacatttgcagtgcatatttgtgaacggtatacagtgcacatttgtaaatggttgacatgcctactgtattgttaggcattgctagtgctgaaatataacgaatgaataagatactaatggacttaatgatttagaacaatttgttacacaatatcacaatataggctaaaagatactaataaaatattaagaatataactgaagctgttcccttggaggtaaggaggagggtaaagaaagcctacagaaaagggatatttgaaggtgagtagtaccttgttaagaggtagaagagacattggtagaggtatagaggtaacagaattagcagattcagggctacgtgaaagcacatggtatatattaagttgttcattatgaacagagtagagaatataattttgcgggagagttatgaaagggaagtttgctggaggcttggcccaatgcatttgtctttattccgtaggagagccatcagatgtctataagcaagggcttaagggtttttcccccaaaagtaagatagctttattgcttcacattttaaagtaatattcagaagtgtacctttaaaagacaaatggtgacacttttgagggaaaggctgaggatgggaagacctgtcaaaagcagtggatcaagtataaggaagataaaagctaaggtgtaggtagagaaaaaggtaggtgctaggtgttctgatgatttagaagtgaggacttggggaccaattgaatctgaagataaatgtggagagaatggctttatcaaatccagttgtgcaaactagaaaccttcattgttcataggaatagggaagttagagtagtaacttactgatattaaaatatgttatggaaatctattgtgttcattagatagcaatctgaagttgaaggaaatacactagtatggaatattgaacagtggttaactttgagggtaggcttatgaagagcaattttcctttttaatctttagtttccagattttctaaagttagacataaaggaattcagaaaggagtcatcagtgtataggtaataaaaggaagaagcaccaatgaagagagcaaagacatagaagtcaggaaaaagcaccaacgataatttcaggaagtcaatggtaaacatttttttagatgctacagaggt

SEQ ID NO: 55685 - DNA, 1183 bp, Homo sapiens
ccttgctacaaagctgactctatactaatgaaattcctctaaaacagtagacgtaagaaagaatgcttgcactataagaagaaacgagtgtgaggtccttccggatttttgctgggaaaagataaatcattttttatgactcctgaatatgccatcagaattgttggccttcaaggtttaccccattattgtgggctaaaacgtattcaaacgctcgaagactagagacgcctaaagccacccgccacccctagtgtccaggaggagtcagtaaacaccgagattgcttcccgcagcacacccaagaaggaatgtaatgtaatgcagccaccatgttggttgtggttaagtgcagcaaactgcttggcgtcacttagccctgctgcgcaagcgtgttgagagtacgcttcactccgccccttctcgtgcacgcgcccggagcccgcaactctcgcgagagaagcgagatttattcctacgtaccgggccgtgctgcttatggcggcgctggagagggggcgctgagctgttggggtgagtacgacctcagggtccaactgggggtagcagaaacccaggggaagggctgagaataagaccaaggctaacgagaagccttctgagtcaaggtgggcactcgtagagctctaggtggggaagaatgcaccccgattccctgccctgggctttttcatacgtctcccgttcaactgcctgggcctcatgtcaggtcgcagagctgaaacgaggagttgaggccagccggctgcgcgtggtggtagtggtggtggtgactaaagtggggggagggagcgaaaatggaggctccgacagcagccaagatggaggcagagggtgcggggctcgggcgcggaggctgctgggatctgtagtctggctgcttccccatctgcggcttgtctggggaaacgggaactacatgtcccggcgggcggggcgagggggtggtggcgcggtcctttgtgtgaggttggaagagcctgagaccgagaagaggggcctactttgactctggaccctgtagtttcctggccgttacctgcttgggaatctgactaccagtaccagagcgcagtgcggcagtggcgccttctttgtgtatagactgagaccctgctccatctagatatcttaggggaagtgtttaaagacacctttcccc

SEQ ID NO: 55686 - DNA, 1483 bp, Homo sapiens
catgcttagtctgtctctatttgtccagtatcaagaggatgcatccgatatgaaggacatgtccaaatacaaacctcacattctgctgtcccaagagaacacacagattagagacttgcaacaggaaaacagaggttagtcaggccttttcatatctggtaatagtttaaagttattgcaaaattgccctaaacatttacaaaagtgtacatatatttccaggtcagtacttttagtaggagagtcctcctgatctggcccagtaacaataaagtttgttagattacccttttcaaggtcatctgactaatattgcagcagcttaccaaagaggtgctgtgtagagttggtattattgcatggtttatttttaagcatcctcagatgtgtaacaaaagagttcatagcctcatggacttaaaatttaatgtttaagtattaatataaacactgaaggtaagatttaaggttttgtttatgttcttgtttgtgcaaggtgaagcagcagaattttattctaagggtatatattcttaggcttgattagtacattattaatgattgtggtattaatagttgtttaccagaggggtttcacatatatcattctactgtattctcatatcttcatttttatctaccacaatgcagttaagaaataggctcagaagaagctaaatgatttacttatgagtattaaccaagcaagttacagaactgaactcaaacacatgtcttctgatgatacatccattgttgtttctgcaagactttgcttctctgcctagaaagttacctttcacatagactttaactgttcagttttgcggacttaaacattgatttacaactttagattcatattatctatatagtgttacaaaattccaactgttaagactttggatttgggaactgtctctcagacatcactgccaagttcttttattttttgacagagctatggatttccttggaggaacaccaggatgctttggaacttatcatgagcaaatatcggaaacagatgttacagttaatggttgctaaaaaagcggtggatgctgaaccagtcctgaaagctcaccagtctcactctgcagtaagaaactttgaataaattcgaaatgaaccaaattgaaatcttgagattgttttagattgtgtgcttgtttttttgctttgtgagatagggtctggctcttgtcgaccaggccgtggtgtaatggcacgatctcggctcactgcaacctctgcctcctgggctcaagccatcgtctcacctctgcctccggagcagctgggactacaggtgcacaccaccacgccctgttaatttttgtggggttgtttgtttgtttgtttgtttgtttgttttttggtagagatgacatttcgccatgttgcccaggctggtctgaaactcctgggctcaagcgatccacccacgttagccttccaaagtgctgggattataggcatg

SEQ ID NO: 55687 - DNA, 1916 bp, Homo sapiens
aatacctgttgtcttttatcttgcagatcctgctttacaaaaagttaatttcttgcccgtgcttgagcaggtcagttaagcatagtacatgtagatataatctgtttaggtaatgaactgcttatttgaagacgaaaaaagtctttagttattgcattactagtcttctgtatttaattgttattatttagaagctcttatcagaagtattttcttatagaaacatctatctttttaggttggtaattctgactgtcactatcaggaaggactaaaagactctgatttggaggtcagaagatttcccattcatattaaatttcttgtaattggaatataacttattacctatatgtatatttcttttgaagcttcaaaaggattattatttgattaacgttttaagatatatcctttaaaacctttttttctgcttctgtattttttgggttatgaaagttccatttatgtagaggcaatttaattttaaaccatgaaatcaagaagaggggaaacgagtactatacctgaaaagtatattatcaagagagtattttacaaaatcagcctttaattaatagacgaaattgactggttgactggtttattgtataaggaatttgtaggacatgctatatacttttgattttagttataaaaatatttcttatttatggcatatagtgtctttaaaatgaagagaaattccatagcctggtaaggtactgtatgtttgttgctgtgattatggtatcacagaatttaaaatatatagaacttatttatatatttttataagaaaaagttgtcaaccagcaaaaattgatgtgactaaaaatctctgatatttacaatataatgtggattttaaaaaggcaggaaatctatataaaaatcagacttgatgaaaattatatcttgtcttcacttttatttttcttgtcattatattttaaacttcatgtcctttagtgaatcttcaaactgtttgtataatcaaagtgtttcaagaccattgttaagatttatagatttcttataggatgatttattttagcttttaaccagccagattctgtcactaactaaaatatttttatggagccatttcattttattcagcaaggtataatttagtcaagtgaccaataactttaatgaagtagttaatattgccttagtagtttaaaagagttaatgtggctttcagtatgctattagtgcttaaattgaggagatatttggtctcaactattagtatatggatattttcagtaggcagctgtagtttggttatattagaattttggacaattaatttttgaaaacatattttaatagaattcagagggattgagcagagtgtattcaaaactgtataaggaggctgaaaagataaaaaaatggaaagtaagtacagaagctgaactgagacagaaagaaagtaagttgcaagaaaacagaaagataattgaagcacagcgaaaagccattcaggaactgcaagtatgacacaattttgcattgtaaacatagtatagtaaatctaatcataatactgttgaaagtagagtattagttgggataaattggattgatcttgtttttgtgatgaatattttaaggataatgctttttaaaagttacatcaatactggatacattttaactttaagaatgagcatagaggacaagttgtataacgcttaatgcaaatgattagggaaataataaatcactttatataaaaattgatttaatgattctaatttattataaagagtttcaatttttattcctattgatgttttatgtaaatatattctcttagattacaatagttgtaggtaacactttaaatttgaaactgtgtaactttattttttttatttatttttgtgagacatagtcttgct

SEQ ID NO: 55688 - DNA, 1050 bp, Homo sapiens
ttcaggttttctttccctgactctggttcccacagagttttctgcttatgggtttctgccctggtaagttgtaattctctctgtgtttgcctgtctctccaattttggggtagtagtttgccctgcgactttacttctcttaaggatctgagaagagttattaattttttagtttgttcagctttttacctgtcgttaggatggagcagtgacttctaagcttcttcacaacagactgaacccaaacagcttttgatgcaacttaaaaagacccagtaatgatttagataacccaatgttcatcattaacacagaattttaaatattttaatgttttctggaggcattttgagtattgtcttgttgacatcttattttaaaatttaatcttgaaatttttatattaacaatagatgaatatgaacgggaagaaaccaggcaagtttatatggatctaaataataacattgaggtgagtgttaatgaaatctgagtattttaaacataggaatttctgagcaaattagagcgattgctacaaagatatggacaactattcttactaaaaagattattatttatttgttgatatattattgtatcactaataaaattcctaaggttctgtactatgagcattaatgttatgtaggagctttttgatttacatgttagtgacatcacttaatttatcaaatatttactgccttttgtcagaaatcagcacattgtgacacataaccattaatttgaaaacatataaagtattattcatctgtgtctggcttctgtttacctttgttttctcatctcctgtcattgtccactttgcttttctgctgtagtcactcttttatgtttctcaaatttgccaagctctttctgatggtggttctttgaatttgtaccctttgcagaacttttatgtctaagatcttatgcacatttctaaacttcattctgcttttttgttattctccccttaatactttatctaaaatttctatttgattattccatatatatccatctcatttaacttttctcaag

SEQ ID NO: 55689 - DNA, 1065 bp, Homo sapiens
tttaccatcgggagataaattacttttcatattttagtgtgtatcttttccttttgcatgcagtgtttaaatattgttttaaacccactctttttattctatgttttatgaatatccaaattaataatcaataaaatttgtattacattttcagtggctacatggtataccatcccatatatgtgcctccataatttgtctacttttggatatttaggtagtttctaatgttttgctattataaaaaatgtaaatccttaaatatttatttttgagttcttgggagataacaatcttgaaaagtcaataaagcttgatggtgaccaatatttgtgtgtctatatttgcatattttcttctcattttggactattatctaacggaggaaaaagactaattgtcacaaataatacttagttttcttggtatatatcttctgctaagtactatctatttataactttctcttttagaattacagagtgaaaacttaaaacaatcaattgagaaacagcatcatttgactaaagaactagaagatattaaagtgtcattacaaagaagtgtggtatgatttaaaaactcattagtgtgtaataagtctcaccctatcaatcagtcaacaaatatttattaaatactaatacaatgtacaaggacctggagtttcaaatagttagagaagacacaatcctagtctgcaaaatgctatagtttagagacattgcataaaaacacatcaaaagtataattaaaatacaagaccctggacaggtgacaacagggtggtttaggtaataaattaatagttctaagaattgaaagaacagtatggctggtttggctaggaaggctccatggaggagctggaactataggtgggatttggagaacagtgaattgaaataagagtagtgggtgggcattccagggtaggaaggaggaataataggaaaatatgagggtgggaaaggggcagtgaatgtatagaagcagataagttcagcttttttggttaaggcctttggatcattgctcttgttttatactttatttcatttagag

SEQ ID NO: 55690 - DNA, 1040 bp, Homo sapiens
atttattagcataatgttgaactcatggaactgtagaaagaaaaacattgggctttattttttaggatggcaagaaagaaggctgtcagcaaagaaaacaagaacaggaggtagagaggaaacaggacatatgaatagtgcaaaatcaaagaggaaaaaatggggagaagttaatagtatcaaatagtacaaacctccacaatgatgaagacttaagaattgtatcacaaaatggttattggtgatccttaagatgacaattttattattatggtgataagcattagttttacttggagttcaaaatgaaatgtgtaggtaacaaataggaatttgttggaaaaacaaactaagaaatttgatagctgcttgaaagagcagaaaggtcagatattgttttataatcaaatagaatgtttagacgagataagggaaattaaagattcctctacatagaatctgtgtatattggtagcgtaagggcagagtctcagaggaggtgggaatgttgaatccaaagtacaatgctcagagttagcttgagaaaagagaatcacttcttttaagtttggagtgaagattaaaatgtcagatgtttagacagtgatgagttgaaggtaaatgtacattctgacctcatttcaaatatattttatatagatttattgcttattttgctttatgaactttgggttatttggcaatggcattaactttagagaaacattactattaatatttatcttttattagcttttcatagttagatttggactccctctatgctttacattgctctagttgcatttgtctctcctgatttttcccttttgcgtagtattatgcttgttccttctgtctcttttcctattcttttaatccagctttttaacacattttttttttgctcattttagaagagatgactaagcttacaaataacaaagaagtagaacttgaagaattgaaaaaagtcttggtaagtatagtctttcctattaatatatagcaattacttttcagaagaatattgaatccct

SEQ ID NO: 55691 - DNA, 1041 bp, Homo sapiens
taataaggtgttttgtagagagagcaaagctcactcagttatttttttcgatcatgattagaaatattaaggcccctaagattgttgattgctgaatctggagtgtgtctgtctctctgtttcactctttctctttcttattttcttcagcaagttaaaggaaaggcagagaaagtctaccattgtaaatttttgaagaaagacaacttatagtatcaaaaacatttgaattaaattcttatccaaaatttttgcctcatatacttgccaataataatggaggtttctgattgctaaggactcaaattgccttaaaattatttgtgaaaccctttattaataatgcatattttatttgatatgataatgtatggttttttatttttggataggcatatacagtgaagacaccaacaaaaccaaaactacagcaaagagaaaacttgaatatacccattgaagaaagtaaaaaaaagagaaaaatggcctttgaatttgatattaattcagatagttcagaaactactgatcttttggtaaaaattttacaaataatatttagtatttatttatattacttatttgtatactattttccttgatatacatgtataatatatttacatagtacctaccattgcaatactgatatacagtggagctctgctaaaatgcagatccttgtgcttttgcagcatttcagaaaaattagggttcaaataatttccctgtaaatttcagaaaacctggcactttgaaaatacttgatatagcacaatgggcatacgatatgattaatcattgtcttgttttctagaagaatgtcataaaggagttcttactatatttttaaaaagagagatggagtgaatattttactgtgccaaatctgttatttaggcgtcccctctattttgcatattatacatgctccttttacatcactggttgatatttatatcaaggtattggttgacaactataacatttccatcactctaaagaagttaatgtattaaggacagcatgtttaagcaggct

SEQ ID NO: 55692 - DNA, 1043 bp, Homo sapiens
ataaaaatctaggtcctttcttggccaattgatttattttgttactgttttctttgtttggtcttctttcttctctctataatcttctttctctttcctcctccctttgcccttctcccttctacatccttcctctttctactctttgttctcctcacatgtgatatgttgacaaaatgttaataatataatattaatgatggtaaacccaacatcatatttttttatttttcttcaagagcatggtttcagaagaagagacattgaaaacactgtataggaacaataatccaccagcttctcatctttgtgtcaaaacaccaaaaaaggtagcttttaaattttatttcagaaagcaaattttaaaagctgcacttaaaaaattaaacatgttatgatttttaaattttattttgtactcaggccccttcatctctaacaacccctggatctacactgaagtttggagctataagaaaaatgcgggaggaccgttgggctgtaattgctaaaatggatagaaaaaaaaaactaaaagaagctgaaaagttatttgtttaatttcagagaatcagtgtagttaaggagcctaataacgtgaaacttatagttaatattttgttcttatttgccagagccaaattttatctggaagttgagacttaaaaaatacttgcatgaatgatttgtgtttctttatatttttagcctaaatgttaactacatattgtctggaaacctgtcattgtattcagataattagatgattatatattgttgttactttttcttgtattcatgaaaactgtttttactaagttttcaaatttgtaaagttagcctttgaatgctaagaatgcattattgagggtcattctttattctttactattaaaatattttggatgcaaatacgtgcttcttattgattctgttaggtcctataaacagctcatcattataattttgagggaatattattcattgtaaagtcttgagagcattgtagaggagttttgtacttctgaggcagctttgacttt

SEQ ID NO: 55693 - DNA, 1051 bp, Homo sapiens
tagtaatttcttattggatgctcaacattgttaattttacattttaataagtgagttatattttgttgtatttttttaaaggaatactgaactttgttctggcagacattcatgttacttggttcactcaatccttttgaaagttcctttttatctttgttcaggaaggttcagagcagccttaactctagagttaatttatcctcacttttaaagcatgacttctctgaggactctacctaattatgtattataatacttctccactttggcttatggaagcacaaactatttttagacgtaagtaagctcgaggaattgttcagcctcctgattttcagtgatctttccttggcttcctagtttcaaccccatcatatacaaattggtcatcagttgaagactcaatgaaaacccctttcagatctccagattttctttctaggcagctccctcctcttcatttctctgtcctaaaaattctaggcatttcagactccctgaacttctatacgtttcttcacaattccttaagagtatagtctctttttggctccccctctctgtgctgtagcctagaaactgccttcaggtttctaggacaatcgtagggcttaatttatttgtttcttttctttcagtatcagccttgtggtgcctattatccaaagtttatgaataattggttcatatattttgccctgttttctaactgtttttagtagaagagaaattcttataccagtgaatccttgatgggtgaaagcagaaatatgtggggcttttgggagaagctgaatagtctgggcactgaccaatgaaaacaatggttagtagtgctggagtagagactgggaggcctcctcttgtgccaggcagggaagagcttttccctactcttgacttccttgaaatcaaaatgtgtttacctaaacacattttggtcctctccctattcctttactgactttacctatggggaggttcaccaaacctggttcatattttgggctagaatagctggcttagtgcctttctcctgccttctttt

SEQ ID NO: 55694 - DNA, 1017 bp, Homo sapiens
tatttcgctcccagaaaaaaaagatcaaagagctttcagaaactttgagaacttggctatttagaaaaagtgataatgggtcagtttctcagactgtagccattgaaaattagatgcagagaattcagagatttcttcttaatggaagtaataagctgtaagaattgagagatcacaatggagtgttaaaactgactgtgtctaagttgggtgtaagggtttcctgggtttttttatatacatgctctccccagaatacagtaaaccacagttttagaactaaacacatctgtaaaactaaatatagcatggaaaatccaatttgaataagtcatgctttcctagaatttaaaaataaaaaagtcttcctctggaaagagaagtcacacagacaatcatgtgccctataaaagtgagtgtttataggactaaaaaacttttaacaactttttaaggaaatatttttgttcttatacaaaaacatgtaaatattgctttattactttcattttctgaccctgctgtaaactactgcaaccctcacatcctcaaagggacttttatgtcaaactcttctgtttctccaaatataaggaaaaaagactaaagcaagagatctggcagttgaaaattgtgggaaagagaatttgtatgggcactgtatctatgaaatacctcataacttacgtttacatgttttcctaactttttgtatttttcttgtatagccacctagagaattcttcatagattaagaactacagttttcaccacttaacataagtaaaacaaagtccttcataatttaaccattagcatctttggccaaaccaaaataaagaaaagcatcttctcctagttgtgtgtgggcaacagaaacaagttaaggaaacaaaaatacttatatatacacagaacaaaaataatgttctttttatgcaaatcccctgtgaaaataaaattttcaatgtttttttggtcttaacgcttcattttaacttagtaaacccaaattta

SEQ ID NO: 55695 - DNA, 1049 bp, Homo sapiens
ggcttgggaactgtcagaaatctttctagtccatgaaaactgttctggttagtctgtccttccatcctcaaaagcatcttagaaactccagaaactataatcttctccatatgttgctgaattatcctaaaatacctatggaaaggcagtatttttttttatttctacaggttttgtggggaacaggtggtgtttggttacatgagtaagttctctagtggggatttctgagattttggtgcacccatcacccgagcagtgtacactgtacccaatgtgcagtcttttatccctcacctcactcctaccctttcccctgagtccccaaagtccattgtatcattcttatgagaaaggcagtgtttttcaaaggtgtggaagaggagattttccttgatgaaaggagaatgtttgaaacttcccacccagaagtccttcatttttccttgtatttcttcaggctatccgacatgttcagaccatgtatgaagaggcttacaatgattaccttaaagacaggggaaaaggcaatgggacactcatcaccttccactcaacagtgagtaacttcacttcttccttaaaatcacagcttctaaagattatgtgtgagccaggttctcaccaatcaccaggattaaaaataaaaataaattcagtaaagccaagtagcaccacctattttagcccttttgagggccacagtttgcattatgtgtggaaccctagaagggaaagatgtctatcacacagagttcacaagagagacagaagagcatgaacccaaaagacacatgccccaaagagacaaaagagcacaaacaaggttacagagaaaggagcccagataaatagcaggctttgtcagagggtagcattgtggtgtaacagaaacaagtgtgacctgtaagtcagaaaagctaatttctagctgcagctctaccattcaacagccttgtgaccttgagcaagttacttggcctccctgatacccacgcagctccctcatttgtagaatgaagggtcacaggagatggctacactccctt

SEQ ID NO: 55696 - DNA, 1028 bp, Homo sapiens
tagaacatgttcgttcatgtgagcccctaactgcatcctcctcagctgatcattcagcttgcagagctctgcttaataaagccagacagaaagctgtcatctgttcaggagaaaggcttcaaagggtgtttttaaaaaataaataaataaaacttctcccctggttcacatcaaccaaaaataaaaagaatgttcttttctaaatggtgcattatatcactagaatagaaaatgcactcaatttttcttttatctactgatcacttttaagagagtttttttttaaacttaaaagtttataggaacacactctcatgagtaaattaaatatttttttaaaaaaactttaaacctaaaatctaaatgagagatatatttgagacattttcaagtcttaatgaaacattctgcctgtgatacaaatctccattgtgattaaatgtgataccatttggtatcttgactgtgagtggaaaagtagtgttagagtgtaggaactttgtgaagtcagttcagtcaaaccagcagatgcaaggcagggtagaaaacttcataattacctgaaatgaaagaatataatggttggaagatacctttaacatcatcatgcagatggagaattaaggaacactggaggcaggagacttgtctacatactcacagtttcttagaggaggagttacctaggagttctaggtcacctgggggcaacaaagatgagtaggacactttgctgcctacagggagtttgtcctctagaagggaggataaaagaatacaacagccctaagagaatataaagggaaggctttaagagatagagaaggggcagggcgtggtggcttacgcctataatcccaacactttgggaggccgagggggcggatcacgagatcagagatcaagaccatcctggccaacatggtgaaaccccgcctctgcaaaaaatagaaaaattagccaggcgtggcggcgtgtgcctgtagtcccagctactcaggaggctgaggcaggagacttgtttgaac

SEQ ID NO: 55697 - DNA, 1045 bp, Homo sapiens
agatatataagaaattgtagctatcattagctatataattttcatttttcttttaaagatgacaccaatttctgcaaaaaaaacaagtggacaatcaacaaggagatatcaattggcttattttctgaatagatgtgagtgtaaaacaaacatccagggcccctactcaagtcctccagcccacattggctcttagatctcttcccagccagccctagatgtaatgaatgctaatttggtgtggcaggagtttaggactagaagagaacttagagataaccagtctgggtggtgagattgagcccaaatgggtgatgacttccccatgtcacagagcagcaaagacaagactctagggccctgactgctcctcttttcactccgacagatggtctctctggttgatatataatgacattgactcccgctattgccttttactacattgtgatatcacacagcacatagcacagccctgggtgcatagtaggtacctgatgaatggtttgcttaatccgctgatgtgccaagtgtatgcttgacaatctaagagacaggaagtcaaataagacagaataccttcgggaggcttcaagagactgacaaggaaagtcacagcaggggacaagggggtcttagaaatgggaaatttgtttaacttcctcgacagtacaatgagagtcagaagtcgaatcacgtaatgaacctcagcgagctcgttcttcgtactccctatgccagacaagtcccaatgctactacatatttaccaaatgtacatttatagcccttgacctctcccctaactctacatgtctatatcaactgcctattcaaattttccatgtgtatgtccaatataaggtatctcaaatatagctatctcagtatataggtatctcaaatttgacactttcaaacctaaactcttgattctgccttcaatcctgttcctccttcagtgttctccatctcagtaaatctcacctcctttcagctgggtgccaaaaagcttggcgtcatcctcgatccccctgttccctcac

SEQ ID NO: 55698 - DNA, 1053 bp, Homo sapiens
cagatctcttcaagaacttttcaagaaaagccaaaactttgagactgaaaagccaaaactctgaaatttcttcactttccacacatgggtacagaccaaacaaaatttgtctgcaggctttttaatcttcttatgtgaattaacacatggagcaattgcaagcagtatcaaaactggaactagtggaagtactaattctgtgaatatatgacctccaagagggacaggtctggatgtcaagaaggctttcagggaggctcctcggagggcagtgaggggctgtcccataggcaggtaggattttacaggagtcctggcacacagatagaactggatttaggtccaagttcacttctcattagctctgtgagcacattacttaacccctgtaagcctcagtttcttcatctgtaaaagggaatcatgatgccaactgatttttgagggcaattgtgaaggggaaaggagagagtgctggaaagttcttacctcagagtctggaatatagccaatgcccagtaagctgaggccccttcccgatgtggaccccctcattgacattgcagacaattgcttttcaaggattttgaattgctttttctgccccaggaaaagcacaggaggtctgggttatttttctcctctgctgccctcttcttgcttctccccgaggcctgtggctgcttgcccagttgccctttgtcagaatcccaccctttaaaagcctgacctgggccacagcagaaatcacaaccctactcagtaaggagaagtactccaggaggctgtatagacacgcacggcaaatatttaaggaattcttaggaataaaaaaaattcgtaaatctggatttttgcatgaggccatcacaggaacatgttttctcaattagcgtgcacattgcttggagtgaagtcaccgagtccacagcccatcagggctgactcgagctgagccacctgatcagacttcactttccatgacctaaatgtgattcaaccaacctgccactgcccctagctgctgaaacaaaatcatccctgaaatcccaa

SEQ ID NO: 55699 - DNA, 1095 bp, Homo sapiens
aagattcacagtggaattcacatcagagaaggtggccccccaggatgtgagttgaaaccagagtgtcctccttcactgccatcttctcaccacctgcagtggtaacacccagtcctgcatccatggcaccatgatggccctcatccgagaccagagacagcacagcctcagcaagccaagtttctggtgccatccaaaggacatcagtgacatagagcacaggaggaaggcttgtttgaggatagtaattgtttgacttcccacagattattttgtccaaaaccctaaggactccattgcaaaaaaatactgcgccaggaagagtagatagaggaagaaaagggaataagtgtggggtgagaaagggcatgccatggaagagaagggagcagagggaagaagagggctgaggggaaaggggaaaaagggactgggaattccgcagggtcagaggaccttgccaagaccaccatttgttcgaagcatgctctgcccctagatggtgctgtgtaattagcaagttcaggaaataacctcactcagcacagaatcccagctttccctgtggtgcgtttatgtatgggggcttgtttgcatcagtttcccacacagccccaaattaacttgtgcgtgctcctggcggctatcctgtgtccttttcttcccctccattctccgtgctctttttcatctgctgcgtgctgtgctaggtgctccttgtatcttacctcctgcatgctcacaagaagcctgtgagataggcagccttatctgcttcaaagatgaaaataatgagactcagatatgtaccgtgagaagctcaagctctctgaatcttaaattcaacagctggagcccaggtttgaatctggataagtgggacttgcaaagtccatgagcctgagagtgggaaatctggtgcctaactctccgtggccatccctgtgtgtctctgagcctggttgccatcatctttaccgtgctctagccaacgaccagcctgtcggccctctgacccctcagtcaatcaacagtcttgattcattgtgtgaagaccacgttgtgtacagagacttgcctgagccctgtgtcagt

SEQ ID NO: 55700 - DNA, 1050 bp, Homo sapiens
ctggagttgtcttaatgaatggccacaagttttcaatgaggacaaggaatgaagtcctctggcagagggggaagggaataaaacttgggttaccatgtgccagagactttacctttgcagtttcatttaatcctcacaagaaccctgggaagagagagtattaaatgacctcatttttatggggcagggttggataagctcagagaggcaaacatttgccccctgatgtcacagctaggaagcaccaagctggatctgcccacatctgcggggcctgggccacctgcctctgagacactccagcagcatttagcaaaaagtagctggaagttgggatggaatggggaatccagagttatgggttgcaaggcagagtgtaggagttgtgaagggttaattatgaatctagaagagagtgggaaatcggtgttctgggccagggaactggacatttgaatctgcagatcagcagaggctgggtgaggggctttcagggaggatctcagttcactcagggctggagatcttcgaagcacatcctaatgttgacgtctgcctgttatgaagcaggtgagaaaacagcaaagcccagggcagaaaggaagtgagactgaggtgttgaaagctgattgaaattgctagtgaaaatggtggagacagtaggcagaaaaaaagatgactcagcccttgaagtcttctaggaaagtagggtaagtccaggagcaaaacttagcatttaaaaaaggcctgctgtgttttcacatttaatctttacagctacctccccccacaaacccccaccataataggctgccttgcttcctttttatggattgggaagtctctgaggctccaaggagaaactgctttgcccaggtgtacagctagttagtaggcagcggactgagatgtgtgctccgttctgtctgactgcaggtgagccttgtggcaggaaggccggcacagagactctgctctgcttctttccaagcatttctctcattaaaaagacagaggaacaagcatttcggaacccgcaaagagagtgct

SEQ ID NO: 55701 - DNA, 1041 bp, Homo sapiens
aacatgtcagcgagcttgtgctggagtccaggtaaggctttcaaataaggatgagaaacagaaggagctcggggcaggtgctgctggacggggcctgtggtgacatggcagagcccagctcctgagacagtcacaaaccctctggccataagaattgaatcacacatttcagctggtgggtaaacttaccagatttagttatgaaataccagaaacagctgttttaaaataccaattttgtttagcactaccaattcccttgtcaataccaggcttccctcatccacaccacaatgacagaagtaggaatttgggattccctgggtgcttggggatgaacaaagcaggttggctttgcagtatcctttgtgggaaccatctctgggctcttttgtctacactcgagttctgactttcacgcttcggggcccattgctacgctctgctatttccttaggcctcttggggcctccagaaattgatattccaatgcccttgtagtaactttaagagactgtaacttccaattaaaacaacacgcagaatttttaatgcattcttggacccatatagaaagtacttggcaaatgttaatacaagctgagtcttttaatcaattattcaaaaaatgttcctggatatctactctgagaaaagctctgagagaggagatgaaccttagagatttgtaggtgcactccatgggttctttaaaaaacaccactaccacctacgggtggtggattctccaactgactgcagcatagggcacagcaactgtggggtgagaggcaccatccctagagagcacgggctgtggtgtactttgctggggcctaaaggatgttaagcagtagggttgccccccacaggcatgagagcaggccccaggcccagctaagggtattttgtccaaggagtgttcctgtgaaggctgccctgctcagaggtttgttgggaacttgaatggaagggtaggaggcgggttggggttggagggggaccatgctctttggtaattttagtcagagtccaactcag

SEQ ID NO: 55702 - DNA, 1048 bp, Homo sapiens
atttccctaaattcaaaatgatacttacattttgataaacccagagagttaattaacatggcataaatgtgctagctcattgttgtttttcagggaaagaactagagagagacacaagtcaccccggaataaagacggcagagggtcagaaaagtctgtcaccattcaacctcccactggagagcccctgttgggaaatgattctactcggacagaggaagttcaggtaaggatcaaaggtggtctgtaagcacactgccacttggccaagactcctgtctgtaaatgttttccttaggttctcttggatttttgtctttatttttctagcatgctaattagtttatctatgtcccatggtctcttgttggtctaaggacagcctgtcctgccctttggtagcgtggggattcttctgaagtatgattggttggcctgctttacatggtgtggaaaagtagccagcaaggttgacgacagggttgggaagggaaaagctgaagtctcccacgactcatttcaaaatggaacagtataagggggagaaggaaactcagaaaacctaagaagtttaaaaaacatggggcagcccagactgaccattactactagagctatgcaggaattgagaggccgcacgctcagatgcctggtagagaaacgtaagttaattaaggaggccctgggtcgaaaagagggggcaaaaatatattaacctagctttgggttaacagcaatctgtgcagtgcctcagtgtcagtgctgtagtgtggtgtgaaggagcctatggctaactggagaatgcatttcctctgtaaaggaaacagcagctccgcagctccagacacctactgttgctcaggaatgcagggattcattgtttgagaaaagctgcaaatcaggattttatgtggaatcctaactttacagtatttttgaaatactgatactttattaatttttttgaaccattgagtgggttcttctccaggttccaactgtctggcagcccacctgatttaaataaacatctgagctatacacagaa

SEQ ID NO: 55703 - DNA, 1090 bp, Homo sapiens
agatcacattatgttttctctgtttgaaaaggtaaatacctcatacattttgaaaatttcaatgaaaatcgtttgagttaagaagttctaatatttaaagagttaagctttcattttctggaagcctttgtgaatagggctgggtagatgcagcgggccctgcatgttcactgccctttgtagcttttacaaatgacctgtgtcatgtcatcctcactgtcttctccccaccaggatgacaactggggagagaccaccacggccatcacaggcacctcggagcacagcatatcccaagaggacattgccaggatcagcaaggacatggaggacagcgtggggctggattgcaaacgctacctgggcctcaccgtcgcctcttttcttggacttctagttttcctcacccctattgccttcatccttttacctccgatcctgtggagggatgagctggagccttgtggcacaatttgtgaggggctctttatctccatggcattcaaactcctcattctgctcatagggacctgggcactttttttccgcaagcggagagctgacatgccacgggtgtttgtgtttcgtgcccttttgttggtcctcatctttctctttgtggtttcctattggcttttttacggggtccgcattttggactctcgggaccggaattaccagggcattgtgcaatatgcagtctcccttgtggatgccctcctcttcatccattacctggccatcgtcctgctggagctcaggcagctgcagcccatgttcacgctgcaggtggtccgctccaccgatggcgagtcccgcttctacagcctgggacacctgaggtaagaggcaacatccaggaggcagaaaggatggctgatgtcttgctgggagacagctgctctgtagcacgtgaggggtggtgacagatgccaagagctaggaccagagtctgactcttttctggtttggggaggagatgcgagggtggggagggtgtccatgttcattgagtttctggacttctagatggtgcggggcagttgctggctctcacccaggttgagattttgctgggcttgttctcaaa

SEQ ID NO: 55704 - DNA, 1396 bp, Homo sapiens
gcagctattactgctgtgatcatgtagctggcagagcagccagaatcagcaagggcacaccttagtgggtatcagaacaatcggctttgtcatagatttggctgggctccaggaaggtggctcagcctgtatttggagtcaggccatgctgccaaaccatcttcatgttggtgtgtaccctcctccattcctctggcttggcttgtgctacgagaacgggatgatctagcgttcaaggttgctgccaccctaactgatccttggtggaaactggtgtccaagtcacatgtctgtgcaccaaaaatctggggtttagagtccttcacagatgcctgtagggctctgaagacaagtaggtcaccgctttgctgcatattcatctcagaaggctttcttttcccatgttttgcatcagggaatgaccagcagttttgtgttaaacatctgctgtgtgcagagccctggacacaccaggctggctgccttcagagctctatctcagcacctgtggcactcacagtcacttggaaagagaccagtgcaccgctgtctggtggacaggtgcagaaacaggcctgggggtataggtgataggaacacaggaggacagagaatttcagattgtggcagcaataaagccgagcaggagacagtctgtctcagaacaggttttgctgcagttaaagtggtagagaaaaatccggctgtggtctcagtggagatgagtgatatttggaactctgtatatgtaagtagccaagacactggccaggagtgaggtctatggtggttttgttttttggcccttagccctagttggtgtgaattccacctgtgtaggtgggaaagggcagggcatcttctcaccataggtcatgcagggtggtgggaccgacttacccccatgggctcccacatcgctcctccctgtacgactggttgagctgcacactgcatctgagtgggagtggagaggggacaaaccaaacagcccgaggaaagtatgcctgtggcgtgttcagaaagcatgattagcagcagccctcgcctcccaccacacagctctgctggtcagggcagagctggatgggagaagccagactgattgtgctgcatggctcccaggcttgctgcaaacctttcagtctgctcttaccatgaccaacaactgtccaggctttaaaaaactcaagtcagtcaccccagctccccagggagaactgaaaggtggcaagtgcccatctgccctggggagagcgttttgaggtggtccccagcctcatcctttcggcttctttttaggaccattggtgttcctcctctccctgcctttaataaggccccctttgtccctctcgtggagagcctgagttaggaggtggaaagaatggctggg

SEQ ID NO: 55705 - DNA, 1051 bp, Homo sapiens
ccttgggctaaatctggtctgaacccagcagtggctggaagagttactaggccagaaatacaacttctaaggccttttgtaaagtgtagaaacagacaggagggaagagggagcgggaatagacaaagcaagcctcggaaatcagaatagcaggtctccattagacccagcagaatcacaggctgttggctctccctttatgtaaagccttcaccgtggcagcaccctattgggcttaggtgccaagcgatggtgagttcttttttatgttttcaaagatgattttatcgaattgactgagctatttttgagagttgtctaaagaatgtctactctttagtttcttaaagaaaataggcttctcattagttcataaaaggtgcttgctgtggccctgcttgttggcaggaatgaagttttgggcttatttgaaaactttcaaaaatgtaaaaagttgttgcagaaagtaagataccataaatagattgagatacttcctaacctctgcccagtgccctaggagttatgaaaagcttttcataggtttggactcatttacccctccttgctgccctgtcagaggtcagagcaggtggggtagaggtgtcccctcttacagttgaggtccccaacccccagggtaagggacctgctcaaggtcacagggaatcagcaccttcctgtgcatcacaccgcttaccccaccgcactttctacagcgtcctggtgtctcacacagtcgctttgtcattttccatacacaccttgctcgtcacttttcttggccccgttctcacaataagttgctaacttttccaggatgttaccagagactaatgactgttgatatgactttatttgaggagaaacccagaagaatagaagagcctaaaaattggcattcaattatcttaatcatttttcagttttgaaacctctaaagggaaataagtgtgaatactggtgcacaggcactagtgtaattgactggttgaatgtgaaatggtagaacaacagagacagataaagaaaaccttaacaataaacaatt

SEQ ID NO: 55706 - DNA, 1528 bp, Homo sapiens
gttgtctgtaagatgtgccatgtaagatgtgccttttgccttctgccatgattgtgaggcctccccagccacatggaactgtgagtccattaaacctctttttctatataaattacccagtcttgggtatgtctttatcagcagcataaaaatggactaatacagatcttttaatcaaagatgtggtaacgaatcacagaaccacctgtgctttagaagaaatgatccttggattgcttttcaagcaatggaagtttatgattgtcacattgtcaattgtgattatattcaaggaagtgttatggactgaatgtttgtggtccccccaaattcatatgtggaagccctaacctccagtgtggcatatttggagatggagcccctaaggaagtaattgaggttaaatgtagtcatagtgtggggccctgatcccataggactggcatccttacaagaacagataccagagagcttgctctgtctctgcacacacccttagaaaaggctgtgtgaggccccagaaagaaggtggccatctgtaagcccagaagagagccctcaataggaaccaggttggctagaacgttgatcttggacccccaacctccagaactgtaagaaaataaatttctgttgtttaagctacctaggctgtagcattttgatacagcagcctgagctgagacaggaatattacatacactggagacttgtgaccccaaagacttttgacctgttgaatagagctcatcttgtcctctctccagctcatgcatgcatcctcccagcttgcaagggggccttgcttctctggattgcactttgattttctagttttaagtgacaaagggagagtcttctagggatgttaaagttactccagtaattccaggatatttccagctccttttgaaatcttatgtttgtaattctgggtcaagtaatgtccaagccagtgattacattactggtaggcatgtctctcatgctgggccacgccctccatcccatgttcacgatgagcaccaacggtctctgagagcccagagccagtggctgcaacgttgggaaaattcttaaatgaccatcagtggttttggctcatgttcctacgattgtgggttcatataccatctcatttttagaaatgtgtgtttttgtactcctgtaattactttttaataaagatattttgccagtccttagctccactccatagcaaagcaaaggacaagaacaagtaagggctgaaacatagagcgtggagggttttgctcaggccatgctttgctgtgggagaattttgaaggcgggagtggagctgccgtttgtggtttggtgctgtggtgcctgttaaaagtggctttaatgagagtgtaaggtgctgcacactgaagccctgtgtttattcagctgcctcctgccagcggctacagctgggatggcttccctcgcacggcgtctgcccacagccttgcgcccggagcccagaggactcacaggaaaaggagctggcaaaggtgaagct

SEQ ID NO: 55707 - DNA, 1031 bp, Homo sapiens
taaaaacaaagagtagcataactttgtggccccagtccctaaggaaaactgtgcagagtggacccatcttggctcatttcccatggcagtaccctcatggtgggcctctggaggaggttggtacaggcgcacctgggatcaagttggccgcttcaacatatatggccatataagctcgtggtggctatcgtttatgaattatttactttgaataaccactttaaaatgtgttatttcatcttcagcacagacctaaaccaggcaggctactcctctttaggaagcaggaaagtggtgggtgaactcccaagtctccagtatttttcctggtataaatgccaactagctttgaagtctcataatgtcatagaacttggaatcatcccaatggatatttaagctcatgagacttaacctgccttagggcgatgccgacctcagccagcacctggtatacttggatctcgcaggctgctgctggaggttccgagtagctgcctgtaccaggcctgccccagtcaattcattagcctttcagtaagacgttttatgccactgagtattttggagcccacttatcatggtaatcagggttttctgtgctgctcttcccatcctgcagatgaagagtatgaggtttggagaagtgactaatttgttcaaggtgaatgaatgagtgagagagcctggagtcatgttgtctggggccagagtctgcaccagttgcactgtgcgtgcctcctcccacagcctctgtgcagactcagacatgcacagagcatggggaggcagtggatggtctagatatgcagggcattaatttggtttgtatttttttcttcagaatttatctttaaaaaatatgtctttcagatttttgtgcattaacatttgaactacgttttgaggtgcttctttccaggtctgtttaagaaatgtagcccaagggcaagcccctcttctctgttgccatggcagtcatgtaacagttgtcaacaacactggaagtgctttcgtggttgattagacac

SEQ ID NO: 55708 - DNA, 1136 bp, Homo sapiens
gtgggctgtggacttggcttatttggagagctggcccatttggagagcatctgctgaggccccgtgctggaaggcggtgggccgggagccctgctggagacagaagccactgctctgggcagtgcatcacactcacagggtggagggtgagagacacagccaggaggctccgacccacccatcccctcacaggccccagctgaattaatgggattcccttgacccctccttgcagcctcgctgaacagaaaagcaaaacccagcaaccacaagatagttttgagttgaaaatggttctgagaacttctgatgattgctttttaatttttaaatttagatcagggtaatgcttttctgttggaatccaggggcctagagatgtttctttatcagtggaggaggggggatgaagtgagtttgaaccccagtgggtctgtgtgtataaactgagtcttacagccatgtggagggagcctcagaaagcccaggcactccagaaaaggcatgcacaggggtgggagctgagctaggcacacaccagggagtgtgtgtgtgtgtgtgtgtgtgtgtgtgtgtgtgtgtatgtgagagagagagagagagagatcagggagagggttgcaatgaatctctggatggggtaggaataaagaaacacttgcccctctctggagaatgccatggacagggggcaaggacggagttggagccacattgacttggagattgccaggtgagaccttcagggcaagcagactagacttctgcaggaagagctctcgtgacacacaaacctccacggaagtccgcctcctcaggaaggctgcaccctgtcccaggcagccagaagctcttctccgtggttactcagccccacgtgttccagcatgagaacatactcactgtcatggggttcatgctccaggtaccagctaaggtctatcttcatattcccagggcttagcagacacaggcactcaaatatggaatgacgagtgaacaactgagtaactgaatggtcagaattttcaaaatgcagatttgctgttaggagtcttaggtttacttccattatgcaaagttggtctcaccggatttcccctgatagtgttccccagcctcacatgactgtacat

SEQ ID NO: 55709 - DNA, 1051 bp, Homo sapiens
atggtatgtgccttgaaagggtgtccgtggtgctcacaggggcacagttgggtgactatttaagattcatggtacgtttggttcgacttcttctctgggcctacctttatggtacattcttgtttcagaacaatttctcttttttatgtaggcagacacatgtttagaggaatgttgatttaccatctacctgtgttggaagcctgttcattttgggattttatgattgaaaacagcagcggtgtgtgtttcctgccttctgccaggatcatcttatattggaagctgttaggaaagggttgcttttcaaaattggtgcacattacccacaaactcagaaagctacctaaatcattaagactagaaatctcagtagtccaggcatctggtgagatacctgcgggcacttcttactcgtggctaggagccggagttgagtgggtggcaggaggctggaggccaggctgggtaagtccaagctatgtttcagggtatcacatggttaagtgcaagaaacaggatgcggtgtcatttcttcctgggtatgttgggtgagggcaagaactttgcaaaccctaggagaggattatattttcaacaagtcaagtgatttatatacagtgtcagtttttgttggcaatatcctttcagttatttgtttgttcatttttttttggctatatgaggtgtgagctccctcacgaagcctgaaggattgataaatttcacctgtgatctaaaaacttaggaaagattcccactagtgaaaccaagtcaccagccaagtagatcatccgtaagaaagcctgaaatctgcctatgtttctgaaaagttaaggtggtcagtggtcaggggacaggacaggacttctgagtctgtattcattaacgggtcacgttgcacaccctcaagcattggtatttcctagaaaagttgtggctgccatgacattctagcatagcttgctttccattgtagactcagtgtctcatgtcctttgactttcttttttgtctgtctgtctgtctgtccttggtctccccatccctc

SEQ ID NO: 55710 - DNA, 1021 bp, Homo sapiens
ggaggtgatggaccctagggaggccgcccaggccattttcccctccatggccagggctctccagaagtacctgcgcatcacccggcagcagaactaccacagcatggagagcatcctgcagcacctggccttctgcatcaccaacggcatgacccccaaggtgcgctgctccgggcgggctctgccaccgtcatcctggcttgtcactgagcttggccagttgaattatagcgtgttactagaagtgataaaatcgaaaggcatctctaaaactcaagtaataagaattagtgattctcacttattttatgttatgttagtacaattgtttttttaaatgtgcctttcgaaggcctctggattctaacagaggagagaatttcgcttggaggacagtatggaatagtgattggagacagtatggaatagtgattaggggtgcattgtggactctggagctgaactgattcattctaacctggctcctccaccaactagatgcataaccttgggcagatggcaatagctctgtgcctcagtttcctaacctgttaattggttaggataatactaataactatctcatttgtatgttttgggaactgaaagagcaggatacacatatagtgcaacatataaacagaggtccttataaaaaacagctaccaaatgttacacgtgtaccacatgccaagctcatctactctctaccatgcgatttacatgccttgttgccatattcaatgtaattcttacacaacaaccctgtcagagagatattattattatcctcattgatacaacagcaaacaagtgtagaggaactgaaacagttaattcatgtgaagtgcttgaaacagtacctgtcatatgatgaggatggactaaatagctctatttattggtaaaaaatagaatggcgtgaacccaggaggcagagcttgcagtgagccaagatcgcaccactgcactccagcctgggcgacagagcgagactccgtccaaaaaaaaaaaaaaaaaa

SEQ ID NO: 55711 - DNA, 1092 bp, Homo sapiens
ggccaacatggtgaaaccccatctctactaaaaacacaaaaattagccaggtgtggtgacacatgcctctaatcccagctacttaggaggctgaggcaagagaatcacttgaacccgggaggcggagcttgcagtgagccgagattctgccacggcactccagcctgggcaacagagtgagactctatctcaacaaaacaaaatctgttcttgactctgtctgggacctgattgatatatcccagtatgtttctatctgtattactggctcatttcattcttccttcccctcatggctaaatcagtgtatttatttgatttaattcgcatgctgtcaaactcctagtatgtgctaggcacgttggaaattcaaattaaagaaacaaaacatacttcctgcccttcaagagagtgaagtgtagtgtggggagcagacatgcaagtcagcaatcactttgaaagtaaagggtcacacgagagtcagtgattacaggagcctgaaggaggacatgttaatctgcctgagaggttcaagagaagagccttaagaagatttgaagggcagggaagaatgagctgaatgacagtgtttagctggaggaacagcacatgtatcagaactccatcgagccaggtgccactggagcagagaactcaggagagggaagggggcatcaggcctgggcatcccctggactggccatgtgcacacttagcccaacatggaataaccattgcttgcttaccatgtcgggcattgctgtgagtgctttttgagagctaacactttcatccttacggcagccctgtgacttaggtagtgtcattgcgtccactaatagagagtgtaaatgacttgtgcagaatcactgccagtaaatggtagcgcatgcgttcttattcatgcaagtatatgcagcttgtatttcctgactgctcctttgggcccgacacagccctggccctgagaaacttttggttcaggaggaggaagacatggagaaacacatcaagtaggaccataccctaagaatggagtgatgcagccatgacggcttccagccagacactgacaccagccaccccattttc

SEQ ID NO: 55712 - DNA, 2306 bp, Homo sapiens
cttaaaacaggctgtttcttccctaatggcctttctcctctgcttccaggccttcctagaacggtacctcagtgcgggccccaccctgcaatatgacaaggaccgctggctctctacacagtggaggcttgtcagtgatgaggctgtgactaatggattacgggatggaattgtgttcgtccttaagtgcttggacttcagcctcgtagtcaatgtgaagaaaattccattcatcatactctctgaagagttcatagaccccaaatctcacaaatttgtccttcgcttacagtctgagacatccgtttaaaagttctatatttgtggctttattaaaaaaaaaagaaaaatatatagagagatatatatctatgccagaggggtgtcttttttaaaaattcttcttcattgctgactgaaactggcagatgattgaccagtatcctttgaccatctgcactttatttggaaggaagcaggggctgtccaccctgaaaaagagtgactgatgacatctgacttttgtcgatgggacttctcaagaagccattccttggagcttctgttacagctgtaaaccaaagtggagctggtgcttcttgggagcctcgccttacaactaattcctgcctttcgtccagtaccaagtcccccgttgcttctggtcagcccacttgtagacttccaggggacacatctttattctgtttcaggaaaccagtcacgacacgtccacatatgtatttgtgtatgttaatgtccagtatcacatcacccatgaaagtcgtgggcagttcaggagatacctgccttcatctttgttctttgttgccttaggttcttcagagaaagatcacaacaaaaaatgtacactgtcgtttacagctattaagtgatttgattttgtttttttcccaaagagaaaacctacctgccctgtttctgatcccacccctctgctggcttgaagcaggtaaccctttcccagccctgcagctgcccacctggcctccatgccatcctgcccccacctggctggcagccctggctctccatgtgtgccctccggctctgtgtgaagcctcaagtcagtcccagcattgtttccatagggaagtgtggggtgcccagcaggtaaagcacagggagagagggcagtgggaatgccacctttaggctgcagcaggagccccacactgcccagttttcctccccactgttctacaccaaccaggggagactaacactgtgactctgggattggcaggtgcaacttggagccacttaatttcctggggacgtaagttcttcccaagcttagagcaagctgccctgccaaaggagaccaaaccatgccaaccacgctggcaactgctgctgtccagtccctgtgttttctgaccaccgtcactgtgcaactcatcgcctctgccacttaggaccaggaaagaggctggttttgctcccactcttagttgctgataaagtggggagaaggaaaatggacactctacagagtttggggaagggagagtagggagcccatcttgtccagaaagattcatctgtggtctgtctgttaaacacagctgatttcagtgggctttcccctggccctgggggagcagacactgactgggttgtgggcagaggagccatcctggcggagccctgctgcaggggagctccttcaggagccccatccggacctcttgcactgggctgcctttgcctccatttgccttcctgtatctgcaacaaaccttttaaaagtgttcactcttgctttttccagtatttcggtaatcagccatcttgctgtagtacaggatgacattgtcgaatgctctttgtatgtgtgcacacccccttactcccttactgcttcatacactccacaagtggtacagtattttgtgtcattgtaaaaatcaaaattggctttggatctttgtaatacacctgtacctgaaaaagtaaacaacattcttcaattactagccttcagcttgaaaagacatgctggagaagaaggaagggggaacccataggtgtggcgtggagccaagatgtactattcaactatgtgtttctgtttataaaaaacacataccatggaaccatggtgcttttgttcttagtttttgccgttagatcccttcaaactggaagttccttacaatatctttctcaggaaatattttgggaaatggggtaagagatggcaagtgtgagacgggctgtgtcagaggttgctacgtcatggatacagtgcagttccaagtgccataagtgtatgtacatat

SEQ ID NO: 55713 - DNA, 1056 bp, Homo sapiens
cattcccagcagggtgaagaaaggtttaaattaaagaatttattttctctctcccccttcctctttctcccagtctttgcataggagaatgttagacattcagaaattactgtttctgttttaaattgagtattgatttttttatattgactttgtattgagttctttttgaaagaataacaaaataaaatgcaggatctttgtaaagcctttgcactttcaacctctttatagcttgagttacttttgcagtgggaacaatgtaaatgacatttaaaagatttaaggtttcagaaagctgcatcccacaattgaacacaatgcatttttatttcaattcttggaactggtaggctattctttttaaaagggggtaaacttcgccctaaggctggtagaatgtatgttcacattatagtagacaggatttcatttgccttatatgtttatagattttttataattttcatcctacgttattaaaattagagcattgagtgttaaagaacttaatgaggagtctatatctgagattgctctcttccctggtgatgttttaactggtagataatttgttcttaaatatgtacttttgaagataggacagtttttatagtccatgaactgaatgttaaaaagttctgtatgcattctcagagaggattttaaagctatatagttcatccatcctttgcattatcaaaatgttaagtcaaatctgtaatactttggctaaaattcataaagtaagccctagagaaaatacttgaccaccaaatttttgcccaactatcatcacctcccttcccccgcctctgttcttgccttttgacatctacatggaagacaagttctttacagcaaatggtaagaggcaggtgacctggtgtgtttgctgtgttgtagttcattgcctggggcttgggactccttttttaatggagagactagctgtgcaggtgtgtgttggatagggataaagtgctcacccctgccctctctacagtagttggtggtagatttctctctcattttgcctcataatcactttcgagt

SEQ ID NO: 55714 - DNA, 1044 bp, Homo sapiens
gtattaccagacggatagcacatttatatgtcagacatcttaacatctgtgttatctgtagcaggtgtgtagctcagcagatacgtgtcattgtgtatatagctgagtgtgtgagggtgtctgtgtttctgcagtcccctgtgtttgagagatgacttaataaccctgtgttttgagaggtcgctctaaaccagtgacttttccctcccctgctttattcctttccctcactgacactggcttctcccgctagagtaaatggctttagcacagcactgtcttctggggagcctgctgtcctgcaggcaagtccattaaactctttcttgctttaggactctgaaaacagcaagaaacaaacaaacaaaggtcaagctctaagaaaattactgctcaaacttcactaccctggaagccttactagatatttcttaaggtaacttaaaaattgggctttatttttaaaaagtgataggttacttacagtagcacagaaatgttagcatatttatttaaatagtcctgcagcagagaccctgcgattgtaaagtgatttaagtatttctgggtagtgtttgtgatttacggatttgttactgaaaaacaaaaaaatcactactgtgaatttactactatgtaaccttgtggtcgtatttcattataaataaaataagaattgctcttctgcccaccgttcttgattggtattcagtgcagtagcgaaatgagatagtttagacactgttgaaataactgcattgagctttaaccaagtgtatgctcagaaaattcagttttggatcacattttgacaaaacatgttttggtcaaagaaaggaaaggctactaacacatttatcaggtaatgtatgtcacagtccgtgttccacccagccttgttatccccacattctttcaagataggagtcatcttggtttttcgggtgaaaaacggaaggtcagagaggaaggggcttgtccaaggtctcatgtctggttaacagaatttcaaactagatgtttgattctaacccctcagtccac

SEQ ID NO: 55715 - DNA, 1034 bp, Homo sapiens
ctctgggacccctaagttatggcgtgattagccaaatttgatttccaacagtcatttatggccataactattgcatagagtgcaggatgccagcaaagatgagggtgggggcagatactggctcagtgatttaactcacattatagatgaccccttcctcaacagaaatgctactgagagaaccagagaggcctgggccaggcaggtcttatttgagaggagattatttgataattgctttggttagaaggactttacatttcctgatttcaagtccagcaccaatttagaaagttcagagatgaaaccacctgtctttacctgacagagtcataacggtttgtgtaaaaatgtggtcagggaccttttttgttctttctgattagttaatactgtacattgtaaccaggaggggcagttttgccaaccagcctctgctcatggtcaccatatgtgtatgacaaggcctgagtgagttcctgcataaactgggtagtgggctcttttgacacatttgcaagcatgtaaatgaatgaatgacactaccagcaaccatctgtacaggtccatttacttacattcataaggtttatgctatgaaacttcttctcattgtgatgtcagtaacagagttagtgtctctgatggaatagtgtacctgtcacccaagttattttgttcctttttgggtcctccagtataatccccccctcatcccaattaactgtaaaatgttttacacatcacattttttatactgtaaacttggaaaataaactgaaatatcaaattgtgtcttgtttcttttcttcatgtgattatttcaatctaaaaagttgcttactttttcagggacatttttcactctcgcataattttgagaccttcagaatttcaagacaacctgtcatatttctataaaaaccaagacaattgtgatggattgggaaagtagaattaccattgtaacaaaaactactagttgtcaatcattttacagtgaagaaaatgttttgaatagataactaaaaatg

SEQ ID NO: 55716 - DNA, 1096 bp, Homo sapiens
ctgttttaaaatgttttcacttgagcatgttttaaaagtaatgtattattattaattttaaagtagcttacaaaataaatgaatgtagagttccctaggtgattgaacacctatcaacaggggagaaagacattgctaactggcccccattcttttttattttttttttgagatggagttttgctcttgttgcccaggctggagtgcaatggcatggtcttggctcactgcaacctccgcctcctgggttcaagcgattctcttgcctcagcctcccaagtaactggtgttacaggcacccatgaccatgcctggctaatttttgtatttttagtagagatggggtttcaccatgttggccagctggtcttgaactcctgacctcaggtgatccacccatctcagcctcccaaagtgctgggattacaggcatgagccaccacgcctggcttggcccccattcttaagagattctatcttaattaagtatggctctaataatcctctgtgatcatccctttctgtccactgtttgcctgattgtatctgtccccacttgagttttatgatggtggagttgtatgagatgtatggactgagatctaagatttcctcgcattctgccagtgtacctcactagcctgtcccaccctcggttcaacaatgcctgaactctgaggagaagccccttactcgcatatgattttcttccttcccttctgcaggcctggtctcctgcctgtagagtagttgcctgcctgggattctaggccacaacggccccatcacccattgtgcagtgatggctcctggtgtgggttcccttttgtaaagagacctttttgtttgctgtttgactttgggggtaaatacaggagagtttacttgaagggaaagttccaaatcagtgattcaggaaaggctggccccataggcaagaaaatgtgcccatggaagagagccatggaaccacagattgggactggctcggagaccaggcgtggaacacactggcaagtttccttgagcaggacccctgccctcttctgaaaaggctgggctactatagatgctctcacaatctaagctgtgtagc

SEQ ID NO: 55717 - DNA, 1025 bp, Homo sapiens
attccctgactcccaatctcaatttttccctttttacccttgatcatcacactccatgcttttcctttgcaaccatttcacagttgcaagtgcacattaatttatatgattctttgtctagcaattgtccatgttgtagcctgtaagctctatgtccacgtctgtttttctcccatgctatctccagcacctagcgtaatacctgaacagattagatctcaaaaataaaaaataaaaacaaataaaagcggtagtttcttcagtaaatgaatgaatgaagagggaggctgtttagaaaaggggaggccagctagaacttggaggaggagtgtgtggataggcggagggggctgcaagggcatcccaggaggaagaaatggtataagaaaaggtttgcaggtgggaatgtgcaggggtgtgcaggagaacaggctgacctgcttgaacagtgggcttatttggggtgctgaaagaagtcctgtgttaaaatcacattagaaaaaaagtgtgaaggacttaactactaggactggaagctctgatttggggatcgtctgagtagaagagtaatatgactaagttgtgtttggcaagagtggatctgagtgcgtagagcagacagaaaggagagtggaaaggaaaggccaccagttgggaggctgatgtcctagtctgtgtgagagatgtctctgatctcagaccaagacagtgtcagtgggagaaaaagtgacacgtgcaggtggtgctacaagttgagaatcagtcagacctggtaagtcttccttggttttggagagaaaagggagagagatcaaagaagagggaggaggcaaaatagtttgagggtctcccatgaggaaacaaagtggaggacacacagtgatggcaggagggcatgacagaactggggaagcttctcagcatggattcagacccagagagttcacagtcacggcagtccagcccagacccggaggtgctgatctagggctcgggggagaggtcctgcgtgagaggtcaaggct

SEQ ID NO: 55718 - DNA, 1050 bp, Homo sapiens
tatttgtgaccttaaacatgtggacccataggtgcagttagaaaaagacaacctatttttatttatgttagaaggagtagagtatttttttcaagacatttatttttcagagtggtgatacttttactttggatactctgtgccaatttatttatagtcaagtgtttacactttttcctgtggaataattatgtctaactttttacgtgtttgttgagattatactgtggtctttctttctgctctaattatattgcacttgtataacaaatttcccacttctccctgtttctaaacatattttatatattaagatgtttgttcttgaaaggttcttttgttgtgagatcagcaacactagcacttcactattatagttttttaaaaagtgtattattcttatctgtagttatgtctgagaagtcctttacaagctgtttataaggagagtagcttctttgtgtgtgtgatgtttgtgcgtgtgatgaatttagcaaattaagttattttcctaaaaaaaaaagaaaaaaagaattcagaactactttcctctgtgacaccaaaaagaaaagtctataacctgaaaatgtttcatgttctctgctgtgaaactcttaaaacaaggagtgtattttagagacaagggaaaaaaaccacatctgctatccaaagattttagtctttttcagggtttttttgtgtctctgttgctttatataatgcaatattttgtagtgaaaatagatataatctggtttctatctgacgagtttttcatatctcatgaatggtgcgctgttttgcatataaataaaggtatcaaataaagtcctctcttttattttaagcacactgtctaaaaataatggacatgttagctgagcatgaaatatcttaatggactcaattccttagaaaggaactggtaagcacaacaaaatcttaacataaacatatttatgtagtgaaatatttgatgctcaaatttggacgtggatcagtcccataaatagatgccctacatatgatggtgacatagatcattctaca

SEQ ID NO: 55719 - DNA, 1039 bp, Homo sapiens
ctgtctgtgaaaaacaaatagtttggcactactatgataagaaaagcccagggaataagattctgaaaaatttgggagcacttgatatcaaaagaaggagatttagaattacatatagaaacaaatggaaaatcaaggctgttttgaggggtgctatcagagggtcattggagaggatgtagctttacaatatttatatcaggctgtgcattggcaggagttctgtagaagttggactgaaagctggaggtaatgacgtgggtggggcacagagcagctagggagctctgatgcggcttttgcttggggcagagtatgggaagatatgcaaacgctgaggccccaaatagtgcagtggcctttgtgggcagcacttacaggtgggcttggaaacacttgcctttggaacattgtttaaaagtaagtagtgctcccagaagggctgtaatttctttagattatctgatagcagactccgtgatgtttaccagcttcaaggagatcagaccattgtgaaattttttttttttttctgtagtaaaactagccccagccagcccaactgggaatttactgcctgagctgttttccaacataagttttgctggcaaaaccagacgtgagtgttccctcgactctaaagggacctgtttacactgactttatttttactgccagctttcaagttggaagagggaaattacgtttaaaggtcagcaggtgagcagaaggattcctgaccagccattcctgtgggtgtgtgcccgtgtgcactctgtgtacgtgtgtgtgcctgtgtatatgtgtgtgcctgtgtgtacgtgtgtgcctgtgtatatgtgtgtgcctgtgtgtacgtgtgtgcatgcttttctaaatgccaaccgttgtgctctgcgctggctgacaagacctgatcacttgtttgcgggcataatgatgggtgtcaggctggttgttgggcagtttcctatttgtttattgtaaagaaggtaaatcaatccgtgggattttctggcttggagagcaaggggtgttt

SEQ ID NO: 55720 - DNA, 1031 bp, Homo sapiens
caccgatggcaactggagttgtcatccgatggtggggagaggcgtgcagattttttttgaagggacgagccctgaaggaggataggcagacccaccagggcctcagggtacaagaaacccgaaaaaggactggaggctgcaggcaatacggtggtaggaatctctgccggtttccagcgtcgcggaagcaccaaagggcggtccctgaaggaaacgaggggtcttggggctggagagcggcgcggagcgtggtgggaatatcgtcacaacgccgctgtcctacatttctgtagcgaagacttgattacccctagctattacccgtgcaggagactgggccctggaccccaaatgagccaaagtctagttgagaaaaatttacacagaataacctcggagttcatggggtgaaagtgaccatgtcatgagaatacaaatgggagagaatccacttcgttgtctccagggtttagcacagtgcagacactgagtaggtctttgaaggccctgaggcttctgggtgtagacagagtgtcgggagcagagggaggctgcactccttggggactctaagggagttttaaaggaggtaattgaaaggcttggacctggtggggagaacaggcacaagtggaaatgcacaactcgcctcgcttttaaaagcatgcagcgtggagggctggtccaggtcaggtggcatcaaagagcggagtacagggcctctccattcccctgatggagtctgggttagtggcctgtgcttttaccacaccgtcaaacccttgatcatttctgtaaacatgcactttaaagctcattctttgtctctcctgccttaaaagaaaaagaaaaaagtttacttcctgagctaattttggggggtttagacatcacagatgtgtgccccaagcctaggaaggtgaagtgacttgctcaaggtcaaacggttggctagtgacagactaggcgtccctgattcttgaacagcctgtggcctcaagcctgaacatgcatttactctttaacattga

SEQ ID NO: 55721 - DNA, 1048 bp, Homo sapiens
gtgaaggactttgttcgcggttgatgatcatttttacgtttttgaagtcttgcaaaataaaatgggcttttcggccttctgtgatgagagggagcctgaacatttgtgctgtgctgacttcttctagctgccgagggctctctgccagccaacaggctagaagaagaaacccgagtgtcagatcagatgggctcacagtaatcagagtggctgggtttggacggcaaagcaccaggcaaaatgtttcccatccctgccagagctgtccaattctagattacactgaaagtacatgtccagtacatgataatgtgcagtagagagaactgtaaaacctactcactcattttaaaactctccatttatatattttgggggagggatgtggaacctagtcaggtctgaactttctcacgttgctatgaattgagtgtatgagaggaagtgtgtattctttggctggagtcatagagagactgttcttagcatatgactcacctcattagttgtgctgaaatctgttgtcaggaatccacaagaagttcttcatatttattttgtgtttcggatagcagattctgttacgaaagaagtacccttcaccctacactttctctttggtttggtttttatttgcatcctgagcaaagggatttttgatcaatagacctcattcctttgttcctttgtgactttacagtgaatctctttatctggttttagacctcacttactagttcctttgtgagttatgatgaaatatatctgcacgtgatctctttccagttttattcaaaccctatttagtaatgactattggctgtctcagtgatttgataagttgattcatgatagttcgtgctttgtccttgggacttgtattgtttgggagcctgataatcagtgtaagattttgtgactcagtgggccttgctgtgtagatcggtgagctgtgattgctctttctagtctgttaccatgtaggggcaggtccctaatgcactttggggttatcctcttgtgtgtttcttttatcttccacatgatg

SEQ ID NO: 55722 - DNA, 2012 bp, Homo sapiens
tgtagaagttagtaacttgcctaaggatacactgctggtaagtggtaaagcccaggattttaactcaaggctgtctgattgagaatgcggactcataagcacaatattgcactctaagttaataatgtaaagttagtttcattctttcagtagggaagatggaaggctgcagaatagggattttgatagcaaaaatctcctcattaaccccaaaaggaagtggcactggcagggccattctgaagcctaccggtagcttcagtattgttcttaatgctcttggatggagagaatgtatcttgagccaatgtattaatagtagattgctttgcttatgtagtaggcaatatatgggtatacattttcctgactattatcttaatgactattccaaattatgactaccttaaaaactaccaaaatcccctgctccagaattttcagtttcagatgaggttcataattcatggcctcacttttcccacattctcctacaggttggacgtgataagtatgagcctgcagctgtttcagaacaaggtgataaaaagggcaaaaagggcaaaaaagacagggacatggatgaactgaagaaagaagtttctatggtaagtactaggaggaatattgtattccatccttattaaaaatccatgatttttaatcccccaggcctcactgtattcttcaaagaactgctatatattaaaagagatcatagcagctgtacagatctcatctagtcgtagaggttaatgttgaacatatactttttaaaagctgttagagggtaggaaaagttattcagtcactctggcataaccagagataacagaaggaacttaggttgataccatgagtctttgcttttctctgtattatatcaaacattgggaaattcagcctctccaggcgatggaagcttccatagacttaacctgtctagaatcgacctggtcatcagagaaggcagataaggttttactagatccctgagagctgctgggtttctctgaagtgttatggcaaatagtaatgggccacggtcactcagctttagccattctccagtgaagagctgtcaatgataactgtgtggttgcaaagccacaaagcgatggtgaaaattgtaccaacttatgcactgaagaaaacatctgcactttgtttaataagcttaatgatagtaatgaataatgctattttttctgtcatttttttatactacactgtttaactattttctttgtttctgttttcccttaggatgatcataaacttagccttgatgaacttcatcgtaaatatggaacagacttgagccgggtatgttctagtttgaaagctgttgtacaaaatcctagttttccgtattatattttcccctgtattacatacaggtctaacctcaggggctctagtaagaaaatgacagacaccatctgcgtatctaccatgtgacatgcacagaatttgggcatttatatgctaccgtttcttttccctgaaactttttgaaagtagatgttattttcttttccctattttatagcagttgagagccagtaagtgggaacaccaggacttgcagttggcttcaaagccatgcttatgccttgaccttttgatgataaattttccctttatttttctacatttgttaaatagagttgaatctttcacctagttgaatcttcaacaattcccatttttgcacttttcccagctagcccattgcagtgtgttatggttatactatcatttgtttagttattctatcatttagttggaaattgttttgtacaaaaattaaagaaaccttttcataaaataggcgttatgtatccttgttatgtagaggattttgatattaaatgtgtaacaaatgttataaaagtaaatagtctagggatgtcttatttccagataatcactgaaatgtctgggaataacttgaatagcaagccaatatgtagcattttttcagtaaggcatcaagagacatgggtact

SEQ ID NO: 55723 - DNA, 4482 bp, Homo sapiens
cttaatttgcaaaactgaatggatttgtgaaaatagatacctttttggcagaaatgcaatttggcattaatcccttgatctaaaacttagaagaaaccaggctgaattcaaatttattgatggatcaatttaaagagttttaatctgggtgttatgagttccttgggcctattgtttgcctgaaccctgtggggactggctcatcagcagaattattcatggaggaatttgctaggttttaccttggctctctagcttgggacattttgtttcttccttaaatccttattgcaaccgtccagctaccaggtaggtatattgccttgtaagtgctggtacagtttgccttatttatattccactgcttctcagggattaacatctgctcgtgcagctgagatcctggcgcgagatggtcccaacgccctcactccccctcccactactcctgaatggatcaagttttgtcggcagctctttggggggttctcaatgttactgtggattggagcgattctttgtttcttggcttatagcatccaagctgctacagaagaggaacctcaaaacgataatgtgagttctgtaattcagcatatggatttgtagtacacatcagatatcttctccgtctttgtctcccacttcttctcaattaccactcattacttaatggttatgaactcattacttaatggttatgaacagctgttgccttcaaggctcatccattcttccttcgtttccatttcctctctctaccacccacgttgtagatgctcttacaagtgggatgcccacctgcatgtgctgctgtgagcaggcagctctgctcaggccccggccgccacccactggatggcagagcacagcgattcatgttggcacatccacctgtccagaaatgcttggtggccattcttcaaaatccacaagttggttgaaaaacaatctttgttttataaagcaggagaaactgatgcatctagaacctttccaaacgtccagttagtgatcaagtgttggtgtgcctgactccatttctgacccttcctgtgtggtctttagaaggataaataagaaaacatgagttctatatttctgaaatcttggtttctctattaaaaatctgttttttattcagtcaaaaaattaattgaatgtccctaattattgtgtagagccacgggccctaacttgtcttttcccttccagctgtacctgggtgtggtgctatcagccgttgtaatcataactggttgcttctcctactatcaagaagctaaaagttcaaagatcatggaatccttcaaaaacatggtccctcaggtaccagacgctttgtccttccccagtggatgacttgacagccccaagcatgtcagcctgtgaattagtgtgaagttaaggttttccaagtattacatgactcatcagagagatggatgtcttctaccccacccaaaaccaacctattttccttctatccaaaaagtggtagcctttcttttgaatgtaaactctgaatacaggcacaccatgtaacagcaatatctcttaaactggcgagcaagcttttgtaacttgtgtaaataaaaaagtgaataatatctttgttttgtattcaggtaattaggattatgactatttttattttcttgttttggacactaccttctctttgttggtatactaacggtgtaaattgtttcttttccaaagcaagcccttgtgattcgaaatggtgagaaaatgagcataaatgcggaggaagttgtggttggggatctggtggaagtaaaaggaggagaccgaattcctgctgacctcagaatcatatctgcaaatggctgcaaggtagctcttttattttaacaaacctcatagctagctctgctgttcgggcagcttgatttgaggggtacagtagcccatgataaggctggtgtattcacatgacatttttcttcttttcctcacatataggtggataactcctcgctcactggtgaatcagaaccccagactaggtctccagatttcacaaatgaaaaccccctggagacgaggaacattgccttcttttcaaccaattgtgttgaaggtaggccatttttgggcactttgagcatggcgtggtatttctcttgggcattaacaaaatcaaaaccataggcacaatctcttgttttattggctccatttctgagaacttgtgtcaagcacagagcagaggtgttttcctagctggcaggaaaccttgtggcagtttcccttccctccacctccaccctgcctcttctgtcaacaacaccagtctggcatgggtgttggagctgctgtcctgctactggagagaagtccctttgccaaacagcatgtacagccaaagagctggcccttaaaaagtgcttttatcaactctttttgtttttttagtcatcctatgtaattgtgtaaaatccgtggcttccttcaggttagatacaattaggtacagttctccctccccttctttttaaggcaccgcacgtggtattgttgtctacactggggatcgcactgtgatgggaagaattgccacacttgcttctgggctggaaggaggccagacccccattgctgcagaaattgaacattttatccacatcatcacgggtgtggctgtgttcctgggtgtgtctttcttcatcctttctctcatccttgagtacacctggcttgaggctgtcatcttcctcatcggtatcatcgtagccaatgtgccggaaggtttgctggccactgtcacggtaagaggcaggtgatggtcaccctgactcagatcagcttgcacgaatgttacactcttccgctatcctattctaaggtattgccaacttatgttttattctggatgtttgatatagttcttcttgagagccacatcacgtggtgaattttgacagtgagaaaacctcagcatttgtttatacgtaagataaccccaaagcatacattttgcttttaaattatcacgtggtcctgaacagtgcagtggagaaaggagaagaacttgggatcaagtagggggatagaatatggtagaatcctgttattatttttcttaatagattgcttttctggaaggaaggggaagcctcatgtatgggttccccttattatttcttcaaacttcagaagaaggttggagagatttaattttagacaaatttcttccacattaggatatagcaagaatctgtatagaattccagcctggttgagtgaagtaataatcttcctaatattttttaggtctgtctgacacttactgccaaacgcatggcaaggaaaaactgcttagtgaagaacttagaagctgtggagaccttggggtccacgtccaccatctgctctgataaaactggaactctgactcagaaccggatgacagtggcccacatgtggtttgacaatcaaatccatgaagctgatacgacagagaatcagagtggtaaggccagggttaccacacacctcagccacctgctgacttcgcttggttttttttcttttaagaaattgcatgaaatttcttttttttttttaagctcatggcagctttttctttcttttttgttttttttttttttatcatttagtgaagagtcaagggtatgggatattgattttttgcatgtcagtagaaactttaaattgccctacaaacgtgactgaagaatgcctaaaatgtgattggtttcattaattgggaaatgagatgtatcactgcagatttctatgggactttaataggagaactgagaacacagcctttgaagttaatgcattgttgttctgttgtgttttcttgcctccatcaggtgtctcttttgacaagacttcagctacctggcttgctctgtccagaattgcaggtctttgtaacagggcagtgtttcaggctaaccaggaaaacctacctattcttaaggtatgctcaagagttaactaatggagggatgtagacagcacatgagaactgccatttgagtgttaaaagtagcaaattacctttgtggtctgtgtgactgttcactgtagaacacctggagtggtctgtgcagtactttgctgtgtgtaacttacattgtgttgcctgtagatcctgatgtattataggaccccctgctccatataggttgattaaaaagggaagatgcagtaaaaatctgaccaaagtgggaggggaggagacggaagacagtctttattggtgaaaaacctaattcatctgcttttactactcttgagtttatatgttatcacctaacctagtggacagtgagagctgagggctgcagtgactccataatcgtatttgcatattaggatacagtagattccagtaactcctttaagccatttattttcctgaaatagctcagcttatcttatcttattggttcttagcttgtttactaatgatgtaaaaataag

SEQ ID NO: 55724 - DNA, 1049 bp, Homo sapiens
ggcagctgaggcagataattccatgatttgccaaatccaaataacttaatgtcatcatcagtgggcaagtctagaaccctaatatcctggtgctcaaaattagtgttatcaattcagtcttctccacattaaacaatttccaattcctttgaggcctggtgtgatggattctgtctttcaaatgctttttttctttcagtgactctatcgttcataaatgttaaataaaaccctcactctgttataaaaatatagactttaaaaattttccaaagtaaacactccagagaaaggtaggcgggctgaataggctgctgttgtccttcttactgcccagcgtcactgaaattttcaaaggctcctgtcctcctcgcaggtttctgccacctctttctgccagatgaacagtttcctgaagggttccagtttgacactgacgatgtgaatttccctatcgataatctgtgctttgttgggctcatctccatgattgaccctccacgggcggccgttcctgatgccgtgggcaaatgtcgaagtgctggaattaaggtagtgcccaggcgcctccttggcttcatctcttagtgccttgggacaccctactcagtgaatgttgccttttgaggtccagatggccagctgttctatctcacctggagtattaatttctcatctccaaagctttacttccacccagaaaagaccagatagtattaaaatatgatggtgtaaacacacgaggaattaaaaattttttggaaagcaattgtgtaaaaaagaaatgtaagcaaagtaaaaacagcaaaagacttgaagttttaaaatacttgcattattctaagttaatgtaccttatgcaatgaatggcatatcttctgtgttttcagttaactgtttgttaatgagtgtttggtgtcctctgtgtatctgtctttttttaagtagctgaatattactcaagtgcactaatatcctgttgctgggtatttggtttctgttttttactctcaggattttattttatttattttttgagacagagtctt

SEQ ID NO: 55725 - DNA, 1096 bp, Homo sapiens
aagtataatcactgcatcaaaaaataacaattttgaattcttgtcacatgttgcttttcctccaagttgtgccaatttgagaatgctagccagtagcatgtggtgtcttcacagtcccaccagcatcagatttttatcctttttttttttttttttttttgctggttttagtaattttcaagtatttttatgtaactctgtagaaggaaaaatagacattgtgtatgctagtgattgtataccaagataaaacctgagtattgcctttgtgtttcctttctgtggatatatatgtttatatttttggctaatcgatgtttattagttttatatttgcattcctttccttttgatagtctaagccgaatcatccttagtatttactcttgcctactggatataagactttaaggtcatttacttggcagttgcattcaacacattgtcttgtttattacaggtcatcatggtcacaggagaccatccaatcacagctaaagctattgccaaaggtgtgggcatcatctcagaaggcaatgagaccgtggaagacattgctgcccgcctcaacatcccagtcagccaggtgaaccccaggtaaggcaggaagctcaaatcacagtctgctgtgaacaagcaaatagtgatggtttaaaatcttcagcgtggttctataatggtttgcatctaggcttgctctgagtaggaaatgtacctgcactgccagaaagcaaccttgtcattcctaagaagggttttaagtaagagcaagtcataataattagcacttagatggtatttactgttctaagagcttgatatggtgacctattatttgcagagcagggaaggtaaggattcaagaggcttttgaagtacctcagaactggtgaaatcatgcagtaaattcagcagtctagcttctgatttcatgctgttaaccactgagctctactgcctagcacctagcatcttgacactttccaggtccacactaacaaaataaaataaggaagggacaattacttaggccattcaggcaaacacaggagacatttggcaatgaagtaaaacagataatagcaaattggttttg

SEQ ID NO: 55726 - DNA, 2658 bp, Homo sapiens
tggctcactgcaacctccacctcctgagttcaagtgattctcctgcctcagcctcccaagtagctgggattacaggccccaaccaccatgcccggctaatttttgaatttttagaccaccattttggcaagctggtctcgaactcctgacctcaagtgatccactcacctcagcctcccaaagtgctgggattacaggcatgagccacacacccagctaaaacttggttatatttcagcatgtctaataaagatagggaaaggaagaatacagacaggcctgccttagagatcatcatgagcctcaaatgagataaaatatatgaaaatgctctgtaacctgtaaagtactgaacacttaatagcttttatgtgctggggaaaattccttctttgttttgtttacaaagtgatctgcataagaatatcccctcttgaggtgatggacacatgctggtgatgtgatgcgtgactttttttttttttttgtcctaattctagggatgccaaggcctgcgtagtacacggcagtgatctaaaggacatgacctccgagcagctggatgacattttgaagtaccacactgagatagtgtttgccaggacctcccctcagcagaagctcatcattgtggaaggctgccaaagacaggtcagccagcacaaggatcaggctgctttgggcactattggctttagggattggagttccagtggaaacagagcaacggtgatggatggatgcatacctcgctgtattagactcagtataaataggccagtaggaagctcataggcatagagagggtgacttgttaatggtttagcagtgacagaagcactttaaagtccaggtgtccactgtgtcccagagcctgaccgctccgtggagtcatctgatatggggtcctagtatttgcaatagagatgtgagtggtcagactacagggcgtgcatacaggaatggcattttctggagtgccacccaccagagtcattactttgagtagctcttgttaatgctgggggctatgtttgttgtcacttctcagttctgttatttggtgtagggcctgtgtgaatacttgcctgtgacggttctcaggcttcataaatagtctcaataggaaaggagcagtgtctgtaatgagtgctcagtgggggcatgcatcgcactatttccatcgctaggaaaagtgattggtattaacccgttttcccttttctggggtagggtgctatcgtggctgtgactggtgacggtgtgaatgactctccagctttgaagaaagcagacattggggttgctatggggattgctggctcagatgtgtccaagcaagctgctgacatgattcttctggatgacaactttgcctcaattgtgactggagtagaggaaggtgagagctatttaaggtgtacaccaagatcttattcagatactgcccattagcatccatttctgtatacttcttggatatgttcagtttccagtgtgcttgtctcataagctaacagtaaaaaatcttggttttcataggtcgtctgatctttgataacttgaagaaatccattgcttataccttaaccagtaacattcccgagatcaccccgttcctgatatttattattgcaaacattccactaccactggggactgtcaccatcctctgcattgacttgggcactgacatggtgagtgtcacaacagtcacagatcgatagtagtgaggtgtgagctgtgtcttcattcactggcactatgctcccagcatccatgaggctggcgttgggaaaagaaattctcaggaccagtatccagtgtgtgtcccaatcccggcttcacagaatcagtattaccactcttcaaggcagcagttaacatttgtttatcagatgggaatctttatttttgtatacttcacctaaaagatttttaaatgggagggcaagaattttataacaaaaggttcacaatattagcttccttatttttagtaactaaattccttctccccaccccttcccaggttcctgccatctccctggcttatgagcaggctgagagtgacatcatgaagagacagcccagaaatcccaaaacagacaaacttgtgaatgagcggctgatcagcatggcctatgggcagattggtaagctgcagcctggagtgggaagctggcacatctaaggcatctgaggtgatggtgtccacctcaggttgaggttgatttcagagactgcaaatccaggcgactttcaggtctaggatgagccctaacggagtgagcctgtggagtttctctgaactctcttccatgtgagaatacatctgttgctgtttgcccagttaccttttgtggaaactggttttctatactgagcaccttggaactgggctcaactctgcctgagaaatgaggatgtccttcctcactgagccttgcggaacaggaggcatggttctaaggaattgtgtgtactgacgcacaggctgctttccctggagatacacacttatctgtcactcacttggatggagttaggcattggagaaagtatatgtgtttgagagtttggctggtaggtcaccaccaaagggtgatcctccatccacctcacactggacttctgcccccacagtgcagcatgact

SEQ ID NO: 55727 - DNA, 1335 bp, Homo sapiens
aacttggagcagcgtggttaaattggatgccagggggaggagggtcctgaaggtggggaggagagtcagaaagtgccacagtggctagaaaaatggcagcatgtaggaattttgaaagatggaaaagaagttatcatttgtcagagattaaaaagtagggaagtggatttcccctaaaggtcatacccttagaagcagctggtcaagtaacaggtgggcattttgagagcaaggcacatgtgtctttgtgtaggctccaaaaagtgactcaaaaagcagagggccctgagattggagtgtatgcctggggtcctccatcccatccctcatagcctgtgagtgaccaggcaattctttcctgtgcttttatcaaccagggggaaacactcctccatatgtgctctcccaggcctgctgcagtaatcagctgaaggctatacaggtacccttgtgtgtgaggttctagtaattgggttgttttcccaacttaggaatgatccaggccctgggaggcttctttacttactttgtgattctggctgagaacggcttcctcccaattcacctgttgggcctccgagtggactgggatgaccgctggatcaacgatgtggaagacagctacgggcagcagtgggtgagtgggcacctctgacctgaccagtgtcagagctcctcaagccccagaagactgaggccacactgccaccagccatgcaggtgaagagccagagctcatcttctgtcttctgcatttcagacctatgagcagaggaaaatcgtggagttcacctgccacacagccttcttcgtcagtatcgtggtggtgcagtgggccgacttggtcatctgtaagaccaggaggaattcggtcttccagcaggggatgaagtaagtaatgaaggacatgtcaaggccttggctcaaagaaggggactggtgatttgtaaaccctttgccaaaaactaaacatatgacacatatagccaggtttctggaatctctagtttatagagcaaatttaggaagcaagaaatgtagctttctagttttttcatctgacctccaagttttcaagtacagctaatacataaagatgttgatctgccattttaatgcatagcattagaagataaacctttatttgcaccttttaagttttttctcccctactttgattttaggaacaagatcttgatatttggcctctttgaagagacagccctggctgctttcctttcctactgccctggaatgggtgttgctcttaggatgtatcccctcaagtaagttgatcctctggtagctccaaaaagtatgaaatagtatgtgtgg

SEQ ID NO: 55728 - DNA, 1793 bp, Homo sapiens
gttttgacccacactggcaggtctttatcttcaaaatgctgggatattaggcagatggtcttaaaaagcttcttaaacactttagaaatgaaagaaagaaaatgttcagttgctctgggatggttaacagaaaagtactctgctcatcctataaaccaagtcttatgaaatccaaactgaagatgagtagggattccattacaaagtctgcagactgatttcctctgcgtctctaggccctgggcacatggagtagcaatctgttttaagacatttttatttgttctgttaatgactcagtagttaactgtgactgtacttggcttctcctttcaggctgattatttcattgtcactggtgatgtgcaatttctctttctttatttgaactgtgttcgtgtgcatataaattggtaccttactctatttccagacctacctggtggttctgtgccttcccctactctcttctcatcttcgtatatgacgaagtcagaaaactcatcatcaggcgacgccctggcggtaattatgggcattctgactttggttggaggaggagtgggaggggctatagttctattggttttttgtttccctcaaggtgtctaggctccctcagtggtcagtctgattagctaaggtgactggaccagcaaactgaccatagtcacatcttcagaatgtagatctcagttacagtttgaggactggtcatgttttagactttaaaatacaaaccaagtatgatttagtgaaaacttgtcagaatctaaaccatctttccaggtaacttggtattcctaaaaacatgtaaataagtacagttgaggtcccatgtttggattttaacacacccgacccccatcatcctccggttggttttcatccctgtttccctctgtaatgctggagcgaggaagactcactgtagtgtgtcttgtctgtctctttgccacccacaggctgggtggagaaggaaacctactattagccccccgtcctgcacgccgtggagcatcaggccacacactctgcatccgacacccaccccctctttgtgtacttcagtcttggagtttggaactctaccctggtaggaaagcaccgcagcatgtggggaagcaagacgtcctggaatgaagcatgtagctctatggggggaggggggagggctgcctgaaaaccatccatctgtggaaatgacagcggggaaggtttttatgtgcctttttgtttttgtaaaaaaggaacacccggaaagactgaaagaatacattttatatctggatttttacaaataaagatggctattataatggaatttgtctgtgccctcgtcgcttctttggtacagatgtctatgtgatctggagctgtggttttcaacatgagtccctgaccagcagtttatcagcatcacctggttgcttgctaggaaggcgggcccagacccactgagtcagaaatgcatcagcaatgtggcttaataagccctcaggtgattttgatttacattcaagtttggaaaccactggctaagaggaagcattctgcccgtgctcttttagttggagtaggtgagtttacctgacccattttttctggctgctgcctggggtgatagggctgtaactccacctgctgccttagcatctggctttttgatggaagagcacctcgcctaaaggatttccagaccctcagagtatactaaactgcagatgaggcccttctctttcagtctaaaagagacctgaagccttcctgctttccctccagagatcaccacc

SEQ ID NO: 55729 - DNA, 1085 bp, Homo sapiens
gaacacctcctgctttcagagctgctgtaaaaggctcccctcagtctcagccatgagtggtgcagagtgctgttaactgccggtgcttctcccaggctgtcattgccaactgtcgcctccaagcaaacacaacaagcaaactccttacctctggcaccaaacagtgatcgtgatctgccagatgatcatagtgtcttttttctccgaaaagcttaactcagtcctcatgcttggttgctgtgcacttccaagctgggccaatgcgggaggagacagtggtgactcctgtacactggggctgtggttgctgcacccacccactccagccgcagaactgggaggggcaggtggtcttggactctcctttcttggggcactttcccctgggatgatctctacatttgtctgcaagtcatctttaaaatgagccatttgctcagaccaagataaggaaactagaactaaaagatcatgggattagaaggttgtgagtcaggtagcaactggagcctcctggaaggtactttactggcccagctgtgacggcagggccagtcacacaagacgtctcttgtgaggtcaggctggcactggtggtatccgtactgcgactccctgtatgtctactttcggcatccctggagaagaccaacgcacatacgctgctgcgatgaaggtcatgggcatttcctgatgcaaaagatttgaaacactctgagactttagcttttgacaaggggaccccagagaacgttaagccagtgtttctctgacagctctaagaagccctggtcttctgggaaaccctggagggagcaaggcaaaaggaaggctctgaacttcacacctgattttccaccagaacatttctgcccttttctgtgtgacaatcctttgaatagaaagttctacagccaaacatttgatttaggaagagcaggtaagtgagctgctcttcatgggtaaagctggcaccaaagtcaggcctgctgtgggttagagctttcccaactttctaaaagcaggagtgcttgggctctcatttctacctctacgctcaaactctcctgctggccctgtcacta

SEQ ID NO: 55730 - DNA, 1033 bp, Homo sapiens
gcaaaaaggaactagatagtaagaagcagagggagacacttctttttttcttctttttctaaatccaagactttcaaaagctttcgtgtgtgctttcctctgctcccagaaccattggctgcatccttatcaactccttgcagctgctggcttggccaggagttgaaaatgtgactgcctctcccttgggtacccataatggttccatgttaagtcttatgtataatttttcctaatttttttctaatgttctttttctgccagggtatgttttaaaaagggaaatagagtattatggaataagattacccttctatgtccttcgtgcaaatccaaccagtatttatataaatgaatgtatgttccctcatgaggcatgcaatgaaaatgacaatttgcatttatgcaggattgagcagtgttttgctcactacattctgggattcctaagctttgtgggagtagttccaaaggtttggcagaaacgagagtcaagacaccagagagtggcatgctaggaagaacagccccggcctcttcagctgccctcttttcttactttctcatccatgattatctacagtgacaagaagataaaactggaccttgcaatactagtcacagcatgaaaaatacatccacccctccttttgatagcaggttctcagtatgtaaagggaatctttttggctgcctgcttaacgcattgcaggtccagcattcctgagctgcttttgattcataaaattaaccaggcatttgagggcttctaaaagtgcttgatggacagcatttctctcaatgaaagagcaggcactgctccttggtcaaaggagagtccaaccaaggaagcctaatgagttattcctcacccaatacctggagaccatgacctgggggtgaggggcttccccagccccatgtgactgggctgttctttcctcagccctgctcttaaggggcttaacagctcttgctggcagtccaaatggctgcatagctgtcagtccaaaagtcccattatcatatcccg

SEQ ID NO: 55731 - DNA, 3813 bp, Homo sapiens
aaaagaatataagggtcatcttccaccattaatggtagcaggggaaagacaaggtggtgtgggagtgtcaccgaggagcttccactgggtcaggtgaggtcttcaaaaggaaatgtgagcagtccaggttctcagccctcattgtcttgtctctctcatgattcttttcaggtcccaccctccagtccatcatctgctccaacgacgcactcttctacttcgtcttcttctaccctttccccatctttggcattcttatcatcaccatccttctggtgcgtttcaagagccggaactccagcaagaactctgatgggaagaatggggtgcctctgctgtggatcaaagagccacacctcaactactcccctacttgcctggagccccctgttctcagtatccatccaggggccatagactaagcgggtgatgccccagcggatgttggccacggaggagctgaggctctccctttctctgtgattggacagttgacagcacccaaactctggggtgcatgtgtgtggaaagttgtcagacttgaaaagtgttccaagttcccagtcagtcacagagacagactgcctctcggtggcagtcttggttggttagctatttgcgcgcaaatgttgtgatcctgccattatagatttcttgtttctgtttttagtaatgtagtgagtagctccaggtgccacatctactcacagatttatctagtattctcagatagatgttacagggcttcttattctttgtaatgtactctttttaaatccctttagtttaccctttttggattccttaatgtggacgaatttctcttacgtacaactgacagcaaaaggaagggcgaactttctagtgacaaggaatctcttccaagactttgtttttgcacatttgaaaatgccacccatggatcaaaatatacccaaacgttttttactttcttaacaagacttaagaattgtgtgtagtgtgggcaaaatttgtatgttgtcttttccctcagctggagttattggaaccactttgtagtcaagacgaaagcactgaattttgcttcaaagaactgtgtatgtacaagagaaatcctgcataaccccattaggagtagatggtgcccggcctatctgtcagggaggcaaaaaaggcttcatcccatccttgccaaaaaataagaaaactgtcttggagaatgggtcagaagccccaaacggcacacactttccaaattaaagtgggcaggggctgcttttagcagctgctgacctgcagatttgtcaaagccagtgactagagaaggaagggagaaaggctggctgttggcttgctctgagctgcaaggatggtctctaactgattaactgtgagcaggtgggcctgtgtcttcaggtgctttgccaaactcttaaaagaaagtgtccagtgaacttggaagtgggcccctgagctgagcacagggccaaagcagccatggcagacacctgacggagggcacggggctggctgacactaagtttggtgggacagtgaggggtgggaggggggtttccagggcctggtgttggagagtgcagagaaatatctacctccctggaggtgtgaagactaggtttttcttcttccttccaattagattttccttaattatagtgatgtcttccttattcatttttctctccctgcctctcactgccataagaatatcagcctgggggcagtccagacgcagccctttgtcatcctttctgtttgcctagtctcagcagactgtgatcacaaggcattgtctgtgggatttttcctttccctttcttgatctctcttgtggttctaggttgtttggttgttcattgttatggtggctttttattttaacgccccttgagccccatgatggctggtgtcaccctgttcttttacactgttgggccaggtgctgcttgtccttcttagggcatcatcaattgcaaatatttccttttgctccctttatgaagatgttcttatacccttgctttcccatatttttctggccaagcatgccatctcctttactctgggaacttacatcctgaatcccaagagggggtcacagtttggaaaaagtcatcagggattctggaactaagtctgataaaagattccagtgaagccctgttctgagaacgagcagactgcaggggaggccatgggattccccaggccagtgtctgtgctgatccttcaagggtctgcaggtatgcaggtggcctgggctgctcggcagatactttgctgattcccagctgaggggagcatggtggcgattgctcagccattttctgacagacacacagacctgccttttctcccccaagtataccgtaccctcctgtgagacagtgtgtgcaggcaccaccaccttaatcctgctgttgcctgacatgctgattctcatttattatgctgcatcaacacattagaggtacaggagcggctcagtcatgaaaaaagaaggtcttttgccccatttctttatttcagagatgtgggctttcagtgggaatttgctgactcctactttataggctgagtcaatgagggaagatgactggcgtttcctctgtctaaatgggaggttgccagagcgctggctgggactaggatgtgtaactaagatttcagtttgaaatcttagatttcagttcacggcgataaagaagtaggtgctgcacacaaatatgtaaagcaattgtaggaaatttgaaaggaaaaaaagaaaccgaagccagtattttaataattgctttttctgtgtattttgtattgggctgggggatagcatcaaaggttgaactttttgagctttctatgaaaaaccccaggaccttctttctttggccatttctatggaaatgcgatgtcagatggatggtaatggtgccctccagtggctgtgagacctcattgcgcattgtctactggagctttagtcttctgagacggaggaaaactgctgaatactctggattcatctatgtctacaatgttgcatttatgaaaaactacactgtgctaggcgcattctaggacatgaatatgaccacaccctctttcaccgggtgtttctgtagcaagttttcatattcttttcaaacaatggtttctctgcgttaattattgaggaaaaaaaaagatggggtaagaaaactacccatgcatgatgtagagagctgttgatttgtttctgtttttttaaaggaaaactatttgtaagatgttgcactaaaacattttatatacacttcagagacctgtagtaaattatgttgaaaatacggctgtttacatttactgcagtcttctatccttctttccccttactaaccagcccccttcctctgtggaactgtgctgtgggagcctacagttctgcccttggcattggcctgctaggctcaaggtctgtgaattgcagtctttattattacaccccataaccttcaaatgataaaaacacctcttcctcaagacacttcactgccatctgctgcaacatatagtaaatagacacctccaccccgatgatcaaggctatgctacctctagagctgtgcaacacacaacacacctagcccctgaaagccaggttcagaatgtagatcttataacctgtagcgtttttgttggggggtggggtgggggtagaagccggatgagaaggagagcaggaacacaggatggccttctctagggcctctgcggcaagtccacaccatccttttccaactatgaagtgctgccctggccatgaaatgcagcggg

SEQ ID NO: 55732 - DNA, 1073 bp, Homo sapiens
cctcctctttgctaattacgtctgcaaagttgctatttccaaataatcacattctgaggttccaggtggacatgcattttggagggacactattcagccactacaaggggttacagtgaaaataaacacctcttccccccgggattcccataaggaaccacactaccagcttcttatgaattcttccacagatattttatgcagatataaacagatatgtatgtcaaaataaaatatgttttctgcatacaatgacatggacagtaacattgttctgtactcttaacaatttttcttggatcaacttccacctgtagcactgcctatgccttttcaataggtgcataatatcttatagtatggatgttactatcatgtgtttaatgatggacatttagtttattttgagcaaataaatttaaacaaccccttccctgtttgtcccttgtcattccccagatgcttccctgcaggtggacacagtggtccccaatgccacggtctctgagaaggcagctttccagctggactgtagcatcgtgtcccgctccagccaggactcccgcttcgctgtggcctggtattccctgaggactaaagctggggggaaaaggagcagccctggcctggaagaacaggaagaggaaagggaggaggaggaggaggaggacgacgacgacgacgacgacccaacagagcggacggccctgctgagcgtgggcccagatgctgtctttggcccagagggcagtccttgggagggcaggcttcgcttccagaggctctccccggtgctctaccggctcacagtgctgcaggcaagcccccaagatacaggcaattactcctgccatgtggaggagtggctgcccagccctcagaaggaatggtaccggctgacggaggaggagtcagcccccatcggcatccgtgttctagatacaagtgagtttcccaagtacagagggaggatgtcactgttggttccaactgtgtctggaagataaatttgagcttgattatgggttaataaacagttttcttaactgtcatgggcatttattagtaggatt

SEQ ID NO: 55733 - DNA, 1061 bp, Homo sapiens
acctcggcgtcccaaagtgctgggattacaggcgtgagccaccttgtctggcagtcttttctttactgatgtcatatcagttccattcccaacctgagaaggaacctgtgtgggtttttgtaaggatgttggactacaattcgtagggctaacacatgaacagattaaactggctttcccctgcagttcttttgtagttggtggcccagcattttctagccaccatatgatcagttttaaaagtttactcttgcttttcagaggtttctcaccatccccttcccccgcccttcccagccacctgccccggccagcgacatgttttgtggtccgttgtcatttggatgtgcagtctctacagcttgtgcttgtcctcctgtgagcatcagaactgatgagggctacgactttgggacagctgttattgtaacattgagctccttgaaacccaggcattccgacacacgatcaaggaactcagaatgtttagggagccacatctgagaaacgtttctcctaatggagtgtgtgctgccgtccttctgtatttggaaggcatccattcacctaccctgggaaagggtgcgtacgaattgcttgttgtccttttgtcgctgacgtctcttccttactgttccagacagccgcctgaggctcagccaagcccaggggaacctgtcggttctggagacccggcaggtacagctggagtgtgtggttctcaaccgcaccagcataacctcccagctcatggtggaatggtttgtatggaagcccaaccaccctgagcgggagactgtggcccgcttgagccgtgacgccaccttccactatggagagcaggcagccaagaacaatctgaaggggcggctgcatttggagagtccttcccccggcgtgtaccgtctcttcatccagaacgtggctgtgcaggacagcgggacctacagctgccatgtggaggagtggctgcccagccccagtggcatgtggtataagcgggcagaggacaccgctgggcagacagctctgacagtcatgcgaccaggtgagggtccacg

SEQ ID NO: 55734 - DNA, 1014 bp, Homo sapiens
acttattcatatataagtaattatgaagtatttacttataattgacttatcagttactatgtcttattatttttatactagaatacatatatatatacacacacacacatttgttttctatctcttctactagaattgaagcctcctgagtaagcatagggacttggttttcttcactattgcttgtctcctaaggaggcctattcagtaagccagtggaacccgataccaaactccacatgtggcctgtgccctgctgaatgcagtgagtctgttcccctcctttgcctgaggttattatatttccagagattctcactggcctctcggtggcattttctgctaacctctgctggtgcattaaacaggaagctctggtctgaagtgattcccattggcattttcggtgacatatgtcctgacttcaggccagtccctggggcttttgaacattgaaggttgtcattaggcccaccagtgttcttttggttcctatttttcatctgttttcagttctgattattttctctactgaaagaacatgatcacccccaccactctgcatttccactctagtcatcaccattttttcctttcctcatttgtactgaaaccaagagattcttggaggatcctaaatttattgaggggatttccctctctgagactacaatcaagctaagtgggacagtgcggaaggactagaaggacccccctcaacacatttagtgaagtctctgttacagtgaactttaacaccgtaaacatggaactcagaggacaccgagtaaaacagctttcctcgtttctttctttgtgttgttttctttcttcttttttctctgcttctagttctttccttttccctgctgagaaagcctacacttacagagcttttggaaaatacatacacacacacacacacaaaaatcccccccaaaaaaacaaaactcaacaaagaaaataacctttcaaccctgagacaaccagagtcaatatcttcttttacatatg

SEQ ID NO: 55735 - DNA, 1050 bp, Homo sapiens
gccccaattaataatacattttaaagctctttctactccatgctgaacaacccagtttttttggccaagaaccagataattcaggtggtgtcatttgcactgatatagatatcatttgcatgcggtgaattgggttggaaaggaatgaaaagggagccggttgtttcaagtattataggaatccaatctgaaaagtcgactggcaagcgaatgcaaatctagtttccagagcttgggagcttaatggtaaaccctgtcctggattcctagtgtgccctagaggactttctgcatttgaagaagggagaaggcagaagattggacttgctaacaaaaaagatgaacccgggagggtggggccgtggcacacaggatttctctctaagtggtgcctggtgtgttcttgatggcgtgagaaggtctgtgggtttgtgaattcaacaagtcttcctggagagaatgtccgatttactgcgggagatgctccgcagtgttgctcagtcatggcattgggaattggactttgccacaccttggcttgctaaatccttccatccattcagaacatttgtctgtgtgttacagggagaccaagtggcagtctgtggctttcacaagttttggttctgtgatgcatgggactcaatcaacccttgatgctgccaaaccaagcttaagccagctggcaggccagggtcatgaccagtgggctgggtcctgggtctggatgcagttcctggggttgagctggactaaagagacaagagtctgaccagtagagtgctggagcctggccaggcatccctgccctgcccctgcccctgccctccacacaagctcggttggaggaggcctaggttgctgtccctgggtggaatctgcaccttgcccctgctttctttctcagctgggaagtggtttggtccctgtggcggaaaaactaagtgtgaagagagtggtggaggtggaacaattcttgtactattagttccctaagaggaacttagaattgtttttttgttttttttttttcatttttagtagcgggaa

SEQ ID NO: 55736 - DNA, 1078 bp, Homo sapiens
gcatgcattgagcacctactaagtgccaggttgccatgctggtgaggctgctgagatgggtgtgtcacgttcctgccttgcgggctctgtgggaggcagcaggcctagggacaaaggagagcagaaaagcgttacaggtgtggaggcagagccagcacagggcatgaacgggggcagggggcgtgaggagggaatggggtaggggtgagggtgggaggttgggaaggaggagtggagcatttcaggctcagagaagagtgtgaataaatatagtcacggagggtgggagcagcatgcttatcttgagatgactaaagcatggggtctggggagggttcacccccaggcaagctggcagggatcaagaagtcccttttgtacatgggagcatggggtgagggtgggcatatgtaatagctaaaagcaaggacagaccagacggcctgggtttgaattccagctctaccactaagccagctgtgtgaccttgggcaagtgtctttataaaattgggaataatatttatttcataggattggtgaggaccaaatagttaatatttataaagtgcttagaatagtgctgagcacataggaccagatgaaagtttgctaaataaatgagaatatcctaaactcagaaattaggactttagctcatacccagatcatatactccatttttgtaataatttataatgttccctttacccagaaatgaaattcatatacaatataacattcctaatcatatctttaaaatttgctatattgtcctagttgtgggataaagaaagttttttttaaaaaaagtagttcatagtaaaataatgagtttcagtgcgtaaatgctcaggacagctatgctaggaggcacagtcacagtcaacgctgtctctaaatgcacactgacagtcactgtatcagacttggcaccatgagcaggactgccatcctgacagggtttctgaagtcctgagtaactcttgctacaattctgaacaaaacaaaggaaaatcctctcttgactgacctggcatattttaaaaccatgcaaaataaaagtattgtgattatag

SEQ ID NO: 55737 - DNA, 1061 bp, Homo sapiens
ggaggctaggaagagcaaaggtgggtgcttgaggccgtgcaggactcccagagggcagctgaggcaccaggagagtgcatccccttaagtgttactgtctctcctctattaaatatttatgcatttagcacttaatattttccagagagcttcatatgagtttttactctttcctatatactttggtgctggtgcattcattttggggaaatagaagtggaaaaatacatgagagctgactgtgcgctggagactgttggacacttggtgtatattacctcacttaatcttcactgcaaccctgggaggaacatattgctttcccattttataaatgaagtaacagaggctctgagagattctcacttcctcaaattaaacacctagtgaatgggggaagttgggatttgaatccaggtgtgccttgttaaagagtaattgcggtagggagactttgaccttttaaaggctatgtaatcagagattattctttcagcattcagttaatcgtgtcctttacagaagaattttctccttgtagattgatgatgtggaggagttatagcactagtgttactggtagtaacaacagtagcagctaatattcactgagcatttcttgtaaaccactgtgaatgctttggttcctcgtttcttaatccatgcagtgctgtgagggggaccgttttacccaacttcacagatgaggacactgacacagaagttacataaattgcccagtgtgccatagtaagtggcagagccaggattcaagtccagacaggcagtttggctccagagtccaagttcctaattttattattatatgttctagacaagtgtttttcttctcaggaatcctctttggtactgtatacttgtatttaatgtttcctctctctggttaaccacccctgatttcctaatcccctttagcaaatccttaaatttgttttttggaagttggggtcataagacattggtagaggttcctcaagacacagtttgctgatggtgtagaagttttatcttgtgcctcttttaactcctgattcttccag

SEQ ID NO: 55738 - DNA, 3951 bp, Homo sapiens
tctcatgtgccaggtactatttgtaatatttataaacactgatttatttaatcttcacagagactcattttacagattggaaaacagaggcagagagaagttaagtaactttaatgtcactcagctgggaagtatcaaagtcttggctgctggctccagagtctagacctttaaccactgtgttatgctttccatgggtaaagcaacctaaaaaggcccctggaatcagttacatgtggttggagactaactctgtcattgacttactaaatgcttgatattgggcaatttatctaacctctctctgcatcagtttctacatctgcaggaagagatgacaagcctgcctgttctacaaggttgttttggggattcagtggagcatgatgagagcaaagcagttggcaccatgcttgcacctagatagtgctcaataaatactggctactgttagctttatgattgtgatcaatgtatgaatattaaacagtatttccaggctgaaggagctctgaggtactcatattgaggagtcagtattagggcttagcagtgctgcccattcaataaggaatattgagagacccacagccgctgagcctgcagaaccctgcatttaggataattgtcccaccccactggaggtccccacctgctctgtttttggatttcatgagggacgtgagaaagggactggaggccgactccatctgcttcccttctcggcaccagtgcgctaagggaccaggaaaagtggtgttggggctgtgtggttgtgttttcctcctgtgcaatggaggaaattggctttggggttttcttttcctgttctctcatggaatctcaagatttctaggagcaaccctgcctacatgcaatcagtccctgagaggattgtgatgtctaattccaggggaggagcaaatgcacgaggatctcactgggaagggttaggctagtgctgctcagggggaattgtggtgggcctttctttggagtcttggaaactcttggactgggcctcagcaggatactaaaagcaacactagcctgagagctcaaaaggggctccgagagcctctgtcccacactgcttgctttgccagctgccccattgctgatgtcatactgccctgagaaagccacatgcctcctctggttgaatctctctgctttctctccagaaatgggcttcgcagtcacagccatctcccggacaccgggggtgacctacagcgactcctttgacttgcagtgtatcatcaaaccccactaccctgcctgggtccccgtgtcggtgacatggcggttccagccggtgggcacggtggagttccatgacttggtgaccttcacccgggacggaggggtccagtggggggacaggtcctccagcttccgaacccgaactgccatcgagaaggctgagtccagcaacaacgtccgcctaagcatcagccgagccagtgacacggaagcaggcaagtaccagtgtgtggcagagctgtggcggaagaactacaacaacacctggacgcgactggcggagaggacctccaacctgctggagatcagggtgctgcagccaggtgagtgctgcggacctgtgggctatgtgcccatgctgcctgagcagacgtgagggaaaaagaaaggtgtgcgtggagcccttagcgtcacttccccctttcccagctcttcatttagacacattgcaaatcaataggaagttttaagaatcgtgcagtggacacttgtatttcctttccttgatagccagttgttgtctgacggcatttgttttcttcctctgtgtgtatgtttgttgttgtttttgagccattggagggaaagctgtggacattgggacacttccccctaagtacttcagcatgtaactcctaagaacctacccacccactgcaccatcatcacacccttggggttttacgttagtgtagtcctaccacctacatttccccagttgtcccagtcatgccctttatttttccctttcagattaggatccaaccagggatcacacatcacatttgttatcctgtctctttagactcctttaatctagaacaattccctaacctgtgtgtttgtgtgtgtgtgtgtgtgtgtgtgtgtgtatatgtatgtgtctgtagacatggacatttgtgaaatgcacaggccaattgttttaaagaaagcccttttctttacttaacctcatctcctataatcctcatacaattatgtggaagtgatatcattgtctcctgttcatagacaaggaaattctgagtaaagagggagggtaataggcacctattgagcatcttctttgcatgaggcgctgaaggtcagttactttattagaattgcacaacaaccccaggaaagatttaagtgactagcttaaggtcactaggctccacctagtgaatggtggagccaggatttgaaccccggttgtctttctcccacaatgttgcctgcacccaggccctgtccagttgtatgggccctgaatttgagctcctttctctatggaggctgagtctgtctcaaagcggatcataaggatgcattaatttggggagcattagtcagtggggctttctgcaaacactctcgccttcatcaggctcttcagctgacacgtgggaggagttaagtacatgcagctcttatggttttcctgcatctgtccttgtctcctgccaggttagaagctggtggagggtggagcccaggcagtaggctcccgtgttccttccctcgcccagcccatgcctcggctggaacagacacctgtgcaggcaagggcaagggtttgactttgcaaagatggctggaacgccttgccaaagggatttttctgcccactaacagccatggttagtgcctgacctagtctgcctgactgctttaggtggccacagtgtcgttttcagcaacgtgaggttaaataatggtaacctttgggtttctccttcacctcttctaaccccataacagagttctgttctgtaccagatttggaacaagtgagttgtataaatgacgagactgttcccttggccaatgacagcctaaacttcgactgacaagaggctcagggaagaggctgttttgcttaaatggattttcaggttaatggaaggttaagcagagaccccattttatgtgaacccttgttgtggaaaatgtcgaggtacccacttgcctgcattattgagtgggacattaggattgtaattgcaccttttttttttgtcccctctggctctcaaggtcagttttctgagcagcattgcccatcacatggttctgcagctgtagaaggtagaggagttgctgacctcaagaccttgtctgacattgcctttttgaatacatccctagtatttgcctgtttctggtactacttggaatctaagactggagtgcctaagggaagaatacagaattagttcattgaaggttctaattatttggattagtttatggtgttactaaaggcagacagggaaaaatatgtatgaagtacctcttggatgccaggtttctgcttagtgctttactcatgttttctttttaaatttatccaacaacctaataatgtaggtgtttgtatccctattttgctaatgaggaaaccaaggctcaaagtggttgggaatcttgatggaggcaagccagctggttaagtggcaaaactgagatttgaactgagattggagcccaggtatctctgacttccatagagcaaatgttttcctttataccataattgcctcctgggtaaagtagctggagggttgggagaccccagatctgctctgaggtcgtctttgtgtcttgggtgtcttgagttggtttctgttgtgttttcactgtaaagtgagaatgaacagtggttggcagaggagacttatgagtatcactgtacttggg

SEQ ID NO: 55739 - DNA, 2387 bp, Homo sapiens
ctcaggtcttagaacctcgttatcacagttctctgcacatggcaaagaacatcctagattatcagatctaaaaccacagggagcaaagcccagaaccagccagggcttgcagcaactagggtcagagtgtttttgaccctctgaggctcaccgtacctgaatatgattccatttgcaccccttctcctgtttcctctgtggggagggcgctgtggagaccataaagcctccagggtgtttctctctccctcttcctagagagcagcatctccgtggaggtggccagcaatgccagcgtcatccttgagggcgaggacctgcgcttctcctgcagtgtccgcacggcaggcaggccgcagggtcgcttctctgtcatctggcagcttgtggacaggcagaaccgccgcagcaatatcatgtggctagaccgggatggcaccgtgcagccaggctcgtcctactgggagcgcagcagctttgggggcgtccagatggagcaggtgcagcccaactcgttcagcctgggcatcttcaacagcaggaaggaggacgagggccagtatgaatgccatgtgactgaatgggtgcgggcagtggatggcgagtggcagattgttggggagcgccgggccagcactcccatctccatcacagctcttggtgagtgagcggtgggactggcagtgggtctggcatggagacagcttcagtgtcaaacaccttatcctgacttttctcagtcagagttttagcaggaaactatggccagtcttttacctatagagtttgaagtactttcctttatgtctattttatttcttataagggtttaattaattaagatagtgctagcagggactgagggacccacagtggatgatggggctcctgagggatagcaatagctgggagctgtgactactcctagtctggctgggagagagtgatgttatcagaactctatccaggttagtgaagccacccagccatagtggtggccccaggtggaggagcatggccactgccagcctggccttaaagagagcagagtggctgagcactgtgtggcatgtctttcctgccctgctgcccaggggccagccttcctgaaagagagcagagaagggtataaaatcatctgttgtcatttatttagcatttactatgttcctgcctgatccttaacacttaagcttagttgtcccattgaatccccacctagccaagtgacagacactttcattttatggaggaaactgagactgagacacattaaatactttgcctaaggctagaagtttctactacctgacggggcccatacctaacaaagctattccctcattagcgtggaatgaaaagataccttgagatttgctaaaaccaaggaagattagatttgcttctcatggggtaaagaggcttctatcaacatttatctgcctggatataatcagtctattagattttaaacgaccagtctgtgactttgctgggaaagaaacttgttatatcaggtcttcctgtttatcaggagacatcggttgtcctcagcaactttatgtcccactccctgggactgtgtcaccaccttccttgcaggttgggatggtggtgcttttggatacttccagtaaagatggcagccccaagtggtttttgtccttaacagagtcctccattttcttacccctctgagattagaattacatttattttctaaagcttaatcctaaagattgacctgctttttgcagtaattatacagctcagatttctgtcttagaaacttcctccagtgattgcgtttcctgatcagctcagttcctgtatccatactcagcacctgtgtgaacccagtgagatggaacttgggggacaacttttggatgtccagtactggtgtgttttttttttttttaaccatcctggaaggttaggaatgtccaatgagtgattagagttagtgaggattgtttctctagaagtaatttatgttatcaggttatcccctgagttttttcttactcaccatatgtctggtggttctcacagccaggggcactgaggggctctgccctgggatctggaggccagcactgttcacctgatctccaccactgagatacctctggctagagccataatcaggtggcccaaaggactgaacaaggaagaatgggagggcactctagactaattaaggttgtcttttcagtctaaagttaacaatgacacacatgaattttcatatcagtataattagatgcgggtcccatctaattacagtgggtcattatggctgttcggttagagcagcttgggtgctctgtgaccatggcatgtgcccgtgtcaggactagacaaagtcatttgcttggggaagc

SEQ ID NO: 55740 - DNA, 1064 bp, Homo sapiens
cacgctgtttacttcctatattttttgtactaagatttcccccaaccccttctgagaacttgtttgatgatctgtggcctgctatattgcttttccagcagataactgggtagttaaagtcccccagcaccaccagctcctgtcccaaggccacttgggtaagtctgccgaagaacaacaacaatcacatcggtaatggtgacaatgccttggattttaatggcgcttttcctcctaagagaccaaagtgcttctgcatatatcatctccttctccgctcccacctctcaaatcctcgtagaggccaatatgatatccatctaatgaatgaagaaatcagagcaccacacaggaagtgacagagctgattgttcagttagtggttgagcttgcattgcattaggaaatatttgcttctaactccacacccaccgccctgcgcttagcctgtgctacaccgtcaacttcctgatttgaaatttcatttgtgaatgtgtactcagatttttattagttctgtcctagttttcacttaatccagagagtttaaaattgtcggctgccttttctcaggcctggaaattcttgtaaatagtgttagtgggcagtgaggcaccaggtctgtagttgcctttgcctcagctgctataataaaatagcatttcttcttgtagccccacattctaactatgtgggtttccaggcttgctcaagcaacagacaccaccaaacagtagccctttcaataaatgagccaggacttggataagcgtccactgggatgacagtaggggatgagagtgaggtcctgcaagtcattcttctgcttaatacaagtgaaaggattttcttccttgatgctgcagttgcccttttaatcccttattttgaattgataacagtggggatgagtctttaatctaaagaggaatattgttgttattaatgatgatgaaaaataagtacctcatctgatcctctcaatgtcatgccctaagaagtaggcactattagtatctccattttgcacatgagaaattggagctttggtaggttaaggaaga

SEQ ID NO: 55741 - DNA, 1733 bp, Homo sapiens
tgttgcttaaatagagttctgggtgcatatatcaaggctagatatttgtaatctaccatttgagtgatattagtagcttctcactgacctgggggtctcatctaagacatctaaagcttcagactgagccccattggtcttaactggggtaacagtttgcttagaccgtctgggctgaagtagttttgaattctctctgtgatattcaggcgtttctctggaccttagataacctgggtctgagttggattttactctcaagctaagtgctgtggtcctccccgcagttagtattgtaaagaagaggaaggatagtgggaatgtgctaatgtggtttagttggctggggccctcattcacccaggatgtgtctcttttcttacttgttctctcagacaaagaattcactgttcggctggagacagagaagcggctgcacacggtgggcgagccggtggagttcagatgcatcctggaggctcagaatgttcccgaccgttactttgctgtctcctgggccttcaacagctcgctcatcgccaccatgggtcctaacgctgtgcctgtcctcaacagcgaatttgctcaccgggaagccaggggacagcttaaggtggccaaagagagcgacagtgtctttgtgctgaagatctaccacctccgccaggaagatagcgggaaatacaactgccgggtgactgagcgagagaaaaccgtgaccggggaattcattgataaggagagcaagcgtcccaagaacatccccatcatagtcctccccctcagtaagtagagagatgtgctgctttcttctcctttggctcagcatcatttaggagaggtagggggagagagaatagcgtggtgaaggtgaggggaggcagatggaaccctcgaggttaatgcagagctgggggaaaaaccattgagcctctcttccctgttgtagcccacctgcatacatgtagcaggctccccatagcagaggatcaggatcaggggtgtccagaatcagggcagtctagggctgggcataggcctatctgattgctagcagccctgtgcatacacaagcagtgccagctcagcttggagggaaaccaggaatcccagaaagctgtttgctcttgtgtgggaatcaagtcccagaagaagtgggtagatgcctgccttgaaatctcacttaaggagagttggtcttttatgggaggattttaaatcataaagtgcattattaaggatttgccatctgggtttttcaggtataaaggctggcatttccctaaatggcttttccctgttgaaattgtgtttctaaaagtcggtggatgggacctctcacatcttcctggagcatagccttttaagcttagctgatttctgaggctgcctcagtgggctccccagccttcatgtagactggccttgtgtgggtgggtagtggccattgctagggattccagaaactactggtgtttgcttgtgttgtgtttaaacattcatagtatcaagatattcttattaatctcattctcccatagttctgtttttagtaaagagaataaaaacctataatgctctgattttaaacaagtggtaaagttttaagactaacctttaaccttgtctcagctgctcaaactattctttctctgagccttgtaataatttcctttactttttatttatatgttttaatatttaaaatatttctcttcaagtgtgatatttct

SEQ ID NO: 55742 - DNA, 1027 bp, Homo sapiens
gtgagaacagggagaaaacacatactagttgtgactagggtactctcatcagacagaaaggtggtgctatttaatctccagaaaggtgcaagcaaggatcagggtatgattctgaccaagggatcacggagaaaatctcttctcttgcctgaatctctccagactgtggcttccttccagtgaggacccctttgatcgatgaattatgcgaaaattaaacccactaaaaatagggtatgatgattattttttctaccaaaaatggttttttaaaaaaatcatcttcctagggctgcattgctgaagtaagttacaggatggggatgtgggaaggaaagaaaggatgttgtatagaaatgtaaaactaaaagttccaggaggcatttccattacaggatcagtcagaagtgaagttaaagtatctcagagaagtgccagaatcaacagcaaatgttatttgacctataagacaattgtttaaagacagtattttcagggagtttatttattatgtaatatgaaatacaccccatgttttatccaagtgttattaaaataccagacaggtaagtgtaagcaccaaaataatgcatttccaaatccaaacagaaaactttctgtttatgtgcatttggggctgtctgtggccttgaatcgatggttcaaggatgactgttaggggcgcagtgcagtgacgcctgcgtggaatgggagcttagccctgggagtctcagattctgtggctttgtgactgcactctcaggacatttctgtgttgcagtgatcccagactccctgcagaccactgccatgccccagactctgcacagagtggagcaggacccgctggagctcacttgtgaggtggcctcagagaccattcagcacagccacctgtctgtggcctggctccggcagaaagttggcgagaagcccgtggaggtcatctccctgagccgagatttcatgcttcactccagcagcgaatatgcccagaggcagagcctgggggaggtgcggctggaca

SEQ ID NO: 55743 - DNA, 1098 bp, Homo sapiens
gggacagatggcagctgaactctgcataaagcccaaatacagctcacagaacccaaagactgtgtctctgcagcgtgcagcattggtctatatagcatttgaagctatttttttctctgtaagtgtccacaaaattcgtcactttacaatgagcctggcaggatagctgcagtgaagaaactctccacacaggtcccagtgtctcttctggaattttgcctgagcaagtaaatcaaatgcttggtaaacacactgatgtcactgtccctagccatggagatttagaactttttcaaaacccctttctctctgtggccccacttgtttctcgctgcagccttttatttttctggagttggctgtggttctccctcatgctccaggccaggctctgtgggctggacaggtatggctagttaatcctgccagacgaggtcagctctgagttaatgagtacagcctctctttctcccctccagagcatggatttcctttaatgcttttcttaagtttgaggagacaaaaatatatgcctgaaaaaggattactgggaagaattaaacacgagtccttcagcacgcacgtgtccatttgttgccttccaggtttgctttcttctctgcctgcgaggcttctcattcagtatgctgcgttgtgtggttagctgttccatagttatgttgaaagtggcttctcagatgctgcttgagtcctggggaatgtcaccatccaatgacagtctagctgagagatgctagcacgcccaccccttcttccccccacagatccatatctcatctggctgtgcacaaaaagcaactgataactcctgttatcagcactaggtggggtgggaggttttgggggatggtcagcattttctggtttcgattaccatgcaagtattttaaatctgcagctctggcaaactgataacctccacaactatatcatcagagccctcattaatggaatcattttctaatttgaacatcttgtttgtccttcctctcatttcttagtgaacttgtcagtcttccccagcccttcactggttgagttgtgcaagtttggagtcttttgcttttcaggaatagg

SEQ ID NO: 55744 - DNA, 1052 bp, Homo sapiens
ttgagagggtgtggtcggggtgatggctggcacctgtgaggaagacagttgttctggcgagtggaggtgtactgggaaagggtgttcaggagaataaccggttgattcatcccacaaacacttattgggcacctactgtctgaaatgcaaggggacacacaaagatgagttaaggatttgacttaaggcactcacacaacacaaggcaggaatggttgcctgcataaggcactgaggaaggttccctagcagagatgacggatgagctgggccttaaagtatgagtgggcattggctgggtgtggggtggagaaaaggcctttccagatgaagggctttgaaatgctttatgagtttgccttggcagagaccagagaccccataaccagatgttgttcatttgattcttggaatcatgggaatacttcagtgtcccaacaagaagatgccattacaatgtttgaagatgacattctttgtgcttaagctgccttaagccttttcttaaacagcctggatgtgcagcaaaaaagagtcctgtctgccccgtgttgtagggcattggaaaggatgatgtactgggaggtggctgatgcagcctccagtgcagaggcctggaaaagtggacaatctgtggctacaggagggagaggttagggtgggtgaagaagtattatgaatgagcagaatctagggacactccatgggtgagggtcatattaagaaatgagagaagggcacggactactctatgccaggaagagaactggggaaggccaactataacagggattgttttggaggaatagacagtgtggaccgtcacagtgaatttgtttaaacagatatctggaattggtgactcaagggcttggtcaagctcagtggcaaaaaatcagtgagaataggaacatgaagtaagttacagatggggcctagacatttgggattctactgtttagaagcaggtgttgcagttatccagtgctgcataacagatcatcccgaatcatagtggcttaaagcaaaaattagtttattctctttcatga

SEQ ID NO: 55745 - DNA, 1215 bp, Homo sapiens
tccccatgttgaccagctggtctttaattcctgacctcaagtgatcctctgccatggccttccaaagtgctggaattacaggcgtgagccaccacgccccgttcttcttttaattttctattgtgaaaagtttcaaatatgtaccgaagtggagagaacaggataattaacccccatacactcaccacctagttccaacaattatcagctcatgtccaatcttatctgtaccatcactcccctaccctccctgtagaattttcaagaaaatccgaggaacacctggtgtattcccacgtgttaatgaaaactcttgttgattaagctgcacttactagtaatttattttcccatttaaaattaattttcagaataccaagaaggcaccatttcatccttatatctgattggtgaaaagtgtaatagtcaaatagtaccaaggttgacaaaggcatcaaagaatagaaacacttaaacattgatcttggcaatgtaaattggtgcactgatgttgcagagcaatttgggcaatgcctagtgtggttgaagatacccttggatgaagatttacaagaatatttattgcaataaaaagttggaaaccacttaaaaatttatcagtaggaaaatgaatacattgtgctatagataatgattattcagacagtggaccatggtataaagcagttgaaatgaatgccctggagtgacatatgtcaacaaggattaccctcaaaaatgttttgtcaataaaaaaagatgcaaaagggtgcatacagtgtgatgccattttaaacagttttaaagcatccaaaaactctgtatattgtttatggctacatacataggtagtaaaagcataaaaatgtgcaagagtgataaataccaaatttgggatgttgtcatttctgggatgggtggaatagtggggcttgaaagggggtgaaatagggattgaagcacagcctgtaatgctttctttcttgaaaggaaaataaaaaaactaaaccaggtgtggcaaaatgttaagatttgacaagtcctggatgtgcacaggcatttgttatacatgtgtctgtgtaaatggttccttattcagaaatgaaaaatctgtaattgtccatcttctgataaacttgcaatggctgctgttgtcatgtgatgtcattttcttgactggagctaagaaacttggcattttttgttatttaatcc

SEQ ID NO: 55746 - DNA, 1458 bp, Homo sapiens
caccccggtcagctgattggctgtagacatggtgtgaccatttggagctggaatttgggccacactcagcacatagttgcgagccataaaggcacgacctttggaccccattgtcacctcccttggaatatcttggtgttcttgtttcagtctgataaggccattgtagctgggttctaggtatctctgagcatggagcactcacgccagcctcagacatcgctgtcaagggcatcggcagcagtgaggtgattcctcagccggtcatttgggcatcgctgcctgggtctctcctgaccttcagcctcatcttttttgtcacctgccatacctttgcctctaagtgtcccccagtttttattgctgccctctccatctgcaccagtgcctctctctgccagttccactgttctctcgcctgctctttaggatttcctttgttttgcctccttgcctggtgctttcagcaagcagcgctgacgtcatctcaggaactgtgctgcgtctgagagaagaacctgcattagccgtttaagtgtgcggtgctggcagagtacctccctgaaggtgtcctggggaaagtgagtgattgctcactgggtggtgagccaggggcagggtttggggagacatctgcattagcaagttagcatcacttgaaacacaggcatgtaacaggcaaggacgtgctcttcagctaccaggctgtcctggctgtagccggtggccacagacctgagggaccccggctttgttcccttagctggctttgttcccttaagctgcctttgttgtctcagtgtagctctctctacctcctctgtatttcaccgctgacaactcactcgattctccctctggcaatcttagttacctatgaatactctttaacgccatcttctgccttctcaatgaattaaggagattctctccttgactgtttgtgagccaaaacctaaccttctcttggctgataagtattaatatattgtgctgagaggaacttttggagtaaaattagacatcaaaaagaactggcacaattagtttccaaggcttttaaggttcctggaagtcttctgaatccatcctctttgtgtggaccccccccaattctccatcttcctcctaaaaataacgataatggcgtttcaccagaagccggacaaaagaaggctctgtctgtttcgcctgtgggaagtgacaggaactgctgaaacttgtgttccgtgtcacagagccaagggttcacacggtgcagaaacaaatcacagtgtgtcacggagactttttctgtctccggccccactctgtatttgagcccaaatgtggagggagatgctgcagttgtgggaaggcacttctatgacccctcattagggtagaggaagtgagaggcctgaggccacagccaggctggccttttgcaaaatggtcaaatcagcagcaattcggccc

SEQ ID NO: 55747 - DNA, 1047 bp, Homo sapiens
ggaatcacctcactgctgccgatgcccttgacagcgatgtctgaggctggcgtgagtgctccatgctcagagatacctagaacccagctacaatggccttatcagactgaaacaagaacaccaagatattccaagggaggtgacaatggggtccaaaggtcgtgcctttatggctcgcaactatgtgctgagtgtggcccaaattccagctccaaatggtcacaccatgtctacagccaatcagctgaccggggtggcaacccctggctctgctcaacaataatgacaaccaccatttattgagcccttactatgtgccagaccgatgctaagtgctttcctcagatgtttccatttaactcttaaaatcaccctaatgagtatttcctattattttacagatgaggaaatgagagtttagaaaagtaacttgcaaaatcatactgctggctccataacaaatgttgattgaatgttgtctgggcggacagaggcaaggatgaccggaacaagacaaacaaacgaaaggccgactgacagaccactcgggtagcactttttctgggattaagcttagaccttgtaggcctatcagccagaagcagtgtgtaaaataagagcagctgactgggcacggtggctcacgcctgtaatccaagcactttgggaggccaaggcgggcggatcacctgaggtcaggagttcaagaccagcctggccaacatgaagaaaccccatctctactacaaatacaaaaattagctgggtgtgatggcacacgcctgtaatcctagttactcgggaggctgaggcaggagaatcgcttgaacctgggaggcagaggttgcgataagctgagattgggccactgcactccagcctgggcgacacagcaagactccctctcaaaaaaagaaaaaaaagagtggctacccaagaacgcaacagcagcagcaaacactgatctgatgacaccccagttttgtagaagaggaaggaaaaataagaatgtcaactctccattcaacagagaaacagtgccaccac

SEQ ID NO: 55748 - DNA, 1072 bp, Homo sapiens
agataagagaggactgctggtcagtggtgttccctgacatttttccttgaatgataccaggttaatcaaaagataaggatctaaaatttttttgtgctctgcttataatttgaatgtgacttcatatgtgtgtcatctgttggactaaattggattgcagttgctcttcaaattgtcattcctttattttctatttctacctacctcctgatgttagcccaggttcctgctaccaaggtgtcttgcaaaagaatttggtgactgttactctaagtgaagcttttgatactttctcttaatataatggttcaacctctaacaatgtagactaatgaggaagattagtttgaattagtaaaatgtctgaattaccaaatatttttcaagaacttcactgttattacttttaagtaaatactgtaactcaaactaggctaatagaatgcctaataaagatccttaggggatactgctttaggagagaaataagaatgatttgcaattagtgcaccaattgtttatgtaaatggaatttctgaaatactagactgagcttgaaaaccgtttgttctcttaagtattttaaatagtccctatgaaacccctgtgcatgctggtagttgtttatatgctgtatagagacctgtttcatgaagacctaactcaaccttatatcatcagtatcagaaattccaagttagtgacgtccaggatcctcaccttccaagattagattagatctctctgccaaatgcttccatagcacatgcaattgtctgttgtaacactaatcaatacatttaacaaatatatgatgtgttctgctatatgcttggccagtgtgtgaaatggaggagacataatcctcatctttgtgtagtttataggctagcaaagaagtcaggcagtaaacaaataaatgcatttataattaattacaatcctgaagttggattgtacttttgtgagtaatggtttaataaactagattttaagttccattaagataggggttacttctgtgttgtttgtcatggtgtcccaaatccttccttagcctactgcttggaat

SEQ ID NO: 55749 - DNA, 1035 bp, Homo sapiens
agaagctgctgtagcagctcgatgaagggcaggctcttccaggtctgttccttgccagatgccctctcccaacctggggttaaccctaaggaggcattgatctgcacttttctcagagacactggtgacctcctgggtagccaagagcttcccccttctccgtgagccctctgagactgcaggtcccagacggttgtaaattctgcctggtggaaattgccaaggtgccaaagcaggtgcctgctgccctcaggagcctctgtgcagggccattcttctccctacaagcagcacttctcagagacctttctggttttcctcttcagctttgtttggcagtggtttggtgttggtttggagatggtggtgtgttgggaattctgcttcacatagatggacatgtttgttagtgtgaggaatgatggtgcagatattcattccgggcttaccccaaactaggtaaccctttatgacattgtttagagatgatttgctgaacagtttcataatgccttctgatgtttcagtacaaaaaatagcttgctgaacaacgttacaatctgtcttctgatatttcgttacaaagaagcaagagcacattctgagcacgctgcccagtgctttcgccttctctctgttggagcaggtgattggttccagttctgcgtttcggcacctctgtggctgggcatccctctgaactgtgcacttctagaagggagcaacaagatagagaactaatatgcctctaggcctgagttcattttagaaaaatctttgtagatttcttgcccagtcctcttattttaaaggtgaattgtcctagagggaagaaaaagaccatggtgacctgggtgggtagagggtggaaggagtactggaaaatgcccctaacaggagatgagaaagagactctgatgcacgtcatctttgttttaaattaaaacattatgcaatacaaacattcgccttcccactcttccccctaccacagaggagctgtaatttcccatatttggaatttggggagagctg

SEQ ID NO: 55750 - DNA, 1063 bp, Homo sapiens
ggtcaagagttcaagaccagcctgaccaacatggtgaaaccccatctctactaaaaacacaaaaaagccagatgtggtagcgggtgcctgtaatcctggctacttgggaggctgaggcaggagaatctcttgaacctgggaggcggagtttgcgatgagccgagattgcaccattgcactccagccagggcaacaaaagcaaacaaaacaaaacaaaacaaaaaactccatttcaaaaaaaaaaaaaccataatcagagcaaagacattctaacaaaactgtgaactcggagaaatgagtaatgcctgcttcccgtcaactttcaggtgtccaggccttctctttattaaaacagaaaaaaaaatctgataccagttgtgtgttctttctttgatgtagtgcagtttgcccaggcttgccttaagttggtgctatttttgtgtatttaattctgtttttgcatgtgacccattgtctgatgcttcagaatgcagtctgcggcctcctttttgatagcaactctgagaacactgtctctgctctcggcagggcactgggtacacctgtggcatcgctggtgccatggcatgaggcaggcttcccacttcacttctcaaggacccattttattaactctccttcccccaggagctccgtattttgaaatctttggtttcccagaccattagggagtaattaaaccttttttcccacatgataaccagtatgatcgttcacacttgatatagtccagttctaaagcaaaattagtctagtggtctgggttgcggatgaccaaagcacacatgtttgatccattaggttgcttagccctgtggttagggaaagtggggttattgttaggtgattttgaaatctctaaggtcgtcagcttcccaaccccatgtgctgctttgggccttaggaaccttggataacctgggtggtgtttgcccactacttctttgcattggtgaccttgattgaccttgctaggtggcacttttcatcagggagaggaaaggagatgcagagttgagcagccatcatttgctgtgggtca

SEQ ID NO: 55751 - DNA, 1020 bp, Homo sapiens
tggctttaaaggggcacagtggcagacatccagatgcaggctgaagtgggaaggtttggaactgtaggcatgcatgtggatctctgcctgatttggagccccactggtggaacctcatctttctcttcacctgatggctctcagtatggcaggaaggaggcctggctactactttactaatctgggagaggtagaaggcgtttggggagggagcaaaacccatgttggggtcttatttcctgcttgtcttctgatgtggtctggttcatgtgtcagcattcttgctgcataatgtgaattaatgtgtagtatgaatttaaaacagcgaagaatcccaaggttttaagcccatataggtcacatgcctggaataaaattttgtttaaaaaagttggataaggctaagtgctctgaaagtgagaccgatgcaggtaccagcctctagaaatggcaattttagttagaaaaccctggacagtatgtgaggggtatacagggtaaatctcggagacgctttcatctccctcaacatgacagacctgtgcttttctgcacctgtcctttgccagtgtctgggattggaatcagattcctcttttctgtctgttgggatactgattcctgcttatgtctttgtcctaccctttgtctttgtacctacccccttgacctctgtgtgttgtttccttctgtcctaaccctaggtgcctcacccaataagggttgtggtggcagtgcatggctctgccaccacaacccttggttccaattacaaagccatttaagcctggctctggttgaaccatgagggtagtaaagtctctatttgaggatagatgtggccagaggggcagaagattagagagagaatagaggctggtacagtggtaggaagggaagggtgactggaaaagtgcctctgtctgggagcagcctgcatgagtgacagtgacatgggaagatgacagcaatgtgggaaagagagcataggatttgtgtctgtaagaacaggaaggaaat

SEQ ID NO: 55752 - DNA, 1142 bp, Homo sapiens
gagccttaaaatattcatagcctccaggaatgcatccttaggaaaaaactagaaatgtgggccaaaacttatataaaaagctgaatatcatgttatttgtaacagcaaaaagttggaaacaacttaaatatccagcagttggggagtggccaaatgaatgggtagctatacacctttaaatatgtgtacgaagaactttatgtggagacaggcttacaaaatgagaagtagaaaaaaagcagggtatacaactgcttcaaagtccttaactgtgttaaaacacggatgtgcagaaatagaactagaagggaatgtactaccatgttaacactggctatctctgggatttgggtaaattttattttcttctcatttttttctcagttttctaatttttcatcagtcagtatgtattaattttataagcagaaagaacattaatgttactattttaaaagaaaaagtaataatcttgagtacaaaatattttgccacaaaacaaaacctgtcgctgtgtggccaaggcctggagggtgaggggggaaggttgctgttacctttttcaggccttcctggaacccataaaggttgatttcccactttacagtcagctagagactaggactggaacaaaagactaatggagggtttcactttgcataattagtttagttcatcaaggccttggaacatgcattcattttcacccccagtctaatggaggcagtgacgtttgttgtcattttcatgtgtctgaatctgtggagctggaattctgagactctttccttaagtttcaggtagcaaaacaacagatgactgatgatgctttcttttatagtggttttggccaataagcgagacttaacaagatatggataaaaaactacaaataagacattattatttgagagtcatttttgggggttcttttcctaataaaatgtactttttcaccaaaatgccaaatcaaaagattctatcacttattaatagtacaaaatggaacagtggttcttagacttcagagttgttaatcatctgagaaatgtgtttaagatgcagagtacttagcccaatccccaaagactctgatgcatacagtctagggtaagctcatgtttttgcattttcaacaaata

SEQ ID NO: 55753 - DNA, 1022 bp, Homo sapiens
agaaaaaaaaatggggagcaacctaatgtccatctgaaaggatctgatgaaataaaaatgtattgcatccttacagcttgagaggttgggagataattgggattgggttggagaaacagagaccttggaacaggaatgataggaatgacaggctgtgtgtgtcagaatagatggtgtacagaggccagagaggagcatgaccaatttgtggtgtgggctggtaagaatgtggagagacatgttgaacacagttttgttttgtttgagacagagatgttgatgctgtacactgtgatcattctctctaaccccatcaatctttaataatactttaaaaatcaggatatacttaatgtgattggatttcttgtaaatactggtcaaggactgagatttgtgtgtcaagcatggcctgaggccaaaagaaagtcagtcaagcagatgagacggacggccaacatctgggtcacatatgcttgtgtatgtgtaaaaattttattgaagcatatgcaaagatctgttgccagagttacctctagggggcaagactgggggtgctttatggaggtggacttttcagtttatccccttccaaatcactagcatttttactttaaaaacaatcttttttaaaaaagtatagcactcagacaatataactggagaatgacggtgactcctaaccaattgagtgtagtgtctcaactttgccccagatttgattcttgcatgactgtgaagactagaatgagtcttttttttttggagatagagtttcactcttttttgagatggagttgcccaggctggagtgcaatggcacaatcttggctcaccgcaatctctgcctcccaggttcaagtgattctcctgcctcagcctcccgagtagctgggattacaggcaagtgccaccacgcctggctaattttgtacttttagtagagacggggtttctccatgttggtcaggctgggctcaaactcctgaccttaggtgatctgcccaccttggcctcccaaa

SEQ ID NO: 55754 - DNA, 1004 bp, Homo sapiens
caaaattttttcttagcactgatttatttatgtgtgaaatctctctttgaatttcaacatctagtgttaagtaagtgtcccttttattattttaatgttacatttgatacataaaaagaatataggtcacatatatgtgttataaagggtaataataaaatgagtaaaacgaactgtggtagctttgtttcatcaccagttctgttgcattgtggtagattctttgcgtgcgtttgttccatttttcacactcttatgagatagatgttattcttcctattttaaaaattagtaaattgaggctcagaaagataaagcaacttctcaatctcacccagccagtaggcaggagaagtactgtggccgaccttatcagaactcagcaatatttgtttccccttccttcgctgagggcaaggtagaattttctaccttacagtgatgtgggccatgtggctagctagctctgcccatgcttgtgtgaatgtgtcacccctaggctgaggcagcataacattcctgagagactctgcagcctccctcctccctgctgggacagactccattagtgctctgctcacatccccttggtgctcacagtttgtgttcacgtcaatggcttcttactgcagtcacctgccactctttgttcaagatagaaaggtaggtgggaactgtcagtgggtgagtctgtccaggagtggctgtgagtaatgacacacaggatttggtggataaataccaccccatctttgcccattgagagggacaactccgggacatgttctattctgatttgcaggggcccccagcagttacctgttcattaaagtgcgctccattgatttcctttcctttcccatctcacttccatactcccagataaatggcttgtgctcatatcccaggttcagagtcggcctctggaagaaccaaagctgagatactttggcatgtgtccccagggtgcagcaactatatgatgaggatcctccacatgtgag

SEQ ID NO: 55755 - DNA, 1034 bp, Homo sapiens
ccctctggtcttctctggctcagacacttcgttccaactaacctgtttgctctcctttatgtagactatattaaaccttctggccccttctacttctcacctcttgcctgcgtattaatatttcctttttcccttgaaactcactttctccatgaagccttcctaagcctacctaccatgatcacaccagaacccacccagccacatagagcaggtttcacatccattgcctatgtctgacctgtcttgcccatccactcaatgtggcatttcttgagtggccactctgtgtgcaactgtgtgttcaatactgggagtcccagacaaatgacaaagacacagcatctccctgagcggctggtgggtgtgagtagacagagaataaaatagctaaccacaggactgaatgaaatacctgacatggaaaccaagtgtgggaaacaaggaaggggatgattaattttgacttgggggttggggctggttttgctgaagaagtgacatttgagttgagccttgaggataattagaattttgaaagaaaggatagaagagcattctgggctctggggaaaagcctaaagtgtggatgagtgaaagtacatggctcattgagaaatggcacgtaagttccctgtagctggagctgggaggaggaggaaataatgggggtgcaattatttgggggaggaggaaataatgggggaggaaaggtgggtttgggatagatcctgtaggttttgcatgctgtgctaaggagtctggactgggaggggtagatttgttggtgctctgggtgctgccagccagtctgtgccctgtcatcagagcatatatttccttcattgtatgtaattgttccctactctgattgtttcccctgggggcaggggccacgttgattttgttcactacaatgtccctattacgaataggatatataactcatactggttgtttgatacatattggctgactgaatacttacatatgtcattttatctgtgggaatgggtagccattaaaagtttgta

SEQ ID NO: 55756 - DNA, 1129 bp, Homo sapiens
attagctaagaagattttaatagtttgtattacaaataaaccattacatgtgtgtttttaaaatctacttctgttctttatacccttccagccttacttcatctcccaattaaaagaggaaaaaataggattcaggcttcagaatcagcctttcatttgaatcctgtcttccctcagtgtgaaccttggacaggttttctaacctctttgaatctcactttctgtctctgtgaaatgggaataatacctctcttggaggtttttccatgaagattaaaaacaatatatttagaagaatgcaaacattagtgtatgtaagttcctagaactctgctaccccaactgtgttctgtggaccaccagcattggcagcacctgggggaatctcaggtccaaacttgtgaatcaaagtttgtatttgaacaagatccgcaggggattcaaatgcatgctaaagtttaagaagcatgtctggaggaggtttggcatacaaattacttggtagtctgggctttctcagtgggactgaggcaaagccatggtcagagtctgagctggaggagagtgggctggggctggaccccacgggaatgtgacagtcattcagttagcagtgaaggatggaggatagcataggtctgtagtaaaggcagtgggcctagtttcgtggctttatcccaccaagtttggcagcctaggagggacagcatcatgtggtctctccatggaatgagagtggaaggatgagtgataaaggaaccgagggaactgatgagaacatcacaggaaagattagccaaggagtacacgtgggataggcaggtgagtggggcttccaggcttgatgcacctgcagaaggtttgagggcctggagggcatgatgatggcataaaagcagattctgaggtgcaagggaatgggtagtctaggaaagtaggaggtgaggatcaagagaggtaacttctgagttcagggttttggcagcagagatctaaggggagataggctggatggctagtagtgacataagcatttattcagagtttctgcctcttccaccattttggctggttgagctaatatctgactgggttgggcctgaatggattaggagagaggggtgtgact

SEQ ID NO: 55757 - DNA, 1043 bp, Homo sapiens
ttagccctaggcgttgtggggaaaaggcagtaacctatgactaagatgaattgggggttggggaccaggtgcgatgcaagagaaaccaatatgagggttctttccttcccaataaattcctgtctaccttttttgtagcatttattttgtgccaggcactacgcttttcttttcttttcttttttttaaagagagggggtctctgtcacccaggctggagtgtaatgttgcagtcatagcccactgcagcctcaacctccctggctgaagtgatcctcccacctcagcctccccagcagccggaaccagctaatgcactttccatagatgaacttatttaggaggcttcatagccccatgagagtaggcactgttgttacccctgtttaatagatgagcaaactgagtcacagaggtgaagtcacttgctcagggtcacagtgtaagtggcagacttgggattcaaacccaggtagtctggctccagagtgtgggttcataaccacagtacactagtctgtctttccatgttagtcaaaatatatctttgaaaacactgaaaggaattgatataattagctaaattgtgataacatttgtttccttgtctttcaagacaggaggcttggattttggcccttgtccttctactcactagttttgtgaccttggacaagttgctgaacagctctcagcccctgtaaaataagggttgggctagctgatcccaaaggtctccccttccatctccagaattctttgagttcatgctgacccctgctgttggccatgtggcctcttggcccagccctggcttcctgcccatcttctgagcactccttataatcctgcagcctgtgcctgttgtctctcacctggctggtgcctcttcacaacagtgggttggtgcctctgagggctctggaaattgttcggtccttgtgtaggcgactgctgcctgattgcagcccatttcctgcacactaaggatctttccctgtggttctctagggtacagaagtgtccccaccaccaggctaact

SEQ ID NO: 55758 - DNA, 1734 bp, Homo sapiens
ctactttggcttttacacccttcctgaagggtagaagagttgaaatacttttgtttttttgaagcagggtcttgctctgttgcccaggctggagtgcagtggggcaatcttggctcattgcaaccactgcctcccgggttcaagcaattctcatgcctcggccacccaagtagctgaaattacagggatgtgccactacaccgggctaatttttgtatttctagtagagacggggcttcaccatgttggctaggctggtctcgaactcctggcctcaagtgatccacctgcctcagcctcccaaagtgctgggattacaggtgtgagctaccatgtctagccgaagagttgaaattctgacatctccaaccaatagactcagctggctaaaaaatgtgcccctagtatttggggaatttcttccttttcattgctttggtctgaacaaggaaggttcaaaatgatgctggataaataccacctactaaaaggatacattctagaaagtctatgtgttatagaagaaacttatgtgtatgagctcagtccttactgcatcttggctgctgtctggccctccctggctactttgaggtgctactgttgatgctgctgctaagcctagtgatttcatctcagtggttttggatgcagatatttttgaggcttatccctttaggatgtactgagaagcgaatattagctgatttggtgtctgtccagtgtacactactttgcttatgttgcagcgaggagttaaaaaacacacacatttttggtacaactattcgttttcccattttctgaaagctggcgcattgaaacgttttcttatttattagaagacattacagtccatcatctttgattgagaaatccttacagtaagttccaagttaagaccatagtgtgtaactcacggcatgacacagcacagggtactgagtcacattagtcaaagtaaaaacagttatgacccttgaaggaataaattatttgtgtccaactttacttttcaatacaggacattgctactttgctttgtaatctttttttttttttagtacttccgcagcattaagggaatattgactctgtttctgacattgtgcaagattacaaagtccaaaatggaatggaaccagttataagtgaatggcagaatggatcataggtgttttttaaaggcttgggtgaatgagttattagatcactgtacatatgggactgtcacaattatagagatgaaactgaggccaggggctgttattattgaaaagttccatggagcaggtggggctggagagtcgggagccaggagcaggaggaaatgcatttcaggtatgaaagtgggcagtacggtttctcagaggtgggagtagataaatgtgtacaggttggtgtcccatttggggattagctaacttcagctggaaaagtaatagagaccttaggggacgtggatattaaactctggggaagggaggttggtggagaagaatgtgagcaaagtcaccctgaaagatgttggcagcatcaccagcgcccacagagcagctaagagccggcatgtgtgaggctggagaggtccgctggagcttacaggaagccagcctgctaaattaaggtgataagtcaggccataatcctatttttggttgtttcttataagaaaaacaactcacaaaacaattactgatgttccccccagatagtttatcagagcatttcttc

SEQ ID NO: 55759 - DNA, 1060 bp, Homo sapiens
aaaattagctgggcatggtggcacatacatttactcctagctactcggaggttgaggcatgagaattgcttgaacccaggaggcagaggttgcagtgagctgagattgtgccactgcactccagcctgggcgacagagagagactccctctcaaaaaaaagaaaaaaaaaagataaaaccattcataggaggatattggtttttaataaatgaggaagactttttgcagctagtgtggagggttgagttgtagggtcatttagagggaaaggattgagactggagagaaagtcctgagtgtaaagagcctgtgtgtcacctgaaggagcttaagtctaacatcatagatgaatttgtctgttttttcctgattctgccttccctaaaaagctggaggtccctcctttcctttatttacttgatgttttaaaaggtcctcatcttattggggactcatctccttccaacttttctataagtcaacatactgtttcatctttatcgactctgacgcttggccaggtgttagctcatcaactttccgtgatgatgtggttctgcacacagtaggcgtgcagcaaaaaaatactgaatgaaggaatgaagtatcagactgtagttaaagtgttccttaaagggcatgtgaacccagagtcttttttaatttaattccctgcaagccaaactgttaaacaacactgtactccttactgagcctcatcagggaagctcggcatagacccctcatcacccatggcttctagcactgtgtctacaaatgagaagggcaggcttaaagtgttgttggggaggaggggtggatgaggcaaaggaggagcagacagtggatctagggaacagtcaaataacgggagagaggacagagctgcccaaggaagggagtcgggttggtggggagtttccccaattatctcaggtgccttttatgctcatatgcaagtttaaacacaatatgaatctcccattctcttaaactagaggctaaaaagaggaccaggtgttcacacagaacttggcagatgatgttggccagtttgaa

SEQ ID NO: 55760 - DNA, 1061 bp, Homo sapiens
taaaggtttgacatggttctggcctcccaggatctctcaaaggccacaaaactggaagcaatgtcatagttatatgatctagtgctttactagtaagaaggaattcagttagttaatgatccagtcttgaagaagtaccgtgcatttttgttcctcacttgttggtggcactgtatgtctttctgccttgcttacctttttttttttttttttttgatacagggtctcgacctgttccctgttgcccaggctggagtgcagtggtgcaatcatgactcactgcaacctttgcttcccaggctcaagccatcttcctgcctcagcctcccaaatagctaggaccataggcacatgccaccatgcccagctaattaaattttttttttttttatagagacgagatctatgttgcccaggctggtcttgcactattggcttcaagccatcttcccacttcagccttccaaagtgctgggattacaggtgtgatgcaggaggtaatggttgtcttggcagcaaaaactaagaaaagttgcattgactttgaagagcctgtcagtactgatgaaatgcaaagtctttgtcgcctcctttctaatcttgtttgatttggagaacatgcgtatgaaggctgaaagaagatttccagatataaatggcaggatagataacattagagccagaactgccatgtaaatgtcaattagaaacaagatttaagtctctggaccacccttcttaccccctgtggcctgttggtcacactgccccttcctcgtgtttctgtagccaggcacaggctaacgaggactcagagagtgcctgctatgataattttagcccctggaaaaaataacagactttgtgagatttaatggccacacctgggccttgtcatcacttagtattctttcacctttttgattgtcaattctgatatttccctctgtgaccacaacctccttgctttactcctttcagattccctcctatctgttgaacctattcttcatcctaattgtgattccctgattttgaacattcttccttttcagtccatc

SEQ ID NO: 55761 - DNA, 2316 bp, Homo sapiens
atttaaataaacattgcaggagtagttgtttactttgaagaacttgcctttttctacctgtccccatcgattccacctgatagaagaaagtcgaaggcatttaattactttcttgagtattccagaggtagggaaatggtaatcgggaaacaattaactcttggttgttaattttctactgctgagaagtcagagcagaggacttctaaaagtccctcctgtatgattttggaataaagttctctgcaccatttttgagtataaatatgcgtggtgttaaagttggtatcacttaaaataacaaaggtagtacatcagaaaaatttttgaagaaatttttaacaatccagtttcttctattctctcatctgtctacttcacattgaaaatatataatatttcttctttcagtgactcatttctgtgttactttgctgcctatcttggttccattgcccatggagaatatgaaatatagggaattttaagctgtttctttttcctactcagattaaagacaaaaaatcaacagaggatgataatatataatgcaattgaaggcaaacgaaatccgacctatctttggcttatgctgcactatcaagtttgggtttgagtccctcacgttatagctgttatgaccttcaggaggttattcaacttctttgattctcaatttcctcatatctgtgataggggtggtaatagctaccttatggttgtcttctgtggattaagacaatttgtggatagtgcctggctcagtcagtcagtgcatgccatgtaagaaacactgtacattattattcttcctcttactcgattctaatattgttgtggagagagactgggagacttgatagtaaatcaaactgaatacatcatgaaataaatactatgagaaatgcttatatgattttagctgaaattatggggtctttgattaatcaagtattttttattctaccctccccctcccccaccaattagcttgttattcagtctttcatttttgtggttactctagagattagaacacgtatcagtgatctgttagtgtttactagtgatccttttaccacttccaggataatgaaagaccttacaacatttaagctccaatgtattccacccctcccctcactttttctgctattgatgtcatatgttttaattatgtatatattttgaattccagaagacattactaatattgtatttatagtcaatattcagtaggtttacccacatagttattctttctgttgctcactttgccttctcacatttccatgatttcaactgggattatgttccctctatttgaagaaccccctttagtacttatttttggtgcaattaattctttttcccttgttgagaattggttgaaagcatgtttatgttgccttcctatttgaggattttttttctctgtatagaatcctaggttggtggttacttcctttcatcactttaaagatgtcattctgtggtcttctcatgagcatcatttccgttgaaagttagccatcagttgtattcctgttcctttctctgcctttcagtagttttgctatgatttacctaggtgtggttttatttgtatttattctgtttatgatacatatcttatcttgcatctgtggcatgatgtcttttgttggtttaagaaaaatcttagccattatctcttcaaaaattatgcctaattctactacagtctctccctgtccttctgggcctctgtgacacatatgtttggcctttttactgtgtctcatagattcttgtctggcttttttagttcttttttataccctgggcttcagtttggataacttttactgacttttgttttattttgttttgtttttgtgattgttttgtttttttttgagacagggtcttactgtgttgcccaggcaggagtacagtggcacagtcatggctcactgcagcctccatctcctgggctcaagcagtccttccacctcagcctcctgagtagctggaactacagatgtgtgccaccatgcctggctaattttttctgttgttgttagagacagggtctcactatgttgcccaggctgatcttgaacccctgggctcaagcagtcctcctgtctcagcctcccagtgtgctgggattataggcgagaaccactgtgcctggctgctgacttcttctgtgctgcatctaatctgctgccaaacctatttattgacctcttaatttcggatattgtatttttttttttagttctaaaatttcaatttgattgtttcaatatatttcagtttgggtgaaat

SEQ ID NO: 55762 - DNA, 1849 bp, Homo sapiens
gagaaacctgtgtagttcctgtttttttgaaagaatgtacaatggtccatcaacaggtatttttttttctggtattaaattttaatggaattttattatgtgaatttttgtgtcattgaacaacccagtagtgtcctcaataggacttttaaggctgataaatgtttttcgtatgaaggtttcttatattgactcctgaaaacaaatgaagccataattcaagattgttacttagtagcggcatttttatggggaactaaactaatacagttcaggtaaagaagtgtttgggaccttcagtttgaaacactggtagaacttggaaaaatagaggaaaactttcttttcctctttttccctcagttatcaactgttacaaaaggttttgacaaaaattggcaacatgtggctatgtagatattctttttgatttgaaaagagccatatgctctattttttccaagttatatttatttttaaatatcattagctgttatttaacaatattacaagaaatctgtgctaaataccagattgcttggtggcaatttgaaattctgttaccaaaatttaagatcttgatttgcatggatgaggggacatcctagttctgcatgcaagacagtgctcaggtttatatcttttcggattagaatttgatctttcaagcatctgttcatatctgctttacttttcccagtggagctatcatatagccaatgttgaaggtacttttgcaggttgagttggaacatgaaggaaggagtacctaagtgatcctaggggagttggggaaggcttcacagaggaggtggtgctgcagctgcttcttacaagagggtgaagagatggatgagagggtattccaggtgatggaggcatgaaagcagaggccatgaagcaccagagagtatggcatttccagaaagtgaagagatgtttgttttgtgggatagaagcatcagagagtgggagaacagttggagatgaagctaaagtggtatccatgagccagatcatgagtggtcttgtatgtcttttattcattcattcattcatttaacaaatatttattgaacaactactattttaccaggtcctgttctaggcactgtcattcagcaatggacaaaacaaaaatcactactcatatggaacttacattctactggggaaaaaagaaaaagaaaacaaataatagtgaaaacataaatgttcataaagtattttagtaataattgataaggagaaaatttggcaggagcaagaatggggatgtgccactttagggtgctcaggaaaggcctcattgagaaggtgacattagaatatggatctgaagctggtgaaggagctagtgggatgaatgtctgagagtgtcctgggttgaggaaatgtgcaagggccctgaggttgcagtaggtgaaaccttgggagcagagcatggctggagtatagtggaggaagaggaacagacaggaagtccaagaaacaaaaacggccaggtcctgtaaggattgcctctataaggatttcagctttcatctgaatgagatgggaagtgattggagacctttgaacagagtaagatataacccaacttaaatttttcaaagatcactttgctgtattgagactagagaacaagaatggaagccaggagaacagtaagggacactgcagtaatgcagatgagacgggtgctggccggggccagggtgacagcactgggggtggctgatgggttgattttgtcctataggtgataaggagccattaaagacttgatcagtgaagggacatcggatttgtatgtggaaaatatgattttggcagccctgtggaagga

SEQ ID NO: 55763 - DNA, 1312 bp, Homo sapiens
gactcaaggaaaattgtctggtttcactttcctggcccttctgtttaggatttttcccttttatcccttagacagtttcaccctcacttctgctgccttattgcctagcccccagctaacaatatgtaccagtcagaagcaagtcttccttttctgtaaaatcacccaagtttcatcatgcacatggagaatgtataattttagttttacagtcttcaatagactgcttatcaaaagatagcataacagtgaagagcagagtttctaaaggcagatagcctggatttggattccatctctgccacctatcagctgtgtgaccttgggcaagttacttaacttctctgtgcttcaatttcctcatcagtaaaattaggcctcttagggttgttttgaggattattatatgtaaagcactcagaacactgcctggcatatatagcagatatatgtaaatgtttgcggctattgttgtttttataaaataagaagaaatgtggtatgttctgttaatttattcattaaatatttctcaagcacttacaactgtacaaagccttctaactttaatgctgtaaataagaacttaaaaggagatgctttaaagagggtggagaatagaaggggcaaacataatcagattacctagatgtatttgtttttaattttcaagttctgcgagcagctgtgcccaagaatgtgtctgtggctgaaggaaaggaactggacctgacctgtaacatcacaacagaccgagccgatgacgtccggcccgaggtgacgtggtccttcagcaggatgcctgacagcaccctacctggctcccgcgtgttggcgcggcttgaccgtgattccctggtgcacagctcgcctcatgttgctttgagtcatgtggatgcacgctcctaccatttactggttcgggatgttagcaaagaaaactctggctactattactgccacgtgtccctgtgggcacccggacacaacaggagctggcacaaagtggcagaggccgtgtcttccccagctggtgtgggtgtgacctggctaggtgagtggtttggagaatgactcttaacctcttcagcttaacccctcctcggagttatctgaaggagttatctcaggaggctctgcgctttgcatgacttcgacattatttctattggttcatgcatactttggcccagatagatcccaagctggggatgaaatagaatctggcagacaagggaaatgtttagataatgtggcctcagttgtctcaataccctcatttgagagtatatagtttccttttgttgtcgac

SEQ ID NO: 55764 - DNA, 1036 bp, Homo sapiens
ttcccttgtctgccagattctatttcatccccagcttgggatctatctgggccaaagtatgcatgaaccaatagaaataatgtcgaagtcatgcaaagcgcagagcctcctgagataactccttcagataactccgaggaggggttaagctgaagaggttaagagtcattctccaaaccactcacctagccaggtcacacccacaccagctggggaagacacggcctctgccactttgtgccagctcctgttgtgtccgggtgcccacagggacacgtggcagtaatagtagccagagttttctttgctaacatcccgaaccagtaaatggtaggagcgtgcatccacatgactcaaagcaacatgaggcgagctgtgcaccagggaatcacggtcaagccgcgccaacacgcgggagccaggtagggtgctgtcaggcatcctgctgaaggaccacgtcacctcgggccggacgtcatcggctcggtctgttgtgatgttacaggtcaggtccagttcctttccttcagccacagacacattcttgggcacagctgctcgcagaacttgaaaattaaaaacaaatacatctaggtaatctgattatgtttgccccttctattctccaccctctttaaagcatctccttttaagttcttatttacagcattaaagttagaaggctttgtacagttgtaagtgcttgagaaatatttaatgaataaattaacagaacataccacatttcttcttattttataaaaacaacaatagccgcaaacatttacatatatctgctatatatgccaggcagtgttctgagtgctttacatataataatcctcaaaacaaccctaagaggcctaattttactgatgaggaaattgaagcacagagaagttaagtaacttgcccaaggtcacacagctgataggtggcagagatggaatccaaatccaggctatctgcctttagaaactctgctcttcactgttatgctatcttttgataagcagtctattgaagactgtaaaac

SEQ ID NO: 55765 - DNA, 1877 bp, Homo sapiens
ctccagagagtgaaaagaaataaagagactaaattgtggaaaaggctcagttactatccaaaggatcccgtcatttgttttcctttggagtgctactaccattgtgaaagtcatcagtgtgcttttcctgactgatgctaacagatacagaacctgcaccttccctgctgctttgcatgtaataagcactcaataaatattagctgaacgggtaaataaaccagtacccacacatggattttgttaaaatatgtgcataggaaagctagaattgctaagaaagcagtaatgttcaactcctaggatattcagagatatttgcccctgagtaaacctaacgaaagagcgagtagtatgaaaaacaattgcattcttttttttttcttcctcttaagacttctcctccttccctgtgcctatgactcagaccattacagctgcttggacacttgtcaggagcgggtagggcatgagcatagcagcagacccttctcaaagacttccccgctggactctgtccagaagccagtgagcctggcctgacactccatggttgtctctagatatgtaatgtgcatgtatatgcgtacggataccataccacatacaacttgggaccaatataaggtaaccgagaagtgaccaaaaaagatagacagacaacctgacaagcactctgttgatataggtggtcttaggtcatgtaactctggaatgttgtcacagaaaagttttcgagagagttggtttgctacacaggtaaaatgcaaaactcagttttgccacttgacagattaaaatgaataattaccatttattgagcatctactgtgtgccaggcactggactaaggaccttatatgcattaaatgttcaatgtgaaaatatttttggccttgggactcagcttcattcctgaaactccagagcatagtcctaagagctgggtagttcttgtcttcatttgcttggggcttgtgtactgagctaggtgaggggattgaagctgattggggtcttctagagttccactgtgctaagcaggaagacggggcaatgacatgaatgggcctggcaagtccagagcacttgcagccactgagaggatcatgataatgttttagatgttgagaaaaaacctcttttacttagaatgtatgtcctactttaaagggaaagaaaaaaaagatttaagttggcttgcaaaatgaggtacagtttaaagcaggagacataaaatcaagatcaaaagggtaaaagaagaatagatattgcaaggtggttggtatgaattagttattatatttgagcactgaatttgcctctgaagttctgaagagttgagacaaaaaaaaagatgtgattatacagttctcctctgaggaaggaaaacattaactctttcagcaagacaaactttctcttggcattgaatttatcatgtgctttttcattttggggcattggaaaagataatagacagggctttcaactgttcttttacaaaaggccctaaatgatggtttaaatggatgtttcttatatccaccctctataaaagctgaggacataaatcttaagtgtgtgaagggtttctgtaagaagctcaattactatgggggacaaatgatgctttgtgttgatccaatttagtatatgtctaaaacagagaacctagcagaatggctagttaatctgcacattaagccatctccttctgctatcagatgtcttaaatgagcctttggcaagagttggatactaatcagttcatggttgaactctgcccgaagtaccagacttctgtggcgttaattggaaggggttccacaggctttggatataagagctggaggaggcagagttgagttctgctg

SEQ ID NO: 55766 - DNA, 1059 bp, Homo sapiens
gtgtgccagcaaggaaggtaattattttatttaaaagagctgttaatctgctaagtacttggtagaaactttagagttctgggccatttataggcgataagatttagacctgtaggttttttaaggataactaatatcagctgtctgtccaagattattctggaaggcagaagtgcacgtggccaagtgttggagtcaggagacatgtgttagtcctccttctaggtatgttgcctcgggtgtgtcgatgaacatttccaagtaagttttggtttcctggtttaatatgataatgcatataaagtgcttagtacagtgcctggctcttaaatgctcactgcattttcttggtggtggcgatgatgatttgttagtgtttgagggtcttccccaccaagttcttaaccaattaagacctaagagtttgtcttagggcatggaggagcccagcatagaggaattaggaacatgtgtgtcctaaaagcagctgctcctaagaggagctagagaaaggggttgagctgaccacacccagcccttttcatccctctcaaagctagtaattcacttttccttctctgggaggagcaaatgaggatgaagaaagaaaaacttcatgaatatttctttttttttttttttttgagatggagtctcgctctgtcgcccaggctggagtgcagtggtgcagtcttggctcactgcaacctccgcctcccagattcaagcgattctcctgccctagcctcccaagtagctgggactacagggcgcctgccaccatgcccggctaatttttttttgtatttttagtagagatagggtttcgccacgttggccaggctggtctcaaactcctgacttcaggtgatccgcccgtctcggcctcccaaagtgctgggattacaggtgtgagccaccgtgcctggcccttcatgagtatttctttgggtgcagggcatagatgttgcattcaaatgatgttatttttattgctctgaaatggctagtgctccatccatcctcataatggttctgccacagtaaggtaatgagtct

SEQ ID NO: 55767 - DNA, 2853 bp, Homo sapiens
cccttgataaatgctcgttgtttagcattattattgtaaaatggggataataataccttccttacaaaattgtcatgagagtaaaaggaggtattttgtatgaaaatctctagatcagtctcctgcacatagtaggcccacaatacttgtttttacaaattagccagtgattctgaaggctttttattgttttgaaagttgtgacaaaggagtctaatgagccattatttttaaagcctttctttaggggagggtcactcttttggagtctgtgcatagcttgggagatggtgtggacatgagcagacaccttcctggcatccagattagggagcagatccctgcttctcagaacgttagtgatgctgcacttggactggcctcagtattctgtgagagggcttacagtgtgtgttgttgtttgtttttaacttttaaaaatagaaatttacaaatattcacagttgaagaaataaccaccaacttcaacaataatcaatattttgctgatcttattttatctctcttccctattccagacaccagacacacacagacacacacacacaaaaacacacacttttttcttctagaagagtataaagtatatcccagacatcatgtcattttactgttaaacactttagtatgcatctttaatgataagcagtttttaaacataaccaccattgcattcttagctgatttcttgatgagatcaagcagaatgtagcagtaatcagtggtgaaatgcctgtgcccaaaatgagcattttaatgcaaaatattaaatttagttcaattcagccagtatgttagtattttttatgtacaaggcactgcatgcacagcacgtacagagaatcaaggtggcagtccctggccctgggaagagtcctgtggaaagcccataagacatacatacgaataaccaaagttcaaggcaggattcacataaaacccttagagagcagggagcttggcaggtggtgggatttgttgaatacgaaataggagtgtgacatgtgagttcaaaggaggcattctccgttgagtaggagaggatacacagaagaggtatgtgcatgacaggccttgaagaagggcacaatctctgcaaaccatttttaaaattgtaaaacaatgttaaaggacaatctctgtccatgcaccaaaacaaaaacgaaatcagaacctgctcctactcctaccattctgacatggtggaatcatatcttctccaggagtgtaagtctaaagttgagctacaaggctggtggatagctcaaatgaacctgcccctcgtaagttcacaagccaagaatccacttatttttgtttgcctttgcattaaaactgaggcctccttttctgaggcctaaggttagttttaagagaaaatgaagagaccaactgttgaggtcaatgaagagatttttctttccttccaagctggaattcctatagctagatgcacacattgtgcaagtcccccgtactctcattccgctgtgtttgggtatgtaggattcaaacagattgatttcagggtggagaatggagtagaatgaaagaatctcttcagtcattatttaaactacttatcgagcaggtggcccaggtgctgaggcagacagagcagcaggaaggaaggcggagcataggagtagctagggaatggtgagaggtgccatctgagtggagttgagaaggcagtgggtgctgcggctgggtgcacgcagtggagggcctcgaatgccaggctggggagcattttcttaactcagtaggtgagggaagaagccatgggaggtttatggagcagatgcccaagcagtcatgtcagtcatgtcaagtggcaatgggaggttgttattatagtcttggctagagggagtgagggccagggtgaaggtgttcttcatgaggttttcacttctatttgcaaatattcataaagtgtctactctgcatcaggcctgagaacaaagaaatggaagagacactgaggaggtagaatgtgcgagacttaggaaccctcagagtggagaggtggaagggaagggagagcgttgaagatggcacacctttgacactgagtgaccttgagaatgagtggcgggaatgtggtagcaggagtggttgaaaagtttggaggtggggctggctgtgtttggaacaaggttttaactctctctctctctctctctctttctctctctctctcgctggctcgctgtgtgtgtgtgtgtgtgtgtgtgtttgtgtttgtgtgtttgcagaggcagatgtggagtgaggtgaattcggttgtgagcgtgctgtagtaaagacgccatggatgctcagttagaatgcccagacctcagctcaggccagtgtttgggtctggaggctaaggaagagctgggttttcatgtctgggggagtgagctttggggtgtgagcaggccagggagtgggaggagagagagagctgcccaggtgattggcacaggagctagttttgaccaccttttctgtgtgttctgtgatctgaccactaataggtcagtcaagtcactccaacatgtttttttaattgacagattaaaattatatatgtttatggtgtaccacatggtgttttgaaatatgtatacattgttgaatggctaaatcaagctaattaacatatccattacctcacatacctataattttttgtgctgagaatgtcgaagatctgttctcttagcagtttccaagtatacaatacatggttattaactatagtcacaatgttgtacaatagatttctggaacttattcctccagtctaactgaaattttgcgtcctttgcctagcattct

SEQ ID NO: 55768 - DNA, 3325 bp, Homo sapiens
acccacattgctgcatcctgaattcgacatgaaagtttagatgtggagtaatttgagcattccttatcttttgcatatgatggtgtaaacacagttgggtggtgtgtgtccttcagtcagtttttgctagggtgatgtgtggtgtggtgtattagcaccatgctcaggttcaggacatcccctagcagtgtgacagcatatgagcctgtaaaatgagcagtcagaatggccagtggattcctctctagccctggcagtcccacagcctgtggatttctctatggtgtccacatcacagtacgatgtactcccatggatgggcacaagcaattaaatacttgtgaagatgacatttgaggaattaggattttgagttctttgcattttctggtccactgaatcattcttggagaaatcatgatgttataaattccattagaagtgtaaatcacaagaaaagttccttgacctcagcagtttgtaatctgtatgtcataaatgaaaacaatgttaaataaaaccaaactttgatcaaggtgatgcagataaagataatgttgataaatggagagttctgtttaggtagtattatttttctcccagaaggcaaagtgctatggaagaaaaacgtagccctttataggccgggtgcggtggctcgttcctgtaatcccagcactttgggaggctgaggtgggcagatcacttgaggtcaggagtttgagaccagcctgtccaacatggcaaaaccctgtctctactaaaaaaatgcaaaaatgagctgggtgtggtggtatgttcctgaattcccagctatttggttggctgaagcatgagaaacgctggaacctgggaggcagttgcagtgaactgagatcgcgccactgcactccacttggggacagtaagactgtccaaaaaaaaaacaaaagaagaagaagaagaaaaatgtagccttttctaaaagcctgaacattcaggcagtaaacatttactgagtgcctactgcataaaaggcagtgtatttggagcttgaggatgagactataagcaaagagtcattgtggagtgggctaactggcatacaaaagtgcatagatggcttatgggagcacagagtatatcccttctggggacccaggaccaggtgacattgaagaataagtggaagtttgtagtgcatctcacatcatcacagtggcgtgagactgtgtggagactggagaacctcgagtaatcaggtgtagaggagctgggggaaaggagaggaagccacaagaggattccaacatcagctccttggcaggtatggaggaagccttggggcaaaggaggacagaaccatggaggtgcagaaatggattaaattgatgcagtgaaccccagaggaaggaggggtttttctcccagtggaaacaggaccgtggcagaggcaaggggatgctaggagaatgctggcttccctcccacccttctctgcagggacatggggtgctcactagggcaagattcacagtgacacaggtgagttacatgtggcagtagcgagaatgtctgtgggagagtttgaggatgggagtgcttattgaccactgaacacagattccgcagaaaaagtcagaggaacggtaaagtgaggacataaatatgtagggggaatgatgacctgagggccttgcatttagggcatggccaaggatgacaggaagctgagccactgtgccactgatgggcctcgagttctggaatttactgttgggtggggttttccgatactgttccagtgggggtgttggaggtctgtgggcttacttggcattccagagcaatcttggtagggggtggacactgagcttcttaagagattcttctcagaagaccttaacctcttggggaaactgacagcagaccccagtgccatggaaggatcaagattctggccgaggacattgggcttctgttcttgggaggttttcttggggtgggaggtatgagaagcggtgttttacaagttttgcaaaaacactgttctaggatcctatccaatgcaacgactgatttctgtctctctagtccggcaggagaagcatttaattgttaaaacaagagcagtccttgtctcattccttttgttaattcttgccatgttactctaattattttcctatcctggcctttctgtctctcgttcagaaccagactaccaggtgtacctgaatgcttccaaggtccccgggtttgcggatgaccccacagagctggcatgccgggtggtggacacgaagagtggggaggcgaatgtccgattcacggtttcgtggtactacaggatgaaccggcgcagcgacaatgtggtgaccagcgagctgcttgcagtcatggacggggactggacgctaaaatatggagagaggagcaagcagcgggcccaggatggagactttattttttctaaggaacatacagacacgttcaatttccggatccaaaggactacagaggaagacagaggcaattattactgtgttgtgtctgcctggaccaaacagcggaacaacagctgggtgaaaagcaaggatgtcttctccaagcctgttaacatattttgggcattagaaggtaggaacttttttcttgttattcatttttgttttgtctttgcttaagtcgtgccgctgtgtgttgatgcacagtcaccctctgcaggttatcacttacactaggaatgtgtgtcctggacattgatcgccatgcgacccgttgcacatgctctttggactcactatcacccctcctctgtccccaagccccagagaggtccctctccaactcactgtcaatcagccaagtctcttgtttcctgaactttacctctgaatgtttcttttctctttcttgcattaaacatggtgactctgaggacactctttcccctggagaaaccgttacctctctgaggacagtttcccccagagcccaactaagtgatgcccattttcttcccacacttctcataactgggcctagaggtgtggggcaggtgcccttcttgatcctccctgcagcttccaggtcgttttcgctcactcctaaaaatatctagcttcgaatctcgtgtcatcatcacaccataccacctcttcttgttactattgcctgttgcctcctaggtcctccgttcattctttgaagatgttagcgtttgtttcacggccactctgtctgacactgctcccatcttgctaacttcagtatctgtgtagagcactgggtcacaattggaagccccctaggaacttaaaaaaaatgctggtgctttgtccca

SEQ ID NO: 55769 - DNA, 1033 bp, Homo sapiens
gatcctcctgccttagtcgcccgaagtgctaggattacaggcatgagccaccgtgccgggcgcccccccttttttatgctagtcttgatcttccttcttcatccgtctttctgtttcccacacccatttgtctacttattactttttccttttataacaacaatatttgacgtatatatactcagtgtgtctggtttttctccttccattctctctggtacctactcaaatcaggctttcccctcagctgcttgtggtaagatggccagtaatcatcatattggaaaatcctattgtcagttattttctttgacttagcagaatttaacgcaggtgattccctcctcctgggaatgctttggtttttcccttggcttgtgggacactgccttctcagggctttcttccaactttattagccatttctcagcctccttttctggcttctgttcattttttggacccggaaacattagactacctcaggacatagtctttggacatagtccttggacttggacttcttttctatttaacctcaccttcttggtgatgtctctaatctcatcaatttaaataccatctagaaaccagtgactccagatttacatgtctaccccaggcctctttccagaactccagactcaatattacattgcctccttgacactacttgactaacaggcatctcaagcttctgttcaaaaggacgcttcccatcacatctgccagctctcttctcccagctttctccagcaccattgttctagtggctcagcccaaaaccttcatccttgactgctcgttgttaaaattgacttagaatctggctacttttcacactctgccatttatggcgccacccttgcctggattacatccctggcctcccagatcgtctccttgctctgccctagcacacagcagctggaacaatcctgttaaatataagtcaggtcctgaaactccttcactctaaactttcaaagcctccccatctcactcagagcaaaacccagagtcctctaagtgg

SEQ ID NO: 55770 - DNA, 1025 bp, Homo sapiens
gactataggcacatgctctgtgcctggctaattatttaattttatttttagaggcacggggttttgctatgttgtccaggttgatcccaaactcctggcctcatgcaatcctctcgcctcagcctctctaatcagtgagattacaggaatgagccactacacccagctcaggttctttttaaaatgttgcctcctcagtgaggatgtccctgatcactctatttacggttgtggcacacacaccttccttccaaatacaaatccacgctttttctcttccttggctgcttattatctcttaaacatttatcaccatataaccataccatatattttatttgtttatttcatttgtcttccttcactggcatataaagggagggatttttgtatttatttgttcaccgttatgtttccagtacctgcagtatggaaggctgtcaataaatatatgtttaaattgatgaatgaatgaccgaactcacaggaaaatcaagaaagaatgtggtggctcagtagaagctcagcagtcagtggttctggagagagttcttaatatacatgttctgctaatcggtttggtggaacaagtgttccaaaaaatctaacgtaaaaatctcatcttgtaactggatggattataggattaatcatcttattaaaggataaaaagaatgtatctaattcatttattcatccactcaacaaatatttaagcaccttccaagtgcctgacgttgtgctactataatagatgaattctaatgtgtacatgcataggcattgttgttttgacagagacacaaggagtaatccacttaaacctaaagttagcgtagccatagacacctctcaaaatgtttaaacagcatttctgaaattaaagtgtaaagcaagtggaaattattagatctgcaaatacatacgctacagtcattttagcaatacatctgttctgtaatgtcactatcatatgattaaacagggagaattcatttctcccttgctgcattcctccctgcagg

SEQ ID NO: 55771 - DNA, 1050 bp, Homo sapiens
tgctgtctgtaggaatctgttccatcttgttttacatttgttatttgatctttcttttaaactcttatatggaaaaggggagacacagagtattttgtatctatttctgggtgaggaatggatgttgagtctattcctcagttctttaaatctcagcataacagataaaaccgctgtagcttccaggttgaatagattgcctaaggttttattttatttaatccacagagttgtcatggccagttcacattttaattaggagaagctgccatcaaattcagcacccagaacaatactatagccctgaatagccaccagcaaacattgatttgaaactgaacagcctttgcttcctaaaaatccgtgacataccttaagacacgcaacaaaggggttcttcccatgttcaccttcctgtcccctgatttcagggcacctgctttttggtattaaaaaccaaggggccctactgagtgctgggttttactgattcaaagtgtcaagaggaaaatggtatttaaatatgatagtgtaggctttggccttttaaaagaagaataataaatttttttcttcgtaatatatagaaaatttgaaaatatagtaatgtagaaagaagggaaagagacttatccatcatcctaccagagactgttaacttgtgttgttcatcttcctagaatgtttttcttgtatattttcttcatgactttgagatcaagctgtacatacaattttaggacctgcttttctccctttagtgttataagatcagcactttccatattgtcaccaattctaggtaaacattaataccacgtttaatgactttacatacttgaatttgcttagccattaccctattgatggacatgcagatggtctgtaacttttgctttcattaaaaaaactgccactaacagctttttttagaggccaaggttggaacatggtttatgtcaatgtttgtatttaaaagttaagtagttcctatactctctgcagactaggaattgggggacccctagtgactccggttgttcatttaaa

SEQ ID NO: 55772 - DNA, 1050 bp, Homo sapiens
ttccccagcacccagcacagtgcagtgagaccactcactccactggaaccaaaagctttcttgcttcagtccctgttcctctgatccctaagccaccctggcctagaagtgaaccatgttgaactagaaccagcccaggctgttccagggtggagggtagctttcgaatgaggtcactgtggccaccagaaagaaaagccagagcaaaagtaattctttcagaagagttctattttggttgtaatcttaagatgaagctcacttggatgtgcctaatgcccatgtctctctgaatagaagagaggcaaccttggaacacctattttgtgagtttctagaccagttcccagggaagagaaccacattttgatgccccttagagtgcaaagaatggaatttgacaaaagcatgaaagagaataatgaggctggcattactttttttccaggtcctatatttaatgcttctgtgcattcagacacaccatcagtaattcggggagatctgatcaaattgttctgtatcatcactgtcgagggagcagcactggatccaggtacctcactccatcctcaccccttcaccatgttgctttctgtaaatgtttctcatatcatccgcactgtgttacacagatgtgggttagggataggattatctatttatcccctaactgcctggcccagtactttgtactcattaagtgtttaataaatacatgttgagtggatgcatctatctgctagatggtttggaaatacatccagacatttgaatctgagctgtcaagacagtcagtggggtcacttccaggcctatttcaggctgatttgaaacccactggcagagtctagctccttctcttgtgtctttcattcatttattcattcagatatttattgagttcctttggtatacaagtgctgctctagatactgggaatagatgagtgaacaaaatgcccaaagtcagggggcagttccaagatggccaaataggaacagctccagtctacagctcccagcgtgagcgatgcagaagacgggtgat

SEQ ID NO: 55773 - DNA, 2025 bp, Homo sapiens
ttccttggagagacactgggaacaaaaaaaaaaaaaaaaaaaaaaaattatgctcaagtgccacagtgggtcaatgggagaaaaagagaagatattacatgtttagagtgagctaaggaagaattatcatttggataatttcatagaaattcttgcttttagttctgcttacttttttaatatgtaagcatctgaaaataatttatttgccttatgtgctttttgaggctattagtgtatttttactaaatgaacaaatgttatctcttgttcggcaaaaaattgtgttatttgacatttatataaaacgctttctcaagtggatttaagacaacagtgtcatggctgttgtcttttgttgctggatgaatctcagagccgacacagctgataatggttggtaccagtcaagggaagaggtcaagggcttatgatgtgtgctctgttttcacattccatgagaattaccacttgtgccaaagtcttctttctcttatgcccatattaatttatttgaggctgttagaatcttaattttgcagagtactttacgattcagcattactctctgggactgttaaactgtgttccattttctcagcttgacattttttttcctcttgttttgaacttaagcacttctgcaaggaaagaaaaaccatagtgtacaataaaatctaaactgtttacaactctaaatttggtgcaattcattttatgtacattttgttccatatgactttagtgtccttccagtcttgggttcttctgcctaaactgtcaaaggagctggctttctttgggagagagagcctgcagtgtcctggcataccagctttcggatcagtgttctctgtgggagacagtttttggccctgactcttcttcctgtggccccttagtctgggtggcagcagtgcagtggttaagaggctgggctctggagctgtactccctgggttaagctgcacactctgctacctgctgactacatgaccttgagcaggtatatagtctggcaataatggcagaataaaagtatgatagtgccttcatcatagggctgttgtgaggatccagtgagaccgaaggcatgtagtgttgtgcttgccatacgtagtaagggcctcatacatggatgtggccatacatatgacttctgcccattgcactgaccccagggttttggcttggtaatccgtagatgacatggcctttgatgtgtcctggtttgcggtgcactcttttggcctggacaaggctcctgtgctcctgtcttccctggatcggaagggcatcgtgaccacctcccggagggactggaagagcgacctcagcctggagcgcgtgagtgtgctggaattcttgctgcaagtgcatggctccgaggaccaggactttggcaactactactgttccgtgactccatgggtgaagtcaccaacaggttcctggcagaaggaggcagagatccactccaagcccgtttttataactgtgaagatggatggtaagaatgtcacccaaatttctcagtgtttgggaatgtcttcttcttgtgccaggctgtagctgacagaacccaggtggccacagtttgaggaatgtgccatagcacgtcctgctttctttctagacctggcctgagcctgcacccagaagggcaccagcagcccttgcagtttccccagctttgctattatgtgctagtgtcaccattgataaataattttcaagacttactagaaaaattttcaaggctttgcctcttccataaatttatagaaactcgctttatggtgtccgagggttggcatggattctgctaggcacaggcagagagcagccttgagagagagggctcaggtcaataggggaggctatagcttagggacctgctactctcactaccactggttttgcttcttaagagagactcatggctgggcacagtggctcacgcctgtaaccccagcactttgggaggccgaggcgggcggatcatgaggtcaggagttcgagacc

SEQ ID NO: 55774 - DNA, 1455 bp, Homo sapiens
ggcgagggtgcccccaaagcggcctccctcgcagcactgactggcttcccctttgatctctccctcccagtgctgaacgccttcaagtatcccttgctgatcggcgtcggtctgtccacggtcatcgggctcctgtcctgtctcatcgggtactgcagctcccactggtgttgtaagaaggaggttcaggagacacggcgcgagcgccgcaggctcatgtcgatggagatggactaggctggcccgggaggggagtgacagagggacgttctaggagcaattggggcaagaagaggacagtgatattttaaaacaaagtgtgttacactaaaaaccagtcctctctaatctcaggtgggacttggcgctctctcttttctgcatgtcaagttctgagcgcggacatgtttaccagcacacggctcttcttcccacggcactttctgatgtaacaatcgagtgtgtgttttcccaactgcagctttttaatggttaaccttcatctaattttttttctcccactggtttatagatcctctgacttgtgtgtgtttatagcttttgtttcgcggggttgtggtgaggaaggggtgatggcatgcggagttctttatcttcagtgagaatgtgcctgcccgcctgagagccagcttccgcgttggaggcacgtgttcagagagctgctgagcgccaccctctacccggctgacagacaacacagacctgtgccgaaggctaatttgtggcttttacgaccctaccccaccccctgttttcaggggtttagactacatttgaaatccaaacttggagtatataacttcttattgagcccaactgctttttttttttttttttttgcttctctgccccttttccatttcttttgtatttgttttctgtgagagcactgaaatggcagccctggaatctacaatttggctctccactgagcaccttatcttgccaccttagccttaagaatgaatatgaagaaaaatacacagccacctctgtccagggcagtaagaagggctgcaaggaaggggaggatggggacaaggaaaggatcagatacctgctccagtagttgtgaggccactgtgtctcaggggactccaggaggagcagaagagggatcccacgaagttattcttacgcagctggggccaggagggtcagagtggtgccaggtgcaagttaggctaaagaagccaccactattcctctctcttgcccattgtggggggcaaaggcattggtcaccaagagtcttgcagggggacccacagatatgccatgtccttcacacgtgcttgggctccttaacctgaaggcaaattgctacttgcaagactgactgacttcaaggaatcagaaattacctagaagcaccatgttttttctatgaccttttcagtccttcaggtcattttaaggtccactgcagggggt

SEQ ID NO: 55775 - DNA, 1630 bp, Homo sapiens
gggtgcttagctttggacctgaccgggtgtgtgtaaaaccatggactgagtcacagcagacactcgatggtggtaaatgtgatgggtgcttacacactgtaccttttcctttcatactgatgctgcagttcagggctggagttgttaaggcattgacctccacccacctgccccatgtccactgggctgcccaagctgcatgtcacctgagggctggcaggaaggggcgagaaatcccagggcattgtaccaaggacctagttccttctagggatataaatttccaggaatgtgtatttttaatgtggtgagatgcactcttttgttgtaccaaatagggctccccaccccacccctgcgacaagtgctcttctagaacaggttcctaccagcagcactggtgtgaatgaaagagagacccagccgcgtctcacacaggtggaattgcacttcttaacaaaaaggaactttataaaagtttgggattttttttcctaatcataaaaatagccccagaaagagcctaagctatgttcagatagaagcctcgaaattcctgtaaattgtttactttatgatgtttacatacacgtttcactttgaaaaaaaatgcaaatcgactttttaacaactgttgagatgtttcatgggacagtagaactctgactcaccaactgggctaaattttaatttaaaaatgtatttatttgagtgtctttccccccctcaccctcaccatctgaggggctccctgagatcttggtagaggaggcccctcctgcccagaccttcgtttgtttccccggtggcccttgcttcttgctttgcagactgcctgcagccatgattttgtcactgacatctgtgagccaaagactgagcctttttggcaggaataataagcaatactacacaacttgctactttcagaaaacttttttttagcttcaccgatgacaacagaggaagaagggaactgggatttgggtaagttctcctccactgtttgaccaaattctcagtgataaatatgtgtgcagatccctagaagagaaaacgctgactttctttttaagtgtggcacataaggatctgcagaattttccgtagacaaagaaaggatcttgtgtatttttgtccatatccaatgttatatgaactaattgtattgttttatactgtgaccacaaatattatgcaatgcaccatttgttttttatttcattaaaggaagtttaatttaaattgaagttgtgtgaggagcttgatattggcctctgtcctttcatatcttcagcgtgagggattgtgactggattccagcagcaactttagcaccttctgatctctttgaatcctgtaaaagcattgcagattttcactaatgataagagaagaaatggatttgatgggatcaatgttgaagttcccaccgggtggaaaggtgagggctaggatcctattgtttacagaaggcctcctgctctttcagggaattcccatgaccttacaggactcctctcaggaaagagagaagttagatattgttcctctctgcagttgaggaaacaccaaagttctgtgaccatatcgtgactggaacggagtggtttttctgactcatgatgca

SEQ ID NO: 55776 - DNA, 1007 bp, Homo sapiens
ttcctgtctcctctcctcctttctgcctctctttaaggcctattctgatcccctcccctaaactttttttaatctttatagcttgttgtcaactgaccctccgcaggaaatttaaggaatagcccttcccaaggaagtattcacttagaaaacaggagatggcctaggatcccatctgtttctctttctcctcttttgtcaggaagctaaactcgccctattttgcaccccatgcttctttgcctcctccatagaaacctagttcatgctttcctcacaggtaggaagagttgtcacccaccttgaaaacttcttcaggattggttaactcatcagctcctggtgaagctgggccagtgggaaggaagagcaaagaggccggggagttgggacctggacttcatcctccatcactggggccaagtcccagctgggcctatgcaaggcctcagtttcttcctttgttatatgagggagttgactgagatcactatggtcccttcttgtagtgtgactgcttggtgttatacacatgcagaggtgaagctcaacttcagggtctccctcacatgggcaagtccaggccctgtggaacggtaatcaatttgacctgagttcaaagagctcaagtgggataaggggtgaaataatgatcagcctcctgctgaccccttagggttttttccccctcctccagccattcactatcgtacattctgcctcctgtaaatcatgagtagctagctagaaggtttgttagaaagagctctgaaccaaaagtgagaaggcagccttagaatcccgccattttctagccatgatattgatatactctgagtctgttttctcatttgtagaatgggattagtaatacctaccacatagtgatatgaggtattctataagactgtatatgtaaagtgccttgcacagagcctgatatgtaaaaggtccctatttaaatatttcttgggcctgagtgcttatgatcagaggacataatacct

SEQ ID NO: 55777 - DNA, 1062 bp, Homo sapiens
tcggataccagacccatgtttgccgtatatggctgctgtttttttttttttttttatctcagctgtttattaaactagaccccaagttcctggagggcagggccctcttacacctcttttatcccccaagccttgcatagtatcttgaaaagggaagtacagggcctttcacttaagacttcaatatttgtagtttgaccatcactggagggctaataggtatcattgctaatgaataaaaccagaagaatggatgagtgaatggagggatggatggatgtatggatggatagatagatagataaagttagatgcctccagacctgaatttgtagaatgtaccccattctactataattctcactaggaaaataaattttactttaaaatgccacctttcccctgaagattttactgacctcccattcattctctccagattagacatgccctcttccttctctgatatccctatgtgacagtcaagttcttacctgctcacctccaccatgccacatggcacaagcagcagctccttcagatcaaaggctgcagcttaattatgtccttaatggatgtccagcacatggtagggtgcttactgcacagggagtattccgtaactatttgattattttatctatcccacctctgtctttatttatttatttattttgagatggagtctcgccctgtcgcccaggctggagtgcagtggcgtgatcttggctcactgcaagctccgcctcctggcttcatgccattctcttgcctcagcctccccagtagctgggactacaggcgcccaccaccacacccagctatttttttgtatttttagtagagacggggcttcaccatgttagccaggatggtctcgatctcctgacctcgtgatccgcccgcttctgccacctaaagtgctgggattacaggcatgagccactgcgcccggcctctgtctttattttaaatgccctacttcaggcccttattattgctcatagagacaactacaaaaaccttgtaactgaccttcttgcttctagccttgtctccctt

SEQ ID NO: 55778 - DNA, 1321 bp, Homo sapiens
aagattcacttggctctactgagggccatgcagaggggcttgcctgatctaggggcatttatctatgtttgaataggatggaagaagagaaaatttggaggtagaagggagagtcagatgagttgagcaggtaatggaatagtttcaaaccagatagcaggtactttttatgctacagttttcattaacatctggtaaagagaatagactccatctcagaataatgtttaaaatgcataaaataaaatgcatagaattacagaggaaatcagtcacattgaaatacaggtatcaaaatattttaaataaattataatgcagtaatttatttgcttcttatttatgcattacataacaaaatctacaggtaggtcttttaaccaccaaacttcaaagtaatgatgagtataaataacatttcaatatatcttaagtagttgtaatgtgatatgaagatatctgtggttgtctacatacataactgaagaaaatactaaatttccattagaggcaaaaatgaaaataaagatgtaagattatttttcaccctagtttatggaccctttaatcctacatgtggacccagttaagaactcttgctttatagctgggcatggtggcacatacctgtggccctagctacttgggaggctgaggtgggagaatcgcttgaacctgggaggtggaggttgcagtgagccaagattgagccactgcactccagcctgggtgacagagtgagattccatctaaaaaaacaaacaaacaaacaaaactcttgctttagagagactggatggagccagtgcagggacccgaatggctgggatgattggggaactaaaccaagctgcatttggtgtgaccaggactatggctgaagaattaaaagaaaagaatacagcattcagcacaaagaggttgcttaataaacattgattgagttgaattgtgctcatgtctctaggtacatatgatagtgtgaggttaagagtcagacctagggcctgcaggggaagttactgggaccacttgctgggtgacggatgcctgccagactggcttggcgggtgttgatggataggtgcactggtgggatcctttgggggctggtgtgtttttgttgtttggttaagttgtctgagtgtgattctcaagtgtatgtgctttgtgtatttgaattctatgtttgctatgtatataggaggaaactgggtttacattgtgcaataattcatagaattgcaaattctgtctctttttttggtaagcaggctagaagccctgggggaaggaaagtagtaatcaaggctcaaaaagg

SEQ ID NO: 55779 - DNA, 1050 bp, Homo sapiens
gactcatctgaagcactaattttgtgtagaagcacagtttttatgtgaagaatacataaatcaggaagttactggaaaaagctttagaagtctgctgtttgtccttacaaatatagaggggaattgaaataaattatttaaataacgatctattgatcaattacattggttagcaaatttacactttgtcccaatttttttttagtaaatataaggactgaacaatcctgatagaaaatggtgccatatgagattaatgtcatgggtaaatgagttctcggatttagcagttagctttgtctgcttgatctatttcccccacccaaactagctgccctacaaataatggccattaatatggcagggtttgggggaagggctattgtctgtcttactgagtttgcattcatgaaaaataaaaaagattccacttagtatggatggaagctatctcagcctccaagcatatagggtttttgaatgtgaaaagagaaagaagctgcttgttatgttggctattcctgaggtaggttttgtataaggtagcattatttgaaactgctgtttttttggtataaaaagtgctcaagtatggaccattttatacagttcaacctaatcgttttcattcaaataatactgcagtggtaaatttgacaattccagtgatatttttaaagaaagtcaataccatcgaggaatttttggtgttttgaaagcatgattctaatgttagtatgtcagtgccaagctttgtactcatcagccaacaagaatatgagctactattcaaaagtagctaaccctctacccattaaaagagagagcaagagggcagtcctcacaggtgtttttcggagggtggatgatatgtacttgaaaaaacccagagagaatatatttatagtaagatgcttaagcttatggccccagtgcatagccatttgagttgatctctgccagtcatgccttctacctgaaaaatacctttgaaatctccacactatttctttcacttttctcagaaagtagtatgtcttagactgtttg

SEQ ID NO: 55780 - DNA, 1082 bp, Homo sapiens
aacacttgtatgtaactgacctaatctacatctaacagttcagaactctccctagttacaaacagacatttacaggagccaacaagaaacaatggggacagccatggatttggcatttgcagatctattaatatgttcaagtctggctcaaatcctaggagtttttacataactaaatatgggaatatcacagggtttttgaaaggattcgattacaaatattttcaaagggttaaagtctatttaaccctttgaaaatatgtataatttatatgtaaatataaatatctatatttaaatatttcaaaatgtttgctggatatccttcctgtctattccatggtcttcaaatttagtatttctaaaattaaatgcattatattttcactcacccttatacacacaacagtaactcttcctaatatctgtatttctagtcagagtatcaatattctcccaggcagccttatcaaacctatgatctttgatttcttcctacctctcatctcgccatttaaccctgctactcccaagcatccaacgcactgaaaactacagattttgtctccacagtagctcagttatagtacctttacttttatccctattgcttttgtcacctctgtcctgagctcctacaattacctgattgtctatttctaacttccatcattctgcacacaaactgtgaggttcattttcctaaaacctcctaaacactttcagtggattccccattgccaatgaatcaagtccaaacttttaaatgtgatagtcaagtcctttctgctctggacccaaaaattgctgtccagttttacctctttctattaatctttatgcagccctcccccatccagttgattactctttaattttgagtaagtcttttgattcctactcagagtcttgccatgaaatctccttcacctaaaatgctctgtctccccacttaccttgtcataatcttcccaattctccaaaatccatttctaatgccatctcttatgccatctccataaacctatttccctcccctcaaaatgtagtccctcttcaaaatttttgaagcacttttatta

SEQ ID NO: 55781 - DNA, 1114 bp, Homo sapiens
acctgtgggttctctagaactaaagtctgcctgccaggtgactgctggaggatccagtcagtgctatcgaggtaagacccaagggcctgaccctgctgtgaatagccacccctgtgagttacgtgccacccggtacagtagtcacctcttatccacactttcagttaaccttagtcacctgtggttcaaaaaaaggtgagtacagtacagtaagatattttgagagagaaagagacagaaaccacattcacataacttttattacagtatattcttataattcttctattttattattattgttaaatgctttctgtccctaatgtattaaagtttaaaataggtatgtacgtatggggaaaaaaaaaagccaaaacatagtatgtgtagggttcagtaccatccagtttcaagcatccactgggggtcttgcaacatacgccctgtggataaggagggactaccgtagatgtctttgtgcccacatgaggggagaagccattcttaagtcagaagttgcccatataataaagattgtgcagctcagtagagctttgcatcgtgttacttagctttctgtgagggcacagactgtgtctaccttgttcaccactgtatgctgattagtcagctcagtggctggcacataggagtcatccagtcagcatttgtggatgaaaactctagctcgcatcattatgaggtaggcagacctgcagatatgctcttattctttcgtgtgtgtgtaagtgtgtgtaagactgaggagagacatgagtcaagactgatgactaatagatccacagagagcaataacaccctattagctaagtgtttccttcctgaactttctaggcaactttgaattcagaggtaactgcagaatgaagattccaagtggagcctgaaatgtgtaataggatcagttgacaggagactgatcaggagataggagcttggagattgggttggctggcagtgaccagaaaagcaaaagccacttgtttcccaactgagaactgctagagacatggaaagttgaggagagtagttaacaaggagggtaagaaacagatacagggccatttgtagctaagttcactctaaagggata

SEQ ID NO: 55782 - DNA, 1061 bp, Homo sapiens
gggctgaaggtgagccagggaagactcctggtgtagtcctctatgacagtgctccagcagccccatgaaactgctggcagagagactttctgagatacctttcctacagacagatgcttaaatggcttcccttgcagcatcctctccttttatgcttaacagtgcaaacaataacaacaaaaccccttttttaaaaagtcataaagttacttatttctgtagcagtaaaggatccatttgttgagttggtaggtgccacaagaatgtgaaggaattgttgcttgtaatgaactagttggggtgaaaatacatatacaatgtaaataaaacaattagcaaaggctttaaggcagaaataaggggtgccttgtaatatactataaagtacaaaagggattcagaataaaggaaacatcactctaggtcagtgattatttgttgtctgcctactttgtgccttaaaggttgaaagcctttagatagcagagaggaaaggaataaaacgctgcaattagagggagtggtgactagtgggaagataaagagattggtattcagaagtggtgatcagctgtcatcagtacctgagccagcagtagcaggtgatgttactgagtaggagcctggcattgatgaaggattagatctgaataactcaagagatagtatggaatcgctgtagcatttaagcagggatgactgatgaagattagtttttcttaacagagtacaagataaactggagtacagaagactagaagggggactctggtcaaagggctattgaaatttatgaccagtagtgcagactgggacattggctgcagaaaggagaggcaaatttaagagataatgaggaaataatgaaaagccaatgtaatggctgctgaaaatagggtcagaggtcttggttaaaagcagagagctgggcatagtggctcacacctataatcccagcactttcggaggccgaggcaggcagatcacttgaggccaggagctcaagactagcctggccaacatggtgaaaccccatctctactaaaaataagaaaattagc

SEQ ID NO: 55783 - DNA, 1071 bp, Homo sapiens
ataatgaatcaactcaagaggagttaggaaatgatccagctttcacttccagccactctgtgaaagcacattgctttttcacactgaggtcatgtgccacccactttcctccccctgtttagcctctctttctgcctgtacttttagtggagaaaataagtaatcaagtgtttcagtttaaaagaccatttcttccatttcctacttcactataggctctgtatagaaataagagcaatggttaaacatattaattgaaggagtaaagtcagtcaagaggaagaggtaatgcctttaagttaaaggccggtcaaacacgatgactcacacctgtaattccactgtgggaggctaaggcaggaggatcacttgagcctaggagtttgagacagcctgggtaacacagcaagaccgtgtctccatatattaaaaaagaaaagttaaaagccatttggtgaatgtaactaggcactgatttttttcccttctcaagactcttgtgactttacttcccatggaacactaatcatctgtcctgcctccctgatccatcattggaaaaatgaggtggagaaacgggtgaacagcaacaaactaagagtctatctctaccatgggccaaaccgggattcacgtgccagagtgtaagtgcaggaatacgcagttgtgggggcgttcagcacctctgcccaagggcccacgggcctttgctcccatccctgagatttcacttaatcaggacgcgtatttgtgaaagccaaagacagatctttagtctcgtcaccatacagcctttgcgttgtatcctgaggtctactggtgatcttttgctgtgtccttgtcattgtcctcaatgaaagctgccctgtgaggaggcctgagatgccggagctgccattcaggtgacagcagcattcccctagtcaaggagatgtgtcgcaaggccctcatggctgctggagttctgattccaggtgtacatagtgtgaatggaaccagcccagttctacagagcatcttgatagaatgctaatgattagttgctataggttgattatatttttatgactt

SEQ ID NO: 55784 - DNA, 1124 bp, Homo sapiens
agtgcatggtgcgatcttggctcactgcaacctctgcatcccgggttcaagcgattctcctgcctcagcttcccaagtagctgggataacaggtgcccgccactatgctcggctaattttttgtatttttagtagagatggggtttcgccatgttggccaggctggtctcgaattcctgacctcaagtgatccacccgcctcggcctcccaaagtgctgggattataggcatgagccaccatgcctggccatattaggctctttatgatcttgccctacctgtatgtcgctcatctcttgatgacaccctgcccctccctggggcacctcttgctcagtcataccaagggatctgtagttcccaccatgctctgtcacagtgttgtgtctgttctccctccgaatgaaacgctttgcctccactccttctcccaggttaatttttttaaacctgcttcaagaatcttttctggaccactcccttcccaccttcccccggtttggttgaatgcctctgccagcaccttgtgcttacataagttatagcactttgtttcttcagcagacgttgagtatccactatgggtcaggtgctgtttcgtcaagagcagccagattcccacttcaggtattgaactagccagtgggacttactatatctatatcgtattgtaattatctttacacttgtttttctcccctgctagattttgagctcttgcaggtaggaactgttttttatatctggtttagcatctcacatctaaaagtagacttttggaaaattgttagtaaatttagtaaaatttagtaaatgttttattgagtgagtgaatttgcaggttcaatgcctggtgtagtcatggtctacagccattgcttaagtgtgtatttaaagaataaaagaaaagtcggctgggcgcggtggctcatgcctgtaatcccagcactttggaaggccgaggcgggtggatcacgaggtcaggagatcgagaccatcctggctaacacgatgaaaccccgactctactaaaaatacaaaaaattagccgggtgtggtggcgggcgcctgtggtcccggctgctcgggaggctgaggcaggagaatggcgtgaagcccggag

SEQ ID NO: 55785 - DNA, 1802 bp, Homo sapiens
tatatgtcttgttgtgacagcgtaggcatcgttaataggaaaactcacatttttataatgtggttttgttattgacttacatccttttgatctgtccagcaaaggtttgctatgaaattcacttttaaaagtgattggatgacaggtgtaacagaaaatctgatttgtcatcttatatcttactttgaacctttattccattctccctgacttttccttccctactctgtgcccttcttcctcaacaaaaaaggtttctccgttgctctccatttgatgagttcaatctgtggaggagtcaggttgacaatggctcaaagaaaggaggagaacggttaagtattttaaccaagagccttttgctgaggagaacaaaagaccagctggactctactggcagacctttggtaatcaagtttgtacctgtccctgggggaggccagggaaggaacatgactgtgtccttgtcttgggttgaacagccatctgctttgcttcaggagcctctgagtttcccatcctcctgtgaggaggccccagggttgcagttccatgcctagtgtcatagcaatccagttgtactgtatgttggagcagtcctgtgtctaagaaagggtggaagctgcattccagggttgactagatatgcagtgtcagtatggggaatttgttctataataggcagttaatttgtatagcttcatgccagcttttttttttattcttccaggtgatactgccccagcgtaaatttcagttgcaccatttaaagctttctgaagatgaagagactgtttacaatgtgttttttgcaagatcaaggtgtgtgtattaaagaagcaccttctcacacacattgttttattcctgtcttttcttgggagtgagttgaaggtcaaatttccacaaactttatggcattattgattagttggatgtctgtattccctttttttttttaccccatttttctccttctcccctccccagcttacctctgtctcatacacacatggaaggcaaaattttgaacctactcttcattggcttccttgcatagaagtcatagggtgtggtcaccatatactgaatctgtctggtcctcatggggctgtactgaataataatatctctttgacatttgacctgtcatccagcatctcaccggaactttaagaagatgactttgtaatcctttgtgtcatctgttctttgcactttctcttgaactcttatctttccctgaattccagatttactgtttcctatttggtacctctcatttacatttctaatgtaaatatattttttcttcttttacaccttatatttgttagcttattttaaaaaaagattggttttttaaaataactgtttcttttgcattacctttggccattgcttcttatgagcttggcatcatttaacaagtcttctataatttgtcaagatcccactgcaggcacagttaagcaggtcttagtgaccattatacatgcattttttttctttttaatctgaggcaggtcagctctgcaatcctatctaaaaagacatgaaagtagaggcaaccaatctggaagaagccctaataatccattcagtagaggtaagctgtaggactctcataaatacatatgactggtgaaaatggggatttggattcagtaaaacacagaaatgtgaggttatgaatccttggtatcagagatttggcgttaactaagaccctcaaaccagagtaaaatctactgattgcaaacacgagatctggtgtttatttagcttctttttaattgttt

SEQ ID NO: 55786 - DNA, 1299 bp, Homo sapiens
ccgccagtgttgctgtcatctttctttactgaagtcggtaagaaaagccctcagcctgctgtcatatagtgctccagaggggccacctgagaagtcaatttcactctcctccaactggaatccagtctgcttgatcaaaggaaatgctgtttcggtttttctatttttgttttttggtgggttggagaaaagggggcttatttattttgctttatttcatattaatcttgataattcctatggcatcaagaatagtgtatttctattgtttattttgttttagattaactgtttaagaaaagaaaatgatattttgtttaaaaagaagccatttgtgaatgctctggtacttcagaatgtcataaagctaatttagttcttggggttttctgctttcaggcagttttggggttttgggttccagttataaaaactcagatagttatacagactgaaaagttgcccctaccttggatagaggcacatccaaaattaagaggagtattctattcatttaaggagctgtaataatgtattctgattatcaacatctcaattatattctagcttggaaaaaatagaatgattatgtcatctgcctggcaagtctttaaaaagttccatcatttggtttatctttaatgtggtgaaaaaacttgcaagatcacactttaatcaaggtgtcttgaggagttactgatgacaaattacaagatattttgctctgtgaagtggtaaacaatcaaaacatcatcaacaagtaacaaggtttgctcccttgactcccagctgctcctgtccttttttgtctgttcaggccctggatccaatggaactgaagggtgaaggtcttgtcctttccctggaagaacagctcagtgctttgaccttgtcagaactccgtgactcagagccatcttccactgtttcccttaacggcaccttcttcaagatggagctttttgaaggcatgcgagagagcaccaaggtactttttgtctcctctgtagtagtcgagagacttcgattcctcacacattttcctgtgtgacagcacttcatttgtccaagtgggaacagccatttgccagcagagctagagccgttaaattctagctgatcagattctccctccagtcttaaagcttcatttatttcacagataacactaaagccttactacataggggactttgagagagtaatttgggacaaccccagcattgcactgaagtgggttttctgtcatgggtcactggggagcttgccaggtttgtgctagggacggggcctatgcaa

SEQ ID NO: 55787 - DNA, 1050 bp, Homo sapiens
gcaattcaaagaaattcagcatcccaaaagaggtaactgcgttttctcattatccaagtattggtcataattatgtgagaaaatttgatattgccaagagttataaatcaaggactgtgagtcatgctcagcagaaagcactgaggttatagcacacattccctgtgatttctaattaaaatatttgtggtacaaattgaaaaggagatccctagaggatcagggtaagcgaagcatctgaaaaagtgtttaaaagtagagaagcatataaagaaaagcaagcgagtgaggaggctccagcagtgctgataacgttcttaagctgagtacttggatacaaggactcatttgttatacctgacatatgtgctatacacctgcattatttataaaataattcaatataaaaatttagaactcgaattaagacagcgtgggggcagggaggagcctgttgttctggctggcacaagaagggtggtcagtgtgtcccttttgtgcaggaccacagatttctggatgagcactaggaccccaaatgaaagaaggctggagtcatcactttactctagctaccatttttttctgacttcatttagcactaaataaattgtagaaaggacctagaaataactggaagcattataatcttcagatatgacctaaatgtgtgccttctcccttaggtagcagaaggcctttccttgtcaacatttgatagctaaccttaagaatgatgagggcattaaagccctgcagatgagtctgtttaatctatgttagggtatttttttattttattcttctttccagtgtcattgtctctcagtggaccaacatgctgaaagttgtagcattgcacctgaagaagcatggactgacttatgccaccatcgatggctctgtcaatcccaagcagagaatggacttggtagaggcatttaaccactccagaggccctcaggtacaagctggtcacatcagagccgcataattaactgttctgagttatacaaagagaattctttttgtttggttggtttttgtttt

SEQ ID NO: 55788 - DNA, 1442 bp, Homo sapiens
ctcagcctttcaagtagctgggattacaggctcctgccaccaagcttggctaatttttgtattttcagtagagatgaggtttcaccatgttggccaggctggtcttgaactcctgacctcaggtgatccacctgccttggcctcccaaagtgctggggttacaggcgtaagccaccgtgcccagccatataaagagaattctgatatggcaacttaaaaatatttacagccttgattcctccgagtgtttagaatttattagacatgtattgggatacttttaaagagcacaaatattctaaaaagaatcaaatatgaggactaaaaggagattaacagcagagctggttaggttgaggggaatctttgcagaggaggcaagctttgaaggataggtggggttttggtatgaggaaatatggaaggaaatgaaagaacacaggcatctaattatagataataaagatttggaaagcattagtagaatgataggcaggagaattattgtagcaatggaggggtagggactgatgaaataaacataatctggttaattgaaagtttattgagctgaccatccccagggttctaaattacagtatttatatattttggcaagcactcagttaattttttgaggttgactcacacacacacaaaatgtgatgtgagaattttctcaaaagtgagacatgggagatagcattataatgttaaaaaaaaaaacaatttataacagcagaaggaaatttgataggaacacagtgcttatctgtattgattgtggacttaaacctgagaccgagatgtgttacgagaccaagtctgtttaaagttaatgttgtgtttccttttgaaggtaatgctaatctctctcttggccggaggtgttggtctaaacctgactggaggaaatcacctctttcttttggacatgcactggtaatgattccggatttgtcctgggttgtcacagcacatcaaggaggccagtgggctacaggggcagcaagaactgacttcttatgttgattgctgtgttcgtattgcagagatgccttgctttgtatgtgtctatagatacagatctaagcagggtatagggctagctgactcccctgaattcctgagctagcaagccttcaaatgactactcaaaatagttcattcacgttattgttagtctaacatctgtttccatggaaacggggagcatagcttttcctcatggctaagagttaaccttgctcagttttacctcttctccagaatactgtattccagacacacttgttggggtccaaggaaatttcaacctttgaaaagagggagaagcattactccaaaaagaaaaggaatagggattttctaattatgttagaaatacacttaatacctcacccttggattcattgtatgtagtgttaataccaggagtacaa

SEQ ID NO: 55789 - DNA, 1038 bp, Homo sapiens
aaaaaggcagctagtcaagatcattagctggcccttcaatttccaagtagcaatctgaagcctagaggactgaggttaaataacttgcccaaggacatctagctacctagagaccagacctgagttttggtttcacctctgttacttaagagttgtcaactgatgatagtgctaagagctattattaacagtctgaccctagtttctcactagaaactaggcaagaaggtatctggcaccagcttgtcttaggccagtatagcttaggacagggatcgacagattttttttctttgaggcttttcaggccacatagttctctgtcacatgatgtgtgtgttttgttttgctttgctttcttttcttaaatccctttaaaactgtaacaataatttttagctacaaaaacaagctgtgggctggatttggcccatggcccatagtttgccatttctgatctagtatgtcagttcctttgagctttagctgtcttctaacaggaatccatcacttgaagatcaagcttgtgaccgaatttaccgagtagggcagcagaaagatgttgtcatacacaggtaagtaatggtccccaggacccaggacccttctcaacttgtactttgtgaaagtctttctttcttaggtagtgttttcatagaatttaaagtatttggtgatgactttactgatgatgcccctgaggcataccttcaggcaaaccacagtcaggagaaaaacgagcaatttggggtaagcttgaagttggtcactgcaaaagaagagcaaatttgtgtatatggtgagggcagtccatgaaaggatgctcctatcttttatttttctttttaacttttattttgacataatttcagacatacagaaaacgtacaagaatagtaccaaaaagttcccatatattatggtgtgcatgtgggtagaaacatttttctggaccacttgagaacaagttgtagacctgatgctcctttgtccctaagtacttaagtgtacatttcttaaaattaagggaattctctt

SEQ ID NO: 55790 - DNA, 1046 bp, Homo sapiens
tcttattccttttagaaccttaaataaattccaaatgaggcatggctaggggagtggatgattaaaccaattgaacaaggtctgggtctttcgggggacagaaaggatagggagtcagtttaggttagggatctaattactttaaaaaaaaattattgtgtccttactctaataatgggccataaaatgggcttttgcatccttctgtataaacacttgaggatctacctctatttttttaatgtccaccaacctatccttttttatttcaatgattttacagttaaaatccaaaccaatttattttacagttaatgtgcaaactagttcgcctccttcaggtggtaagttctatcactacagcattcttagaactccggctaacatgagttgatttgctgtgatcaattctcagggtcctcctgactgcacaacagtcagacagcttgttcctcttgccaagattttcttagatattttcactcccatgaatctgcatgttgccaggaggtctaatttccatgataatggtaactgctggcctccacgctaatggttgatttttgtcctttcctctttgtcccatgtaggtgggtacctaggctgtggccatggacacaaaggccacccaggtcatccccactggtcatgctgtggaaaatttaatgagaaatctgaatgcacatggacaggtgggcagagcgcaccgaggagtctacttaggactgtggctctctgatgggtttgtgctcagccttttaaagctgcaggcagcaccacttgagatttccagaggacccagaccttcgttcattctaaagagactgatagaattaaaaacaaagtgccttatcttgcactggagttcaagtgctcttttgttagttattcactgattgtacttgtggatggttgagcacaaaaaaccacctctacatttctcttaaaggtaggttggcaacgttctttttctaccacaggatactccttttcattttgtacagtatggaggtatctattccattggcactgaagggtctaggtag

SEQ ID NO: 55791 - DNA, 1044 bp, Homo sapiens
ttcggacgctattgcccttcgcgccagccgtcgagtgggcagcagcgggactcagccgggcgccaggttcctgccaggcagcgccgggaagcgcgggcggccgagaactccttcctgctacttcgcccagcgccgctgcttcggcttcccagcgaagtgggagaccttcctccctgtttgcagacgtccgtgggagacccttattttttccaccgctaaggttaagagattctggaatagaagcgtcgaaggagatcaagtgaaccttctacaactcctcggatgtcgccagtctccctttcggggcggaagactacgtttgagcatctcactgaggtgcaggaatggaagaacccaccttgcagcttttctgcagtgtggcttgcctgatctacccctaggaatgaagaggaggcttgtaataatccgatgaagtacagatgttgaagaggatatcgcaggacctaaacttgtgatcgtttgggggaggtcacacacgtttctgagtgggaatggatgggcgtgaatgacgtgccctcttaaaaagcacaacagtcctttaagaggagcaaaattgagttttcccattttggccaagattttgaagacagttcaatgtattctacatttgacataagatgagaactttctaaagtattctctccaagagcgtaaacgatgactaccccagccctgctgcccctctctggacgtaggataccacctctgaacctggggccgccttccttcccacatcacagggctaccttgagactttctgagaagtttattcttctccttattcttagtgccttcatcactctgtgttttggggcattctttttccttccagactcttcaaaacacaaacgctttgatttgggtttagaagatgtgttaattccacatgtagatgccggtaaaggggctaaaaaccccggagtcttcctgatccatggacccgatgaacatagacacaggtttgtttatttcagaagttctggtactaacatttggcagagcaaggtacggtgattggatcga

SEQ ID NO: 55792 - DNA, 1054 bp, Homo sapiens
gtagagtccatagactggtaggactggagtcctacctaagtcgttcttctcttcggttttatataagaaaaacatttgcgttcagagttgtgtctaatgtggacatctgggaagggaggtatgaaaacttaacctaaagaaatggtgacataagctgtgcctgcatttattaataacgtgttggagtcagtcattgtgccaccatgtgaaatcaaagcatcgaaccttgacagctcttttgggtgtgctctcccagagggctctcgttttctggcttgtagttgaagcttagtagtgagtcagctttttaggatgacaaacgtgggcagaatatacctgtcatttcttaacgtgaaaatatcctgatttttgttctttttttggggatgtgtgttggtgctgtatatgaaatcagttaagttaaaaggtattgaatcctaagttattgcactttgtgaggcttgtagacaagatttatttttgtgaaacttaattttgctctctcttttaatgtaatagatggactgtgtcaagcaactattggaatttggttgattaaggggttcacattctttcagatcactaaatctaaagtgagctctggggagagcatagccaaactaggataaaatgggagctctagttacaatttttataatttttatatttgtactcaagagtttgggaaagtagttgacttttcttaaacctgccatcttttccttgtttcttaaaataattcttgagtatgtgggaaaaaaaatcatgtgcttgaattcatttcccatctgatgatagttttaactttttgtcaagcaccgaaaaagcttaggttcacgtgtaagcctacattaaatatttgggaaaatgcactgttttatgagaactggtttttctttttttctcaacctagttaattcattacttgtgtgatggttctttgacttttggatgaattttatggagtagttacttctaatattgtttcatgccattcttttgtaactaagttaatttggaatttttgccattttcgactactgtactcctgtat

SEQ ID NO: 55793 - DNA, 1003 bp, Homo sapiens
aatgttacgaagttgtactcagtgctttcagagcaaggaatgtgtgacctagtctatagagttgggggtggaggggcagtgggaataaggaagacttcattgagaaagtgtgcctcagaaacgtagaatgagtaggagattgcttaatgaagtggaattggaggttgaggggaggttgagggtcaaagcagaagacacaacatgtgtgagagccctaaggaaaaaaagcttggcatcactaagaatctgagaaatgttaagtatggctgttgcagagggtgtgggtctgggtgatgagactagatgagaggtcaggtttggcctgcttacaagttttttggcctccttattgttgttacaaaagtttgaattagttgtcagcattcacagatcaggagatttcatgttaaagtctggatttctgatctttcttgaaaaattagaggttatggcaacatccagtgtattttcagatggtaatattcaagccacaacccagtagcagctgctcccttgggagggggacgggggcgggcatgtgccactcagagtgcgaaataagtaaatacaaatcaatcaatatttaacctggttgttgttgagtttgcaaattctagtcaggattctagagagtttgtagttaaatattttggtttttatcataaatactaagagaagttattgaaggattgtaataaaagcaagggaatgacatgatcattttaaattaaaaaaattaaataatcactttggttgcaatgattacttactggatggtaagaagcaggaggataacaagttaagaggggctgggtcacagaggatatattggcttagatcgcagtggtgatagtggagaatgagataaattagtggagaaaagtggttgagtcaagaggtgttaaactattaagtttcacagaaaatggtggttggttaaatatggggccaaaatagaaagaaaagtgagtccaagataatgtctaggtttctgggtgacatg

SEQ ID NO: 55794 - DNA, 1032 bp, Homo sapiens
aatagctaataagtttcaccctccagtcagaactttgttagtctgaattgaatacttgagggtcaggtatatgtttacctttgatactttcctcaaaggcattggagttataaataaggctgcatcttagttctactaactagctgtgtggcattgtgctagacgtaatcactcaaacctgtgcgctgtccagtaccatagccactagttatatatgactattgcacttaaaatgtggctagtccaggctgcagtgtgctttagtgagtttctcaagttcttcatgttatgattcgtgttttttttttgcttgattcagttttgttacaagagtagagatttcaaatctcactattgcaattttaattttcttgtcatctttctttgtctcatccctcttctggaccttttttttctatcctgttttttatttggggctttctgctcctgtttgggcgacgtcacattgttttatgcactaatattaaagtctgctggatgttccatttcccttataaattgctcatggttatttttcccacttccctttactcagacatgaattattgtgaggtttgtttgtatttgacgtttgtcaacaacagactggtgtagatgcctttgctgcatttgttttttttttttttttttgggtacattctgtggtccaggctggagtgcagtggcacaattacagttcactatagtctcaaactcctatgctgaagtgatcctcctgtcttagccttctgagtagctgaaactatgggcatgagttgggactacaggtgtgaacaaccatgctaggttaagttttaatttttgtagagatagggtcttacttgttgcccaggctggtctcaaactcctgtgttcaagtaatccttttaccttggcctcccaaagtgttcggattacaggtgttagccactgcacccaaccgaatcttatttttatcgatatggatactttcaaattggagctcatgcctaagattggaaagttggtaatgcagaagctaagtatcttcta

SEQ ID NO: 55795 - DNA, 1033 bp, Homo sapiens
gtgtagttagctatgattgtgtccgtgcattccagcctgagagacagaggctctgcctctttaaaaaaaattaacttctggtttgggctgactccacatatttcttggataggaaaatcatattgctacttttattttccctagttgtgcaaattctgtcagaaaagtttattttcactgctattgaatttttgctagaactttattcctgttaaaacatggttgtaatgaagtctgcactggagttttattttcagattgggtattaggatttgtcattaaaaaaaaaatctccttcaaagggcattctttccaatgatctgtttttgaatttaatgtagtccagaaggaaggcatcattatatattagaaagaacattggactcagtgttaagagacaggggctttagtttcaccattgtccttggttgttgaagtatatttagatatgctattcaacttctctgtgcctcgatgttcttatttatgaaatgagggaattgattgaatctttaaagatttttttctagctcatgcatatgaaatacaagtaattttatgaagtagggaactgaagagtgtgcagtaatttagttcatacatctcaaatattacaaagataaaatgtattctaaaggaattagtgtcttttttgtatataaaaattagtttaaaatcactttggaaatgactaaaatttatttacataatattattatttacataatgaaatctataccgatttaaaatgtgaaaatgaacgaaatgacttttatacattcttgtttcttgttagttttaaagtatagtttattgagcatttgatatgccagcctgaatgtagtgggtatatttacaaaattgttttcaggtgtcatttcttgagcccagttatcaattacacgtcttcacctgttacctgagactttaggatagattctgtggaatacagtccttgactgaggcctcagaccctttgaaggctcttactactcctgtggcacaattttctttgatttaaggctataatttc

SEQ ID NO: 55796 - DNA, 1034 bp, Homo sapiens
tgtttaatgtatatatttatagtttttatatcttctaaattgacttccataagtattttagaatcaggttatgaagataccatccttatgctttcaagttttgctttagtgcttcctgttggtggtacctagtagggaaccagctgacaaaagaaagatgtaatttgcagagtctaagccccagcatcatgaagcatagacgacggaatttggaattatatagaagagtggatttggaattgaaaattttggtttacttactgatgctgtctggctgtctgaattttagcgtatgaactttgattaggtcttgataagcagtcagtggaacagcctatgagggacctcttccttgtagaattagaattgaatagccagcagctcacctcagacaaaatggatgcctgttgaaatgggccttttctcagtagatccctgcagaattttatgacttgtgcagtctgaggttttgccccaggtagatgagcaggagggcatctttccagtagtaacagagacaagctctcttcacctgtgctggaggatataccagttctcaaatcagacatgtgatagacttgccaagagaagaacctatataggtgagttccttgctaagttccaggtctcttcctagattcctgacagtgccttctatctgaatgtgtagtagtaattatggtctggttgactgccttcctgcattccaccctattctcatctacaccatattcagagtaacttggagtgttaatcatataggtaggatccttctctatttttcacggatgttgtgatggatcaaagttttatgttctgtattgtttgacttgccttagcaagaattgagggggtggggtgatgagttaaaggcatgtgcttaaattttattcccagaatacttttccatttgtattacaaataattacaggagaggaatcctggatacagacagtagacagcaactgtaacacatgcagaaaaggtatttattggaaggatgttagactgtaacacatgcagaaaaggtattt

SEQ ID NO: 55797 - DNA, 1043 bp, Homo sapiens
cctttttatacctgctctaaaagttactgttagatttaatatagctgttctcacttaaactttattgagttactttacacactgtaaaatttacccatgttaactgtacagttaggtgggagctatgcctcctgtacataggatgatgatttccaaatctgtgttttcagactttgacatctgaacctacgagctttgttgacttcttaaacttaacaggtctaaaatcatacacattcatctctttctcactccttccctttatcccaaatcaccctttctttctttgttcttggttcagttaatggcacccgtttctatccagtcagtattgtgaaaaatctattattgttaattaattccttttccttctcatgtttaatcacttgcctaaatttctagctttctaaggtctcttatattggtccttcttctctgtatctactttaaatacattttattaggcccttgtcattttttgcctgggaggactgctgtgacttcctgactccttttcctacttccagccttatatcccctccctttctactcccaccttgcctcaagtcaatcctgaggaggcattctttccaagatttaagtacaatcatgccattttcaagttgaagttctttagtgccttgcatttttccccaggctgcattgttagctcaattaatgattgagcttttgtcttctctagcttccttgctatagtatattgtgttacttcttctgtgtctttgtacactctgctatcttcgtctagaatgcccttattacttgatctgcatggcaaactcttattcttttaatttttatttgaagatcatgtatgtctttctctgtttccctatgtaaatctgctttcaagtcatatacttgtatggttaacaagtaactattcttttctatgtatatcttaccttttctatagctgtccgtggtatttattttctctttcacacattttgtgcttactttgtttatgtattcattagattgtgaactcctgtgggcaaatcatgtgccttatttttctc

SEQ ID NO: 55798 - DNA, 1022 bp, Homo sapiens
tgctaaaaagagtatgcagaaaaggaggactatgactaagtaagttcaagaagtgttgtgttaggcaactctattgcagaacttctcagggcttttaaaatgcccatgtgcgtggtgaagctctgtgaggggatatgggatgttttgtggcatatatgtcttgccccccacagggtggactctagaaaatggtgtgtaatacctgttcgtggaagctcactggtaggtgaagatgctttctgagtgataacatatgagctattgcaaacatggtcggggattccacatgccatttagcaataacttggggataatgtggtacgtggagatagaaatggaaagcttgttttcctggggcaatctccccatttgtcatcaggacagaaaattacccttgaaagagccagtcttccccatttgatgttgctcttctttggggcccatttccaggtcctctgtttttctgaatctgtgtgcctgcttgcacagtgagtgggtgagttggggaaattctcagctggaaatgtcagaatacccattgatagttactccatagaatctgaaatctggggacaattgagggccgtggtggtaactcatgatagcaagcactttccctctttctcttctgtcctgaaccatgttggccacttgacctcaggcttatagtctcttgattgcaagatggctctcttagctttaggcttcacaaatacatttgaagacaggaataggtggttgggtgggtttagacttagcaggtaaatgtccttttctcaactggctctgtccatttgttaatccgtaaaggaaaattcctggtagttcccttttttctctctggttgaaatagggttttatggctacccttagctgcaaggacagctgggaaagacttgattaacatagatggattatgatctgttctctggggttagtagtaccgtgtttttctgttggtaaaatgtggggctgggattggaagactcttgggtgtttctgccttggatatcttatataag

SEQ ID NO: 55799 - DNA, 1007 bp, Homo sapiens
actgttatctttgctcttagtctggaaattgtataaagagattataaacagagtttgatcttaggcatccagggttccttttctttctcattccagatctgaatgtgtctcactgataattctttccttttaatggcaaaagtagaaaacaagttcctgggtttaatggagaaacctttatgttttatatttaaaggttgacattcttaagtaggctcactgttacgttttatttccttcttttctcacagggaagaggaagaacgtctgagaaataaaattcgagctgatcatgagaaggccttggaagaagcaaaagaaaaattaagaaagtcaagagaggaaattcgagcagaaattcagacagagaaaaataaggtagtccaagaaatgaagataaaagagaacaagccactgccaccagtccctattcccaaccttgtaggaatacgtggtggagacccagaagataatgacataagagagaaaagggaaaaaattaaagaggtaataagctgagttttgtgatatggagtgtttatggatttgtatttggatacaaacaaatatatataatctatggtatcctgttttgatctgtttattcttgggtcatagttgtagtatagtttccaggttggtaataaggactagaactctttcttgtttttttttttaatgttaattataatgtaattattggacacttaaaatatttttgatacaacttttggatggttagtgccactcattctttgttcagagatcttttgaaattcagcgttttattaataatatatctgtatataacttattgtctaagcagtttcttaaatgttcagttacaaagggactctgctagatactatgcagatcacctcataaacatgcttctaaagagctagcattatatctccaattttttaaggaacatgtcatggtatccctcaactatactgtagattaagaacacattccttccaaaaagtctccatggattgaaaaat

SEQ ID NO: 55800 - DNA, 1078 bp, Homo sapiens
acaaaaaaaataaataaaataaattttaatttgaacacaaccatgtccatttacttagatattatctgggactgcttttatgctgtaacagcagagttagtttgttgatctctggtctaaggataggggattttctagctagggtgagttaattggtggtagaagcagagcctcttgattgacagctctgttatatgtgaggaaaggagagctgtccccaaaaagacttaacatttctcaaaaggaaagaatgccaaacaaatatgtacctcctgaagaaagaagacttttctattatgcccatttttttcctgtcatatagatgagattaaacatagttatgtatgttttcatactgatacaaatgctaattgaataatgtactaatatagatctggaagaatgggcaaggatatagtaatagaacccaaaattgtatgaaataaaaaaacagtttgtgaaaaatttaaattgatggattataatttttctcttttcagatgatgaaacatgcttgggataactataggacatatgggtggggacataatgaactcagacctattgcaaggaaaggacactcccctaacatatttggtaagtttactttttctaattactatttccattttctacctccatcttttaaaacaagatgtaacttttcaaagtactttctaaaatctgagtatttctgtggaactataatttgaagaaacaggtatgattttttgcaagtgtcagtcacgattaagttccagttgctttggagtacacatatatgtggtagattttctatttacatatggatgctttagtcatttatctgagtatttaaaagcttttttttggcatttttttctttagtgtcaggaaaagtaggcacctacttgtcatttttttcttcaacacaatacctattctgatattcacattacagaggaagaggggagggataggaaattcttgtagttctgtgtacattttttaaaaaagtgacatacctgggatgattgggttactgaattcagtgggttatgttgtacattcacagttcctaaggaaaaattaacaatgt

SEQ ID NO: 55801 - DNA, 1036 bp, Homo sapiens
tttattagagaaggtattctccctacagttgctcagagcaaattctgcttaattttaggatattctcaattctaaatttttgcatattaaaatgtttaaatatttcagaccagatatttttacaaatcccattcttttgctttcattcagaataccttccacaaatctgagatatttttacattgacttttatttgtaattattttaaataatcatccagtttagatgatacagaatcatagggcttctcaatttcattccattgaagtatacaatataaataaatctaattgaaaataggagctccatcaaaccattattcctacaaatgaagatacttcaacttaagcttacacattgagtgttttaatttcttcagttcattctttgcttttgtcggaatgcatttcaatatcagtgtgtttgcaagctttgtttctaataattgcagtttactgaaagctttactccattctttcaatacattgattaaatatattcgactgactttgaacaaaatgcaaaccaaaatatagaagactcattatcaaaacaatttaatatgattgtagaccacttagggtgatttactgtcaagagtttaccaaacatttttagaatctttccttttgctggtggtcaggtaagagaaacatacgttttgcttgcttgtttttgttttttggtattcattgcaaattttttgttactcaggttctctgagtatatacgtaaattttagtatccagaccttttattttgatcagttgagaaaaaaacataacatttgcatgaaatgatgatccggttattttttggcagctcatcatcattttatagttggaaattttgtcctcggcagcattatatcttgttcttagggattttcttatttttctgagttgctaggatatatgtaagtatcaaatttaatattttagattcttcctgtgacactatgtaaaaaatttaaaaaccttatttagaatttagtattttgaaaagtgttactttttgacttttggcgagatgttct

SEQ ID NO: 55802 - DNA, 1051 bp, Homo sapiens
agatatctattgtgggaacaatatttaaagttcaacagtttgttttacttcatttacttttttatctgttcaattcaaattaataacttttcaaaatacaatggcattttatgattcaattcctgtgaagttatttctgttcttatatttgaatatatatgtgttgactgtgtctagaatgatgtttaaaataactgatgtttcagatggtatttctaggtagtagcatgttgagatttaaaatggtttctatctgtgcagttttctctgtattatttttattattgcttgattttaaaataatgaacacatatcatcttataaaaatgagtcatttaagaaatagaaggcttccctgacttccccctgcccctccaacacacacacaaaggcagggaataggtgtagattctgagtaagaaaaaacacaaagcctacattaaaaccaagccttgatgacacttatttttattaattgcattcttaattttattttactcaggttatgcacattcggaaactacttcagaaaatggatcgtccaaatggtctttatccaaattatttgaaccccagaacagggcgctggggtcagtgtaagtattctagtatacctgaggctttcttaaaaaattatttgtctgaaaactctttgcttgatgttgtaaaaagtacactacgtggagttagaaaccctcagtgtctaaccttgtggtctgctggtgctgttcttaggcatgtttctgatctctcttagcttcagttttcccacttataaaatggaaatgttaataacatgtctcctaagagtattttatttcctgtattgctaaaatatagtgtggcagtttgaaggttgtacttaaaaactcttattaataaattatatcttcatgtaaataaaagcactgcttaggagagggaggtagaggaggagtatgaaaaacaaatgagtatttactagaaggggggcagttgttcttggataagccatgtctgttcattcattttagaagagggcatcctggccttcattatttaccagtctctg

SEQ ID NO: 55803 - DNA, 1007 bp, Homo sapiens
taatagagattgcaactttgccgctaataaaacatgattcagttatttttgagactaatgaaatcttaagtagtaaataagagacaaaagtaatgatcatttaattttagtattgaaaacactgctgattctgccagtaagaaaataagctggtgtgagtaccaagaataggaaaacatttgccctggaattgtctttttgttcctttctaggaaattgtcttttattttatgaaaggaaagcagataggtcaatataattatgtctttcatggatctgggaatagatctcaatcttctttgactctttttatacttacttttcctgtttcctgaaattatttacatatgactcatttttctctttattttgaagaagataaaagctctaatgcctagactgagtgggaatgatattttctggaaaaacaaaaccctgagagctgcatttctaaaatgtaaaaacgtagttttcttatttcagataagagtgactggattggatgtctacttagtaatttggatgaattctatcaatcataaatctttacccctgtgagttgtattgagatttgagaatattatgataatataatgatataataatgtatatgaaaaattatgttcagttcctgtcttagactatatgccagtgtatattctatatggtattactatttaaatgtaaaagatgaaatcataaaagtactaaaaaaagggttgaatatataatcaggaaagccttttctaagcatgtcatgtaaaacagaaactacaaaaaaaagatgtcagttttcctgtatattattgttaacctctgtattagtctgttctcatgctgctataaagaactgcctgagactgggtaatttataaaggatagaggtttaattgactcacagttccacagggctggggaagcctcagaaaacttacaatcatggcagaaggggaagcaaacacatccttcttcacatggtggcaggaaggagaagtgccaagcaaggc

SEQ ID NO: 55804 - DNA, 1618 bp, Homo sapiens
tagagcagtaggggacttaagacaaataacaaatatcttcttcaggaaataggaaagaacattaatgaaggagttataaaaaagttgacaggcagtgttgaggctcatgttgatggtgaaaacggtaaatttggaggtaatagtaaaacagactgacagctgggctgacccacagttgatgtttaactgtctgggtacaacaggagaacagtggagtaagggtcttgaatggttggacaagtgggattacctgttgcttcctttcgtattcaacctgactgcaaaggatccaaacttatttgagaatatatatatgtatacttttctctttctattttatctaacaaatcccaaaactcgtatcaacccagccacctacttttcccatttacatacagagtcaactaagcattgctggtgaaaataacagtacagattaaagttactataaacgtacaatttccagttttatgtggatcaccagtattccatgagttttttttttttactttgatcaatttactttcctattctttactctccttaagttttctatgtaacccctctatccatctccagctcttattttgaccatttctttattttcaagttcctaggcaattttagtttagatatatctttagtaaaaatagtatttatatagatttaaaaaatttcagtttgagagtctcagtgttttaaaaactgagtcaaaacaactaaattggtggaggttactgatagatttggactaattccaaatattctttggttttgtttatttttgaaaaactgctttattaagatacaatttacatataataaactgtacatatttaaaatgtacaacttggtgttttaaaataggtgtacacctatggaaatcatgatcacaatcaaaatagtgaacatatctatcaccccttttcctcatacccttacatgttccttctctcaacctcctcccttccccctcccccaaaacaactactgatctgctttctgtcattaaagcttgggttgccttttctagaatcttagataaatggcatcctttatttgtactctttatgtggcttctttcagcataattattttgagattgatctatgttgtgtatatcagtagttctgagtggaattccactgtatggaataccatagtttgtttatccattctcctgttgatggacatttaggttgtttctggtttggggctattacaaataaagctgctatgaacactgacttacacaccttcatatgttctcacttctctcggggaatacttaggaataggctgcttttatcaaatagtagatgtgtatgtttaacttttttaaggaactaccaagttgttttccagagtacatataccattttacattgctatcagtagtgtttctccatatacctgccaacacttgatatgatcagtcttttagttttagccattttattacattgtatttttttttcctttttttaaaaattatacttgaagttgtgaggtacatgccagaacgtggtttgttatgtaggtatacacgtgccatggtggtttgctgcacccatcaactcgtcatctacgttaggtatttctcctaatggtattcctc

SEQ ID NO: 55805 - DNA, 1054 bp, Homo sapiens
ttcaattttatattaggatccatgagaataaggattgttattttgcagattttgaccaaaaatcaaataatagacctaaaataattgaatttcatatagcatacattctaaaatatggtatatcatagttactataattaaatatttactccatgaaacagggaacagccattatatgccaagtattatgctagatgcttataggttaaagtatgaacaagatacattccctgcctttcagaaattcatagtgtaccagagtttgaaaggatttccttatatttctgattttaatgtttcataatgacattgctgatgctgattcttgttctgattgtcattttcacattgcaagttgatgaacccatgaccctctttgttatggtaaaccaaaaaatgattatttgatttgtgtcctgtattttcaagtcttctgttgtttttacttgtctttaatctcaatttagatcctttaattaaaaagtacaatcctagttttgctaactttccagcaggttattatatcctctgctgtgttttcttatagctgtgctataatttttggccaccatattttaaaatatccattcatttttccttagtagttattccagctaaatatatactgtaattatctacaactaaatcaattcataatctaagctctaaaatgtttccttatatgtgtgtattatggcaaaatgtctttaaaattaccttgcctttaaaaaaaacatccacacagtgtcattatctatatacttttattttagaccacaatggactgtatgatgtgcaaatgtctagtttgcatttgtttccaaaagattactagactctttttggtagaattagatttagcagtatgttgatacacattattctgagaaacattttatgttagaataacaggaatgtttataagtctattttaagaaaaccaaatgtggatcttttaaaatgactcattttgcactgagtgcaaacagcaacaataaaaataaacaacaaaaattacttcatattctgttctttcagggaagaaagaagtcct

SEQ ID NO: 55806 - DNA, 1029 bp, Homo sapiens
tagcatgttgtgggttattgtttgtccttggaagtgataaaattgcattaaaaattgttaattgaaactgacctccatcttgatttgttagaactaatggacctttattttgccagacagacccctcatttagaaaaaatagcctaaatttgatttctaagttaggaaaatataagatgtcttaaaaagattaaagagttttggagacagagaagttctataggaaacatcctgtttctcgtatgagttaatttttccagtatgagaatatttccttttgataatatattattcttaagccatcaaattttcatacaaatctttatgagcttttgactattgtccttcaaagttttgttgtccttcaaaacttgaaattctacggaattgcttattttgtctgatctctttcataggccattgaaaagtattgccgagttaatggtgggttttctggagtcaaagatgtatattcctctactcctacacatgatgatgtacagcagagcttttttcttgctgaaacattaaagtaagtatatagctttaaaaaatatttttatactagactggttttgctgtgtgatcactagatgatgaattacaactatgtgacaggttacactaaattttgttgtaaatatctttttatgtaattgggtgtgtaaatttttagctacatctcaaaaagaatgacttagactataaggtaggtattttatcaaaaaagtacttagtacctgttaaaattttttgttctttgctctttaatgtgcattaaaatcacctggaaggcttcgtaatacacaggtaactaggtccacactcacgaagtttcagtagatctggagtttagcttaaaaatttgcatttctaacaagctcccatgtgttactgataatgctggtcctggactcatacctgagctccctactgtagctaatgaaatctgttaggaatgatcatgcagttttgatagtactaaatgaccatagccactcatccacccgatgagccttactgtaaaga

SEQ ID NO: 55807 - DNA, 1075 bp, Homo sapiens
catttttgggagttgagggagcatattactttgacaaatgagacagaattttttatgttgctaaattataaaatgacttaaattggataactctataaaaatattgaactattaagtgaaccatatgaaattacccttttaaaaagggtaatttgaatattggcaatttagtatagttcaacctaatacataatggtaatggtaaatattttgaaaatatttattttgtttgaaacagtgatcttagggaagatacaaaaacactcaatctgatttactctttataaaaactgatggcataatattaaaatacaattgaataaagtcatttctgtgaagatctaaattaatgtagctgtagttttattgtaaaaatagagcttaaaactttatagaggaatgaagataagtatggtctcttaaatatttctcaaatatcagttaatttaaataggctttgtcagaagctgtcagtttaagattatgtattctcccaattggtgggaatttactgcggattcattaaaaggcaacaatcaatgtgttttagctaccagagatggaaactgattgtcacggcagtggcaaagttaaatgaaaaaacctgtattcttgacgtaagttgaggctcattttaccttttacatgtgtcataggtgctataccatggagtagttattgctataggcatacttttttccccagaagaggccatgtctcctactttttttgtttccctcaatagaccttacttcatggattaatatttatctagcatatatactgatggcataacaaaaactatgtaatgaggaaggtcagagatagattccttcaaaggttctaaaactcttatactctagtacaggaaataaaacacaagcaatatatacaacaaattttaaatacattaagtgcataagagaaatattaacaaaatgcagaagtcttttagagaagaaagagtttgcttaacctgaaaaacaagggaatacttcctggaagtagtagcatttgaaccagacttgaaggcaaggtgggtaaaataggatgaactggtattcagggtaatagc

SEQ ID NO: 55808 - DNA, 4905 bp, Homo sapiens
aaccaatattcctcctgaacatagatagaactaaacaagattttgacaaatcaactctaacaacaaattacatagataatatgttatgactaaatgggtttatcccaggtgtggagggttgatttaatgtttgaaaatcaatgaactaaaatagaccacctcagtagacagaaaaattatttggcaaaatccaacacccatttctgataaaaactctcagcaaactgggaatagaaggaaacttcttaccctgataagggcatatatgaaaaacctacagctaacatcatattgaaaaactgaatgtgttgctcttaagattaggaacaagacaaaggtgtctgctctcttcaccacacctggccggatttttttttaaactgttttatttcagtaggtctagttgttcatcttactggatttcttatacactattctgaaacctcttgtctttgtgtttagatcatttgggtgtctgaggtttatttctttgatgtttttcatcaaagctgctcaaaatacgttattggttttctgtgccattaaaagtgagctcacttcatgttcttgttgaattctaactgaagctcatttctcccctttttattttcagatatttgtatctgctgttctccggtgatgaccttttacctttagaccactgggtgtttaatacagaggctcaccctctgcctgtgttacatttagccaacaccacactttcaggtaatcctgctgttcgatgaaagcagttccagaaggaccattctcacctgtgttttgtttacatggaccactacagaaattagtttgaaggggcggcttttgaaaacctggacctctatgtcaacatgacagggtgaaactattccccctaagactgttcaacttgtagatacatcaactttgaaattattccattttatacctgaccaaaacatgttctgatatgtgtaggacagagacctggatgtgctttgatcgttaatgaggtggtcacatgagaaatgatacctgttactactgtattgtttttagagtcctgaagtctggaggctagacttcctgaaagcaagtcaagaatatagagcaccttgcaggagttcaagatggcctttggaaccaattatgtatttgtttcctcctacagtggagcagcattcaaatcaaatatttacatattgcttatcactttttctccattttaataatggaatgaactaaaataaacaagaacaaaagaatagtataattatatcagtaacaagaagactcaaaaaagaaacaggagtacctatccctatctgaattttcaagttccccattggatgaccagactggcaaccatttcaaatcccagtctatttcattgaaatttcttggttaagtttaattttctctgggggcatgatctcacaaagaatactcaagtctttttcttcttatggaatcatcgaaactgctatttatcataatcaccacttatgagcctgggtttgggattttgtgcatgtagttcagtctagtgttggtagcatgacagaaagtggggaaaatgccgcagtttgttgccttgaaacctaagagcaatccttggttttgttgctacattatttttccagaccaacacatctaccaagtaaattttattcactttaatttcataataaagttagtagagtcactcaacttacaactttatttatgtggcttggcaaaaatcactataaggcagctctaaatttgccttgataagctaaataaattacttttataacttactaaagcagaacaaacagtgaaactttctaaaatattctatctggaatagggacaggggatcttttatttataatctcatcagatgagtgagttgttcacagatattttatgtttttttaattttctccaagaatatttatagaattccaaagaatcagaatagtttcaaaataattttcagtgataaaagagtgttgtaattaatcatattacactaaaattgggatacatctaaggaactttatcttactatcagtaggttttgcattgatatttctttttaaataaactactagttctttatattttgacaaaaagaacttaaattttatcaggaactgtaagataaatatctagtgcttataaattttctgtccttaaatttatgtgacagtgcaagatacttttgctcttttcatttaatataggcatcttccattgacattaataaaacttagaaacagtataattagtataacatttactctgaatttgaagatttcctgaaacaaagtttgtacaagaagcccaccttggaattctgaaggcttattttcttgtttgataagcttttcttttaaacttaggttttaagttggggaaagacttaattaactaatatagtattttctaaggttgatcatcttataccacgaatcgttaattttgacagttctactgatccgtaaatgataaccactgcaaattttttcagtataaaatttttcactgcaaaaaaatttcagtagaaaataaggatgcagggccagttacaatagtccttaagagagttaaattatagcacatgttttgacattgtaatatcttttactacttgaacatttaaatttctaaatgagaaaggtatatatattactgtaactgtagaagggaaaagggaaagtatttggttctaaaaaatgttagccttcctcgtaaaagtagcacaagcccacttatgaatcactgagaaaaagtgaaaaacttgagttggcaaagatgcagagcagcagtgcagatggcaatgaactctctgaattctcttttaccttatttagaagaatgcagagtaaagggaccttcttggttctgcaggaacttctcaagggatgaggagacagaacccctacttccaagtgctctatttgtattacccagatgactgaagcttaagagaaggcagggaagtatacaagcagagccagttctggtacaaacaaagaatttgacagggacaatggaagggtcttcttcaccactccttaccttctatgtgatggaaagactagagcttataaaagtacttccatttttttattctcctgaataccaaaggcaattaaagtcagctacaaatgacttgccagtgtcatgttttatttttgttatagatttttaaattatttccttcaagatcaattcttatcccatataatgcttagcttccaagaatattctttactttcttctgtcttttacagctctttgcattttgtagaccttaatactcaggttaaatattcattgcatttataagatcttctgcaaaaagcccagaaatggtccttttcaggtgcctcttcaaagagctgacaccttaccttgtgcctttggcacaaatgtgcagaatagatacatcagttggtgcataatcgaaaaaaataggaattttgaacactgttcttccttctacatttatttctcttcattttagaatcacactttttatgttaaaccagattattattattattattattcaaccagtattaagttgttaaaaccaagggaatggggccctaaccaaaaagaagtctcaactcagaaaaataagtccccagtcaggtggttcttactttcttgtgggttgcacattttgtatctctctaacatcagcgtattcctgactttaagcaggtgtttatatgtaaaataaaacctgggtatcgaagggaaatgcattctttttatggagtattgaccctgatcctctatgatgtcatatagagcaactcagggctatacttgctagattttaaccaagcagtttgaaatattaatcatcatcctctcatcttctccactctccattgccaaagtctttgtcaaaactccaaatttgttgataaaagattgtgtttgccattctcatttataatgcagtttctccttaagcctggagttttttgaatgagtgcatgagtaaatgagagaatgtgtgaacgaacatttatgaagtatctaacatgtgccaagcattgtgcctggcactttcaatcattagaatgttttatgtgattccacagcattttctgtatgagagtagctcacaacattttaaatgtttccaatatgaatcgtgttacaaaattcttaattttatatttcatataaattaaagaggaaaaagaaaaggtttataatatattttaaaacaatgtgttactgtataatacaactataattgtagttaataactaaaacctcttgaaaatgtcaaagaaatacttgatttctgatgcaactttgactaaaatatttactttagaaataaaaacgttcttattttgctatatcactttaattgcataattaaaaagcagtgttttatagaaatgctggttattttatattcaaaaagattttgtcacataattcatgggtaaaacttgcagttgtaaattgtgtctgctctggtatgggccctattaatagtcccatgctgttaaatataaagaaaaatatactaaaatattcaaagttccaaataacagttcctagtaatagtattttgagttatttttctttaggtttccttatactcaaattggctaggtcctatcttttcctctctctctctctctctctctctctctctctctctctctatatatatatatatatatatatatatatgagagatatatgagatatatgagagatcaagatctatatatgtatataaatacaattatacacagataatttttaatactctttgttaacaaacacagttgaaaactggtttcggctgcacaaataagcagaatatttgagtaactatatatgatatggagatattttaatccatttatcctggctcaagaacactgataaagatga

SEQ ID NO: 55809 - DNA, 1034 bp, Homo sapiens
caggaaaactttatttacaaaagcagatggagggctggatttggtccatgggtcatagttagtgaccctgatcccaagtttattttgtgttagaccctctaacctttgatctgcgtcttttctgttttgatttacataattcatttttaaatcaaaaagatgtgcgtatatatggttgtgtgtatctgtataacctaaagctataatattttgttgtcttgaaagcagatacactcttcctggagtctgttcaggtttcaggacgattgactataatgaaagagacagaatagggtaagggaagatgggtatgctatcagccattttctttgccttgtcatttaatgccataatttcagattctctatgtaaaaagaaggtctgtgtattgtcaaaataatatactctccaagttctcctgctcattgacccttgaaccaggattctggattgctagagctgcagaaattcacccacttgggtactcttagagctctacagcaagaatatgatagaatgtctgatctttgtgctgcagaaagcaaacttttgaagaattctaagcaacagaaaatgggttatgtgactcatctgctatttggcagccactattccttttttagactgcagaacggtactgcccctgttacctctagaatagcctgagtctgaggagtgcagagaaaagatatatccaaaaggagaatccctttctcttgcataactctcaatcctttacaagtaagtagcattatttcagaatgtctatatgcatcattttcaactaaagcatacctcatccttaaacttccactatttaacagctaatccatttcaaacttggtttgagcctagcaattgcagaactcataaaattgcttgtgaaattacacaccatattactagcatatacattgcagtgctccaatcatgctaacagataatagatttttctttaagaattttatcaaatatttcactatttggggaaattttagaggaggggaagcctgtattcaggatgatagagggag

SEQ ID NO: 55810 - DNA, 1015 bp, Homo sapiens
tcactgcaagctccacttcctgggttcacgccattctcctgcctcagcctcccgagtagctgggactacaggcgcctgccactacgctcggctaattttttgtatttttttagtagagatgctgtttcaccatgttagccaggatggtctcggtctcctgacctcgtgatccacccgccttggcctcccaaagtgctgggattacaggcgtgagccaccacacccggcctggataatttttatcttttttgttttttgtagagatggagtctccctatgctgcccaggctggtctcacactcctgggctcaaattatgctcccaaagtgctgggattacagatgctagccactgcactcagcctgaaaatgcccacttttatactgagcatttggcaactcccaaactctgctcaacataatttaatctttagagatgaaaaaattactttttaatcttccaaagctttgctgtccttattatggataaccattatcattatttctgagaattcctaaatgggcatttctaatagttagaattcagggtaaaccagcttctacttcattgagcttaaagctctggaaagcatctaagaattatatctgtcccacacaaaaccagctggggaagctgggtagagagaagttcagagctgtgggttccagtcttggctctctgtaacttgctctatgtcttgggtaagctgcttctcctctctgagtttggggttcccattcgcacagcaagggtgttatccctaggtcccaaggcccttctggccttagtctgtatctcttgaggggtaggggattggccttcatggttccatggaatgacacttggtctttgttctagtttaacgggttagagggcagttagaactgcccttgctgccagtgatccagttcgaaatacgtttttatttgctttgcacagaacaaattccccagggcagccatccaagcagagcggggttggtggtaatggagaaagcctgagatgaggacatagt

SEQ ID NO: 55811 - DNA, 1081 bp, Homo sapiens
atttcaagttgtgtgtgtagcacttaatgctgacaccttggaaaaaaatcaaggcttttatgccctgcttccatctgaagatgtctgtgtcctgaccttgttaatatttccatttgcaaccacgtcagagtatacctttcaacacttgaacttgtgtggcatccctgctgtaatatctaggccagtgttttgattctgtttgctgttttgcggccacagcattagttcttccagcgttatctctccacccacacttgcccaagcatcctattttcaaaggtgggaaagagctttctgtttggagttgtcgttggtgggtgtctatggatggagcccagtgataaccattcagactgtgtgttggcttctcacttcttagtgggaagtgagaattcatggaggccccttaaacagcggagatcacagcctggttctgtggcctgcctgggtttcagtccagggctgctttccacagctcatgtgggaatctaaccacattttttgactctagtaaacatcattggtaaatggctggaggatgataataaccttaagaaaatagaatgagacgctggctgaatgcaatggagctgagagtgagaaaagaccaactgtggggtttgttgcgtcactgacttagaaatgttttctctgggcacagctttgtggcctggggcagttacttctttgaactcaggtagaatgtgttgcgggcatttaagtgggcaactgtaaaaataacatcttggaaaaatagtgagcataggatatattttattggccttttaaaaagtaaagcattattttatctgtttttattgcttcaggccattcataatctaagctgctattccatgtacatgaaacactcgagtgtctgttatctgtaactttcatgtgtttggggctgtggaggagtctccagaatgtggccccctccctatgtggggggtctggccctagggaggagctggcagacaaaagccttccttagactgcctccaaacccttcctagataacttctggccttcatcccccaaggaattcaaggagtaagagaggaggatttttttcagaagg

SEQ ID NO: 55812 - DNA, 1021 bp, Homo sapiens
accaatctgcgttgagcagctctgtcctgggcagtgggaaatgattagatcagacatcaaactttttctcagggaccttggtttaaccttctggcctagtttgttttttcctttcttttgctgctatctctgcaaacctctttttttttttttcccttcagtgtgtgtattctacctttactgcagtcagataatagaagaaaagggagtacgaaagtacctgagatagttggtcatcttgaattgtcaaaaacaaaccctgaattctcaaatctgcaggaacaaattatggtttccacctttccccatttctactgtataaatataatgaatctgtttctcaaacagtaaaagggaaatgaaacactttaatttgaatttactaggcttcaaattaatttgttctctattttgttaattctgctaactagaatttgcctttaaccagggcctttcatgaattgggaatgtgtgttccacgtgattcttttatatggggattatatcagtgttgatttaacgtggttaattaaaactaaaaactgttggactaagcactgatgtgttacctaaacactgagggcctatgacttggatgtattctagtaataccaatgtttgtctaagtaactttaaaatgtacttttggtatttgaaattgtttggacgagtgagggacaatgaagaatccctttctaataggcacaagtgacttattttatgctcttccaatgagctaagcacttagtatgaactcagcttaaatttgtgtcttcagtggcttaaactcctctctatgtaaatcatggtaaattgagaaagtgaaaaactacgccatggacttggcatttgtcatgtcccacactgtgcttttatacagactttttcccctagaatttaactccaatattcatatatgtatgagaagaagttgtcatggaagatgctaaccacaggcatattgtatttctgaaaaaagtgtttgttaaagtttttgcagctgtagccagcaaccaactta

SEQ ID NO: 55813 - DNA, 1044 bp, Homo sapiens
tttttttttttttcagtagagacagggtttcaccatgttggccagactggtctcaaactcctgacctcaagtgatcttcctgcctcggcctcccaaagtgttgggcttaccagtatgagccaccgtgcccatcctgtatttcctttttcaaaggaatacatctgcagtattttgagagtaattagcagagggttttttgagtatttttggtaggaaaaatagatgtagttttttaatcaaatttctgaaattgaaaatatcacttctttttaaagagggataagtatagtcactctagtagaaaaacatggcttgcctatttcctcttcttttctgtttgcttggatattgtttaatgaattcaaactgtaggtttagtcttgtctttataacagttaatggagaagtgataaaattaagtattcagcataaactaaagatcactctttgtatttccccgatacattgacagtatgtatgtatatagagtttaaattgcttaatatatgcacagaaatgattagaatttgaagtactatatagaggagagttacatggttctagtggcagtggattgattgtattaaggaccaaaagaactgcaggataatataaaaacaccttgaaaactggagttagttaggtttctttttctttttcttttttttttttaaagggccttactgtactttttttttttttttggtcacccaggctggagtgcaatggcacgatctcggctcactgtaatctctgtctcctgggttcaagagattctcctgtctcagcctccccagtaagtgagattatagacatgcaccaccatgcccggctaatttttgtatttttagtagagacggggtttcaccatgttggccaggctgctctcgaattcctgacctcaggtgatctgcccaccttggcttctcaaagtgccagattacaggcataagccactgtgcctggccaggtttctgattatagttttcttaagttgtaatcatcataattaacgtgcgctagagtgttttaactgtgctggca

SEQ ID NO: 55814 - DNA, 1015 bp, Homo sapiens
aagatttaaagggatgactttaaaagcgcctataaattgtctggcacataaaatattcaataagtggtattattcttaaaaaatattatgatcctattgcctttgtctgtcttatactctgagtgatactagttgaactacctaatggctgagggcctgcttagtgccagacatgtgctagacattttatatcactacctcaatgactgtaaatccctttttttcacatttccagttaaattggttctgttacttaaatgttcttctccttttttctttccacaggaaaacgggccttactatacatcatatcccccatcaccagatttgtgacctgccatctttcagtgcttcttggttcccaggatgccacttcctccacgaatagctacctgttgaagtgatattcattgttgctgtacagatccagagagccttttgtccccacctctctggtatttttttattgactgtatattttctggcacataagcaatctaaaaatggtaggccattctgaactgcacacattttaaatttgtatatttatatgaaatggaaatgttcatttttagattgttaatagaaattggggagcaacttttgagtatctttagtttcctgaaggacaccgaattctccattagataaaccaccaagactgttcacatcatctctctaacattgcacgcttcctttgtgtacttaagtgattctcgaaatatacagaaccaatgtatgctaaccagatgcattgtttgcttcagatccatggtgttaataccatgtatattttataaagataatttggctgtgttaaaagagaattacctgagtccaagaatgtggaaatgtatctgacaaaaaacatcaaaatcattagcaaaacataggacttagaatgttaatgtacaagttaagactaaagtttaaggactaaggttccttggattatatgacttgttaagattgccacagttccgatctcaacagtgtggggtgaaacaagaagact

SEQ ID NO: 55815 - DNA, 1172 bp, Homo sapiens
agaagtaccagaagttctccctcacctggtatggtatattaactgttctatagagcagcacttacgagcacaacatcctgtcattaccagatattaatgtaaattagtgagtcttaataaacttggtaatatcatttaacatactttccctatgataactttaggaaaaggatttgtcccaagagaggcattttctccagataaacgtttcagtgggagatctctctgctgtgagttcagaaccaattttcgtttgtattgtaagttttctaccatatttaaaacagatacctctgcctaattttcttaagattgaatggctttccatctacacagagccagaagaatttattggtgatcacttttagaattaattgcaaatcatgtggcctatctcagtagtctttaccctgctaaaagtttcatttatctaaaaggttgtataatgtttttaagagcatcatctgataatattattgttgttatttatagatgcgtttatggatctgttacataagcactagtcacaggactactcgtgaatttcatcaatttattctattgtgtttattcatgatatcaccttagtaatttttgaaaaaaaaaaagtaacacacttggccaaaagctcatcaagctgattgtttaactgttgctgattgcttatctttatattgtatgaaccaggggatagatttgaaagttatattaagtttgaaatgaattattcttccctaattattgtgcagtgtttatacagcaaaataaaaattctgcaacacaatttctctctaacatttctctaactttagctataatttttttccccttatgtgcagagtaaagtgtataatgtgatctaatggctaataaaatttcatatttggctgttatacagagaggatttgtaactggagcagctggatcatagatacaaaaattgttgaatataggaaagagaaaagagtacattagtttgtatttactgcagattgctggagtagaaaatgatcttagtgtttttcctttgaactctacatcactcatcttaatgcttaaaaaaatggatagcagaaaatgtgaaaggcactaagcaacatttttacactcaaaattttgaagacaattcatagctagtatctggatttatcatttattttctgggatagaaa

SEQ ID NO: 55816 - DNA, 1038 bp, Homo sapiens
acaaggattcagatctcattcatgaaagctttaccctcatgagcttatctaattctaattacccccaaagaccctacctcctaataccatcacattagggggtagggtttaacatatgaattttgagggaaccgaagcattcagttcataacagtgggcaacggttattgcctggtgggtcttgaagcatatgacagaatgggactcctgcctgttattttattggggaacttccccagttatctgtaggtcctttaggtttgggcctctcaatttcttggaaaggaatcctccaggagtgtaagcctagatgtctgttttgaaagccatttaggggcagagggctagacctttcactgttaagtataacactttaactaaatcccctcttttcagctgtgcctggggttctggaatccagaaactctctagttgagcatctccagagaataaacttcttccctgctgctctggtggtaaaaaaaaaaaaaaaatcatcaccttactgtgctggctgggggaggggttgttgcagatttgactgtttttatacaaacttttaactggacctcctctttttagcaccacatcccacttgacagcatagcctttacaagtacttagggctccaatttctgagcctttttagcattctctagtaataataacaataatttcttatgcatgtatgcactttgcatatagtaactcgtttaatcctgtgaagtaagtactactagtatccctcttaaataggaaattgggttgtaacaaggctaagcccctgcccagagtgtcttgacaggaactcaggatttgaatcaaagcagtctgtcttgtatccaacactgcttttcagtacagatcaacttgcttcgtattagttatctcatttctgcaagcaattaggtttgtctgctctgttgagtcagttactagtcagttgacattctaccttccaaaattttgatgatgcttatctgcttcatggtctttctcattctctttatctgtctctgtgcttatacctattgtatt

SEQ ID NO: 55817 - DNA, 1054 bp, Homo sapiens
ctagactgttctctgtgcctgctgcacagttactgttctggaacttttttttttaacatcatcctgggaaatccttttttctgtttggtggattggatctctcatttttgtgagtaaatctaccaggagattttaaagaagaatgcaatagggtaaaactactgagattttacttccaccttcgtacttaattggtaatttgcttagaaatagaattctagtttggaaatcattttctagaaatttgaaggcactactcctttgttttctactttgattagtgctgttgagaagtcttgtgctattcttatccctgattgtttgtatgttactggtttctttctggaaagcttctgatctcatctttgtttcttagtgctcttaaattttacagggatttgccttcatatggtttgggtgttttatgggctctttgaatctagaaactgatgtctttccatcctgggaaatttttttgttttatttcattaataatttccttccttctgtattctctgttctctctgaagaaatcctattagatgttgtattttcttgtttaattcttcagttttctcatctgttatctcttattttcaatttatttttgttttattttctggattccttcaagtttagttttaacccttctattgaacttttcatttctgctgtcatatttttcacttggctatagcagttacataagtgccatttcctgttctctgaatagtttgtttttatgacattctgattttaagttttttttcccctgtgttgtctatttcttgagcatgtgtttagtctccccttttagtttttgttagaggcttttctcactttctggtgatccttaagtgttagctggatttaagatggaagaactgaaaagttcatgggaaactttgtacacatgggtgtctaagtcatttcaggctgctataacaaagtatcctaggctgaatggcttaggaagaacagaaatttctggagactgaaatccaagatcagggtgccagcatagtcaagttctgctaagggctgtcttcctggc

SEQ ID NO: 55818 - DNA, 1927 bp, Homo sapiens
gaatgttcttgttatactgtatttattgttgacatatttgactacttcagttagtcttccaatctgaaaatcttttttaaaaaatgtctttctgatggcataaaatgattcttaagtatggtgttggatggtggcataaaatgattcttaagtatggtatgcacacatatcctcatgtactctgaactgttaaatattgaaatacaaagtcataaagaatggtaaacccggtaattaatggcggtcaagtgcatgcaccagctctctttgtactgttgttatccaggctggtctgatcaatgtaagcattttgaaagacaggtaaacaggttaaaagttaccatttttctctcttaaatgatatcattttctttctatccagaaaaaaagttttttttgagatggtgatccaaggtattatgcccaattttgcccagttttgaacaataaaatctgatctctctagccaatccaattattcatattaagcagtatttaaaggacttcttaaactaaaagatgacaggatttgaggaaaaaaaaaacaagttacagtgtaatgagagctgtttacactgcaccatttgaattataaaagatacatagtgggttatctttgtctttaggtcctcttcactaaagtactgaagatcatatggatatggaaatagatttgattcattatggaatcttctgtttgtcccatgtagactttttgatccttggaaattaatgtcttgcttcaagagcctttttttttttaactagggcttagtgtttgtttatgaacttattaaaagtacagagctgatcaactgattttcagtggacagtcttgctctcctttaatgttagcaaaaattctggctgtggctatagattactgggtgtaggagccttctcctcctccctttgtcacttaagcaatctgtttgcattctatcactgagattctaattcaaatttatttacaaatctacttgtatgagctcatatacaaatattctggggagtgaaaggatctgtatctttcatgtgattctcaaaggggcctgtgaccttgagaatgttaaaaaccactgttctctcagggatcaggtttttctgcctagcttgggtttgtggctccatttactgtatgtattactaaggtgtatatgtgtttaggggaaggagagattcaaacctctttttggtgagaaacatcaattctgtttagagatggagttgaaaaagaattcaacctctgttaaatactgtgacacttcataaaatgccattaaattttgtcctacaataagagctatgagcattacttttacttatttaacatccaatatcttgtgggtcacaattacttaaaagctaggaaaaggatccaacaaactctactgaccaggtatgatcagggatataggagaaccaccagggtataatgtcaaagaagataatagagttttgaggaggaaatgatcagtaataaatgtggataaaattggattaattcttggatttgacatttgggaagttattgttgaatagagtagttttcgtatagctgtagagcggaagcaaaactgcagtaggttgggcaaatgtacgaagaggaagtagagctacaaaacaaattactcttaaaaagtcaagtggtaaaaaggagtttagtattctgaagaagaaatgaagtagaagaaataaaggaggaaaacctttttgagaacaggaggattgagaggaaggaaaaagccaagatgtaattgtaaaaggagaatttatgttgtaacactctcttaagaggagaaatggtcaaatgaaggaaattgattaaattaaagtgatttggtgggcttaaacgtgtggaatataccctcaaatcgtcacttggaagttggaaacagtgaatgattttgagttggagggaagttaa

SEQ ID NO: 55819 - DNA, 2033 bp, Homo sapiens
taagcaccttggatttagaatcagatgtaattattcagtacttcacatcatattagaaggaattctatcacaccaataacctgcaacacttaaaaaagcttttcttccttatatgctcattatccttatttatttgagctcaggttagctttaggcttacagcttctggtaatactaatgttttagtttgtggcactcttaatcagatattcttggacctttgggtgtccatggatggccttcagaatatctgtgaacctttcccctcaaatatatatgtagaattttatgtttataaatatgtatattctgaaaagatctataactttttcttagacattcaaagaatttacatagaagaaaagcttgcagaccttaggtttagctgaatttcggtgtgtgctgggtccagcagccatttcgatgggagttacattagtaggctaggggttatcttttctttatttaaggagaaaatgtatctacctgtcttgcgatgcttttgcaattcctaatgccaatttgaattttttgttctataatatggtcaacctttcacctaaatacagaaaattttgaagttagtgaagagtggggtcattattttttcaccattgtcactaaacagtagtccttatgctatagaaagtttttggagatagtataataagtaatattttgtttgtatattatgtagtcagtttttaataagttctgatacctgccttgctactgaagaggtttgataagggagatcactgattagaagctgttattggccataagaaagatttctaagtcttcaggattaagagttacctcctgggccaggcacagtggttcatgcctataatcccagtactttgggaggctgagataggaagatcacttgagtccacacacacgtttgaggccagcctgggcaatatggcaagaacctgtctctacaaaaaatttaaaaattagtcaagcacagtggtgtgtgcctgtggtttcagctatttgggaggctgaggtgggaggatggcttgagcccaggagatcaaggctgcagtgagatgtgatcatgccattgcactccagcctgggcgacagagtaagactctgtctccgacaacaacaacaacaacaacaaaacaacaacaacaacaacaacatgcctcctggaacatactatttcagcttttattttctcatttttataaaacagattgaagacccggaagaaccagaccccaagaaaatcaaaggatcttctcctggaatacaagatactcttgaggcagaggatggtgcctttgagacggatgaagcccctgaggatgtaattcattttcatttcttaagtttaattgtgttgaataatgggaaagtaagaattgcagatttttagggaatcatcactttagggaatatttttgtcacttgcacttattagaattatgtttttttcagaagttcagcagaacttacatctaaccttcatctgctcttgcttcttctgtagcgaatcctttcatgcagaaaagctggttccataatgcgggaaggaagagacagagttgtaaaccttgcagtcgacaagacaggcaggattcttgcttgccatgtgagtaccatacttaggagaaaataacaaggactaggctgttccttccaaacactcattctttcatattcaatgtaaagatgactttttcttgactcatgttaataattcattatatggtactgtgtggacctataatctctagctttattagcataacaacaaaaatattaataattactattaggttggtggaaaagtaattgtggtttttgccatttaaaaagtaataattgcaattacttttgtaccagtattattattagcaaccatttattaaatgcttgctcttctaagcaatttaagagcatttaacttcttgttcagccttcagagcaatgctacaagtaggaaatggtatcctcattttacagatgagatagcaaacccagagagattaagttgtccaaggtaatgcaactac

SEQ ID NO: 55820 - DNA, 1061 bp, Homo sapiens
gttatatttcatatgttcaaaaaatcttgtggacagaaaattctgtcatactaagtagttataagagcattgctaggtgtcctgggcagtgatttcacacttggctatatattaggatcatctaggttgcttttaaaaatatagattactgagccctatacccagagagttgataggaccaggttgggcctgggaaatttttttgtgaaacaaatgccctggaatcttttcagtgaggagatacagagatctgactgaggcagtaagcttctgggggcttccttgcctccactatactgcagtattcttggcaagcacatggagggtctgtgtagtggacacaggtactcctgccaagctgtcttttgtgggttgtctttgaaaatacagatataaagcaatttaaaaatgtgtttaaagttatattttagacctacatgtaataaattatacccatattttatagacagacattaattatgtttttttgatgtttagttttttctgtcactgtatggacacaaactgcctgttatatgcatggacatctctcatgtaagtagtttaaatagtgtctcagtaatatgttgtcttttttacagcagatactttcttaattctggcttgatgtcttcatcttagattatttgtttttatcatcattctgttatatatctttctccaaaaacagtctcaaattaatatatattgtatcttatatatattactttaatgttttcagaataattttgcaaatatcatctcaatcaatccttataaatattatctctttccctcttgtagctctcccaaatagtactttattgtttaaaatactataattggtagagtacactaaaatatgaaagactttaaaaaggcattcctttttattctgaaggataatgctgctgaggagctcggatttatatttggatagttacggtattttacactatgtagacttttggtctcttgaccaaaatcatttatttcccaatacctagttttgattaggagtggcaatgtatattaaaaacaatgtctattctgcagagtga

SEQ ID NO: 55821 - DNA, 1938 bp, Homo sapiens
cactaacaaagttaagttacaatgttaaatgtatttctttttttttttttttttatgttgacaaccatttggaccacgcattgaaataggagagataagagaaatactgatagggaatgtgggctacataaacattctagtagagtctttctcagcttctcttctgtttctttctcccactttctttccaaatcccatgccagagattagaaaatctttttcctatctaacgaagtaaatagataaccctatgtcaaggcacagcactgccctgtgacagtacgaaagtatttaagccacagagttcgtgcttttacttaacaagctttttaagttcctctgtaggtaagagcaaagaattcagtgtttttagtagagatgaaaatcagttttttggcttcattttaatgtgtttgaaagaaatgggttaaatattctggttagctttttattcatatacggaattcaaaaatcaaggtagtgttttacttttatttctcataggatggagcactcatagcaactggctccgctgataggaatgtgaaaatctggggtttggactttggggactgccacaagtctctctttgcacatgatgacaggtatgtatagtcttttcaaatgtctccctttgagtcacctgtaagttatcactttccttgagcatctgtgtctatttttcagtgttctcaggcagtgatacaagttctaaaatatagtcagacaccctagaactagctagtcaaaagctatttatgtgtgtaaaactctttttactaacctggaatttgatgacattttaatatttctgtcacttttcagtgtgatgtacctacagtttgtacccaagtctcacctcttcttcactgccggaaaagatcataagattaaacagtgggatgcagacaaatttgaacacatacagactctggaggtaaccacatgccttctgtgcttgcttggtacttaagaaatacttttaagaatatttacattacccactaagtagtggtcaatgaatgaggtattctttattttttttttctcctccagggtcatcaccaggaaatatggtgtttggctgtaagccccagtggagactatgttgtatcatcgtcccatgacaaatctctgagactttgggagagaacaagggagcctcttattcttgaggaagaaagggagatggtaagaactttaggcttggttacaaatatgccagtaggtatctgacaggctgtcctagttgaagttttctgtctagtgcagttacacctgatgcattgccaagtccaagaaccttcaggagatcttttcaagaccattgtcacccatttcagaagctaggcagagataaagatgccattagggtattatgttgtcaaaggagcagcttctcgcttcctcatttctcttcatatagagaccatgtttttttctctcaaattaatgtatatctatctcatggcaggaaagagaagcagaatatgaggagagtgtggccaaagaagaccaaccagcagtaagtaaattttggggaccttgagattatgccccatatatagttatcttattgaaattgactataatgtccagaatttctaatagaattaaaattgaggctagaagttgcaggtatcaccagctgataaagaatctgtgtaattctttctcttcaactgtatatcctaattttgtggttcaagtgattgaccaaatttgctactgaataattattctgtcaattgagactttagggaattattttattcactgtagcacaaaaataaaaattagaaaatttggatattctctttttaaacatttgcaggatgttcttacaataatacatatgctaagttctgttactggtagctgataacactgttagtattttcataaaataataatagctgttctcatatggatgtaaga

SEQ ID NO: 55822 - DNA, 1408 bp, Homo sapiens
aagagagtacagtaagttacagtatcaataaagggaattcccaaggagaaaaaccattgttttgggatttattaactaagatcaggatatgcaataaatggaatagaatctttccaactcactatattagaagaaattgaggaagtgtgggaagaagggaacttggtcttaatgaaagcgaaggaaaggaaattacagattgaggtgattattgtcttgagtagaaacccacgttctatgttggtttgggaggcagggtaaccatttcagatttctagataaaatacattgtccaagctcattcatgagtactatagaaactaacaggtttgataattcttttacactctgtcagttttttagggtctcttttttcccttttcaaaattataaaatacagttaccactctgtctataacaagtgctacctaagtctcagtttttttaatgacttgatttaataatttcttcataggttccacttcccagcaaccccatcctaatggcttatggcagtatctcagtgagtaaaatgtctaacggttttcctttgtttattaaaaggttacttacaaggacaagaaaggaagtagaggcattatgatttggggatggattattgggaatactttgtcttcaaaagtctcttttgaatcttggcattctctaggatattttgtatttcaaaaggaccactttagtgtgacttcccaagccagcctttttggttggactggactggcattcttctgttttctagtgcctgtttatgttcagtgtccaaagccctctgaagattctgttaatctaaattaacttttgaatcagccttcagaaggaaagttgacagaaatcagtctgatgagataaagaagagagagaggggaagagtgatgggagaatgtatgtttatctagtaatctctaattagtattttattgcatgtctcatcacagtaattttgtgagtcagggtatcttcaccttatagataaggaatctggcttgacttgtagcatagttggtaaggggcagagttcagttgtcaacccagatctgactgactctaaactcatgcagatcttgccattttagaatactttttctgaagtaagaaggaggggttcctgttttataggagatagaaattagagaactttagtagaaaccaaccaagagtatcactaatggtattaatccttcctttatagccttcagcttatgtattagagatttttaaagggatcaagtcgaggtgagtgagtccttgcgcacaatttttgtaatctgtcagcaaacatttatgaagtgcttatctgaacgggaaataaatagaaattataattgatggttatcttataggtttaactatatcaaagttttgatggaaaataatttataatgttctt

SEQ ID NO: 55823 - DNA, 1029 bp, Homo sapiens
agcaaggcagagagctgggaaaacacaggacgtgtttgaaataccacaggtaaccactaacaataaagtgtgtgctttacacaatggttattcctcaaaacaaccaaaaaagtagtattcccatttatgtgaagaaattcagactcaagaatttacacagagcaatttgcctgagagcagtaagagtttagaaaagtaatgaagatatggtgttagaaatatgttaggaagagaatgtaaagggctttgaattccacacttcagagtttgggctctacatgaaggaagacacagaatgataaagtttatgtctcagaaaaactaatagattggagatgagagtagctggaagcttaaacagaccctatagatggtgttttcaatagttcagattcaaagtggttataggtagaactaggagaatagtgatgagaataaaaaggaagagacagattcaaaaagctcttggaagagggcaactgtgattgcatatctgagagaataatgggggaggattttaagttatgatgactgggagaaatggccaacttcagactgactgacaaatttagtagaatgaacttagtttttattgtttgtgatagggaggtttttttgtttgattgttttgttatgttagggtttggagagatatgaagagctcagtttttagacatgctgactgtgagattatggcagaacattaaagtagaaatgttcatcaagaagtcaaaaatacggactatatagctcagactgcaaagttggagatgtagactagggaattgtcagagcagaggcaatagcatgggagtagttataatatccatagctaatatgtgccaagagaacagaattctgtgggatacctaaaaggtccttgtttatgggacagaagaagagaaagagcctgatggtcagagaaggaacagccaaaggaataaagacagaatgagaacggggtggtgtcataagagtcaagttagagagaaggtcacaaaatggcaattcaagtccccaacatacaaa

SEQ ID NO: 55824 - DNA, 1063 bp, Homo sapiens
ttccagagtggcctttgaagagactgaataatcacttcgtcataatgttaagggagatgctagtgtgtggcagccatgaaaagttacacatacacacccacatacagacagacctacctatacatacgtgcacacacacatacatattcatacacaattcatacacatgcaatcatacatgcacactgactctgaactgggtgaactctgtggagggaggcccagaatgggtgctttcaccaagaatttgtctgtgtacaactctagatggagtgggccagcagtagctgccagtctttctcccctgcagcttcctctgcttctggaatgaaccatgtatcctggagaccctcccaatggatgagagtggaaagacatcagtacaactggacttggcttccggaaaaagattgcttttgaactttggctctcttcacttgtatgctatcattgatattcccagtggtgcccgtggaaagagggagaaagagaagctgaacaggagaaagacaaacagaaagaatagagaacaggaacgaggtggagagcaagactgacagagaaagtgtgagcaatgatgagaattttaattcaccaaggagacgtgtttttggtttgtccccccaaaccccgcccgccccactacaggttatggaaagaatcatggcattactgaggagtaaacctctctggcacactgagcatggtcagggcattggtcagagggacagagcaaggaatgcatcctgagcccacagctttgaccactgtgatccagaagagaggtgcactacgtgggaagtgctgattccacagcatgcagcctggtaggggaaggaaaataaaagggtgtgaagaaggaatagttttataatctcggaagatgataccaagagcagaggcaacaaatagaggcctggcctccaggtgccggatccagacacctgacctagaatgcctgcccgctatccctgtggcaggaaatatcccctcatgtcccagggaattgcagatgggtcttctatacccttctacctgcccttagatctccatttttatcaaa

SEQ ID NO: 55825 - DNA, 1049 bp, Homo sapiens
aagaaactgtaacctgcagagggtaagtgatgtgcctaaggttacctgggcagttagtgtggcagagttgtgagcagacccagatctcctgactctcaggtcactttaaggcctttttagcttcttgttctgataaatattaaaactccaaaggctccatttacagtctttattccagtctctgagaatggacatgatcctataaaaggagatcagcagagcctctggttcataatgattttgttttgggttagccctgctttattctaatctagctcttataattgtgttcccaatgtcttttatgtgatgcaacttcaatctcataccccaggctccactgctctgcacccccaggcctcaattttgacttggcactgtcttccattaccccatttcctctgtgattagggtcccgcgttggtgtcctgcatgtttggctggaagactaaaaatggcaaagtaggcaacagcctttgaataaaatacatatttaatgcatttccattaagaatgggaaaagctgagctagtggattttaatgctgacatcagaggtcttattagaaagtgaatttgatggtgagaaatggcaacgtgaatcttggaaggtttattgttatttttatacaaaggacttactaaggctcttacagagaaaacaaacaaaagagtttagtgttgtttttgatccttctggagtgtgtgtgtgtgtgtgtgtgagagactgtatgactgtgtatatgtccacaggtggaatcgcttagcataggtctgctgagttaagaggaaaaatggttctgtaaaaatcagccctatcttggacatttgaaggcacctcctgtatggcttgcatgtgacttaggcagactcatcttaaaagactctgtctcaatagtattcacgttttatttttcaggaggcagcacaggcacttccccaaccacctccagcactgggacaccatccccttcggcttcttctcatcttttatctccatcctgttctcctccaacttttcatctggcccccaacactttcaatgtgggc

SEQ ID NO: 55826 - DNA, 1041 bp, Homo sapiens
cttctagaatcttctcctgccagagatccttcattatatcaaaataattccatggaaagtacttgttgttggcgattcacactttatattatttgaaacctcagttacagatatgctgagaaggacagaaactgaggcccactggttcaagcccctgatttcacagctaatgagaatgaagaggtggcctgcattgctagtggtcatgagctggacagaggttaataggcctagaatcaggctcagggctctttccgacatggccagctgctgtcttccttctctcagtggtatttacaatgttagccttgtctcaaattgtggaataaaaatcattttacttttcttaaaggattttaagttgagtattagaaaggaggaaggagaagttttgaaatgtctctaaaatcagcagctatttatatctaaatacaattcttccttgaaggttcattggggggaattcttttgaaattctttcgttattagttaggctttgtcaaaatttacctctgaagaaactattataataacaacagccaaatttgtacttctatagccagcactactacctatgcccatggatgtaagatgaacgcttttttttttcctgctaaaaattaactttcggttcctctttgagggcatctgtctcttaattgacacatctgggacccctgtgtccttagcacactgtggatggtttctttgtattccagtgtctctggaatcctgcttttttttttttttttgagagttttgctcttgttgcccaggccagcgtgcaatggcactatcttggctcactgcagcctccgcctcctgggctcaagagattctcctgcctcagcctcccaagtagctggtattacaggcgcccaccaccacactcagctaatttttgtatttttagtagagacggggtttcaccatgtaggccaggctggttttgaactcctgacctcaagtgatccacctgccttggcctcccaaagtgctaggattacaggcatgagccagtgtgcccaacccctgctagtt

SEQ ID NO: 55827 - DNA, 1043 bp, Homo sapiens
aggtatgaacatggtgttttgtaaataaaatattccccaagatactgtttatttatgactcttttcaattctcctgttgtttttatttttttgtttgtttgttttttgggacagggtcttgctctgtcactcaggctggagttcagtggtgtgaacatggctcactgcagccctggcctcctgggatcaagccatcctcctgtgtcagctttctgactgtagctgggaccacaggcgggtatcaccatgcccacctaattgttttgatttttttttagagattgcctctcattttgttgcccaggctagtcttgaactcctgggctcaagcaattctcccacctcggcctcccaaagtgttggggttattagtagcattgttaaacctcctgtttctgctaacttccattttgtcacccaggttgaacacctggttgtcacaacatccagtctgtcactaatgtcttttgcttctactgacagaatattttcttctttctaatctgattgattttgcccttgttctgttcctgccttcccccaaccttgggttcttatgatagcttccaattaggtcacttggactgcaagcttaatgtctcacaagccatcctatacatcattgtaaagcccagtgataattgcaccatttctatgccaaaaattgtcaatgactcctcagtgcctagggagtcaagtgctggaccccgagtctttccaataatgtcctctgtggctaatgaccaactacatttctaggctcaatttctgttattcctcctcacacatctgcaagagtgtcgcaatctggtcagatttttactgttgcctgaactttgcagcatccttgcctttgtatgtccctttttcttttccaggaatgcccttcccttttgtttttatttgtcttgattccttctactcttcaaaaattcagtgaaaataccattccctaccacttcctttccttttttcagctgcaaatgagctctccccagttagaactgttaggggactgcactctctcgtgacctcatcacatt

SEQ ID NO: 55828 - DNA, 1045 bp, Homo sapiens
ggagctcttaaaatatcccagacacaaaataggatttgggaatccatgtctcaggggacatgaattagtgtgtttggctgagtgtgtgatgatataatggctctgctactgaaaggcctatagaatcaggctaggatatagatttgtcactcagcaacagctgtcatcttagataagtagttctacttttcagtgcttggagaagaccaaaaatagctgctacttagtcctaggtataaaattatgtgcttagacatgtaaaacctagttataaaactttatagttttttttttttgtgggtggggggcagagggggagggagaatgaagatagtgactacatcttcatgtagtgattatgggtaaactgaagtttttggtcagaaacttcccctttatttagaagtttgatttggttctttaacaacctgaatatcttcacaagtgacaggtgaggaattagggagatggagagaaatgacactttttcccctgtgggcactttattccctgtggctttgacacagctgttagatattcttgccagagatgctgcctggggttgcaagagaaaaaagtcagtgacaaaaggaaagaaaagtaaaggaacaatggggtgtatctttcacaggtctgcaaacctgctgcaggtaagtgaggttggcagcaacgtgattgggcattctgtcccattcttttccatcttactagtgtcaaggattgatgctcaagaagctctgacccttgacaccattgaaaagtcactcatcagagtacaacacttgtttccagcctttactcatgaatatatttaactccaaggaaagcaatcagaattctagatgttaagggtgggttagagaaatggattcttaggcttgacttgcagcatcatttgacctaagaaaattatactagataatctgaatttgaaaaatgttaggacacacaattcttggcattaagctcctaaaggtaaatatttaaaattccagtaaatcttcccgggtaaatctggctctagccttctccatcagtcagcttc

SEQ ID NO: 55829 - DNA, 1030 bp, Homo sapiens
accctgggcagtgtggatggaagtttagaggatgtgctggaggcaggccgaataccattttacattctaagggcctctgaatgtgcaatgagttttcttctagttctcctaggaattgggttgagggccaggcctagaggcacacagtagtgatatagagggtttccttcacttttttttgaggagccagtgtttctaagcccagaatgtctacttttgtgtttcttcagctgctgcccagcaggcccaggagaacctgctctgcacgatttgtgaaatcgctgctgggtgacagcccattaggtatcttcttctgttcatgggcctccagttttccctgaaagactgaatcaaaacctcaaagtcacaagattggttctattcttcttttcatcttaaagtgccaggtgcacctctgtgcctgagaagattgtgttggccccagtttctattctctaataggctgtgatattttttacttattcttcttttttacttataaattttaaaaaactcagataatttgtatacttttaaaaaatccaaacagcccaaaatgaacagtgagaagcataaagagcaatctcccatccctagtttccgagcttatcccaggataaccactcttaccagtttccttttgcatcattccacatacatgtatgatatattatatgagtccttatatacacatacacacatatgtatatatacaaacctttaaaatgaaaagagagattgtggcataatatatatagtactttagactttataattttagttttgagctgttatgttggagactgtcaaatagtcattcttgcaagttctccacttccccctcttttaaaagtctcatagaattccatcgtgtggatctttcataatgtttattgaacctattttgacgagccttcaggttgtttccagtcatttccttctttaaataagactccatgattatttttgggcattcttgtgatagcacttatagaataaattctagaagtagagtagagttgtacagttg

SEQ ID NO: 55830 - DNA, 1016 bp, Homo sapiens
gctattgtaatagttctaccagtatacaaacaaatgtcataactgagaatattcattactgtagctaagtcagaaaattactttttgttttaataggagggactatggctattgaaataacgtgagaggagtaagtaatgtctgattacaggctccctaagcaaatgaggcctgggatgtttttctggctgtggcaaatacagcttgttattttatagaggtcatggaaaatgaaactccttcagggttttaacactgacaacagaataccattctggaaatgaattaaattagaattaaatttaattttatgcaggttaactctgggagctatgctcaacatttgcaactcttaggatgatatttagacctgaatgaaacaccaaatcgaataaaacacaagtttaaaagtgaaacatttgggtaacctcttcttgtgtctacatggctttaaataactgctttgactattttatcttctacttgtccctttccttcacttaactgatggatttgatttgttgagttggcagatgaggtgctgtttgtacggaatatagctatctttgtcaggcatacagagaacataaaatcttagctcagtggtggcaaacacatcattttaaatcattttgtttgaaatattgcctaattatgctgctacttataggtcatttttatgatttttatatagcatttctaccactgtgaaatcttgacaattttagtccttcatttttgaaattattcacttagatgcttgactaagtgaaaacaatacaaagcaataaataaaaaataaagatttggtgaatctgcacgtgaaggtcaataatgtaggtgtctcgaggtcaacccttttctttttctcttgtggtactttgcttatacctctaacagaataccacagtgatggtattggagtacaattatttgtttacgtctgtcttcttcactagatctggtatttcctataggtcaggagtctgtctttatctctgtatgtctagttttca

SEQ ID NO: 55831 - DNA, 1043 bp, Homo sapiens
ttctaaatgttaatagccaacagactctaggaattgttgaatgacctagtgtcttctgggagaacgccactccaacatggttcttattctgtatcctctttagaaagggagtctgacccaggactcaacccaggaagggttgtacaagatgactcaccaagatctgattataggtcatgaaggacccaatttgatgcctctgaagaacaagaagtctcttcagatgctgaactgctttctgaggatatatattgtccataaagatttgaaagttcattattcattcatctgtatgctgatccttaaggcttacagaattctcttataggcttcccttcaggtctttcatggtccagaggccagaatcaacaactccagagaataaccccagaaggtcactgccttgacacccctataataatcacacagtttgagctctcctattttctgtttcacagtgaaatgggtcctattcagtgatggagaagatgggatgaacctgaaccataggctactgggagaggtctatcctttgagctcagtaggtacagggaatgagtccatttgtccacgatgctaaggaacatggtgcagataatctggggcaagagatctgactgctgtgccagttgctttttatgacttgcaagaaggtttttctaacccagatcttgttaacaatccatgctaggtgatgtattgattatgccatttgggctgttctatcttaggaaaaccccaaaacctactttctaatcccaaccatattaatacttttcaaagaagctgaagtgcctggtattcacgatggagatagaggcctggtgtctttatctccctcctccctcctcaaaaagagggtctaggtaaacagggaagctccctgtgcctggctctggggctcactgtagactgtaatccaagtttcacatcatatggttctctttagatgggaagtggggcaccaacaccctcttttggaagcccaaatcagaacaaaccctcaaactagtttccatgctgagaacttctgggtctttcct

SEQ ID NO: 55832 - DNA, 1073 bp, Homo sapiens
aataatgttatgaaaacaaaattattgtcttgactttctgctatttcctgcttccctttttcttcagattaattcacaacaatttagcctagattgttttagtttttatatgtgattatttataaacagcctaaaattttaggccatctgggtctatgcaaatcctaaaaggggaaataatttaagttacattggtagatagggtgaacagagattagttcaccaatattagaatcttagaatcgatgaggatttactgaaaccaagaatggggtgttatttttcacagtgggtagtaaaattacagtacttattaccctgtaaagggttatatggcctagaaataaaaacagttgagcatggattagatttatgagtgagaaagtcataaaattccaataagcatgagttaggaatgttcaaattatttctgaaaatgtctgacatcaatatcgtagaaggaaactaccacctttgctgtcaccacctcttattataatcttcagtgttcagaacactagtctagaccagaccagaccaatgtggtattcgttgtgggctggcaagtagactgtgtgagaataaagactcttgtacctaatgtgttttgtataaaacctgtgcacacttcagattagatagataataaaggtagagaagataagggagacaatggatgcaactcataaaagaaaataattatgatttgagattaaagacagtttgccattattcttactaacaagagacaaccgagataattgaaatctgaagataatctaaaacctaaataaaatattattattactatacacagcaaactaatctaatgtctttggcataggagccaaatactttggacagtgctaacatgatgaagaagaattagcaaattcaaaatctagccaaacttgggacttcagtgaatctataatagtttctttggcataatgaagacatggcagttagcattgccctacttcccccaaattatgtgactctttaaaaaaagggttgaatttccccacctgctgttagaaacacaaaagtctttctgcatagctgctaaaaat

SEQ ID NO: 55833 - DNA, 1760 bp, Homo sapiens
atcttctccaagtacttgtgatactctcttgtgtgtcctatgatattcttagccctcacttctccctccttgcctccttttcccctcccctctccttactttaatgctgttataattattcccccaaaagttcttcatttgtacacagagcagtccttagtttgctctcacatgcagcctttgatttctttcagttcaccctatcaagtgctgtgtgcccctgttactagttaaagggaataattgtgcatgtgacaattcttggtctctttctcttcaacacaaggactctgtctgtgttctctttgtgtgtcctccctatgtgatcgacattctcttttcagtctgtcaactggatgcatcttttgaaatgttttggctaggaagtcaatccctccctgagattgagctgaaaacaaattgcctattaatagcacttaacattttcaaaccaccccctttaagaagaacaacctggaggctttactgttaatcattttaagtcctcatatgttaactctcaacagttctgttatattggccaggcagggattatcttctttctctaggaaggaaactgggtttcagagctatagtgactttatccttagataggtaattcaacattatgacaaatgtttgtgtaggcactgaggaaatgcaatatgactacaatttagaggaggacacacagagataccagctagcaaatgctgggtgtgcctgggaatgagtaattcacaagaatgttcaaggaaggaatatgatcgatataggacaggagaaagggcttttcaattaaaaagtagggcacagaaacatgagcacatttagggaaaggcaaattcatacaatatgtggacaaaattagatggaaatattatgttgagtcacatgaaattgtaatatttgattactattttttaccaaaaacactggcagttccatgtggattcacctaatatactcagtgaacaagcatttgtggagtgcctgttttgcaggtacaatccaagtacgaagaattagaaatgagacacagtctctaccctcaggctccttgtctatgtagagatggacatggaaagccagtgagaggtcgaataggaattataaccaaagtcttctgagtcttgtccctctcctgtgcattagctatggcatttgctcttaattactgggaatgtggcctctagatgtcacaatcacttagtagtccttgaataaataaaatatttaatatttgatataaccatgttggctcaatggaatgcaaattcattttataatatgccctcctcacttctacccacctatgcacatagtaaagcaggcctacagtcgtccttttcttctaagtgtttctgaaaatcaaatgatatgactttatatgactctaggacaaaatggtctggttttacagatttccctttgtgggagtaatataaacatacaggctcttcctgggaagaaagccatgtcccatttcctatctgtaaatgcagtgctgaagaagtgctacgtgcttggcctttaccaccagatctccccacaccagcctgtcctgtagggaaacccattgcgaacaattgtcagttccaataaataggttgttcagcgagttccctgagtttgcagtagcctcccccaaaaagaggcttctgtaacgacttttttttgttttaatgagagactgcgtggcttattcagacatgagtgtgggaaccagccctggggagagaagtgttcccaccatgaac

SEQ ID NO: 55834 - DNA, 1572 bp, Homo sapiens
cagcctccacctcccaggttcaagcaattctcccacctcagcctccggagtagctggcattaaaggtgtaccaccacgcccaggtgatttttgtatttttagtagagacggggtttcaccatgttggccaggctggtcccaaactcctgatctcaggtgatccaccctcttcagcctcccaaagtgtcgggattacaggcacgagccaccacgcccggctgcagatcttttcttatatgtctttgcatttgtccatgtttgagtgcaaaaacatttttaatatcatttttttgtgcctagtagcacctagcatagtgatttacagtgtaggcacaaaataaatggatgatgatgactgtcagattgtagtttacaaaaatataactagctcccatagctatgataacatgggcataggattcatgggattctgcctcaaaagcaaatatgcttgttttcctttgttccagaaagacagcaagaagcgagtattttccggcattcaacctacaggaatcctccacctgggcaattacctgggagccattgagagctgggtgaggttacaggatgaatatgactctgtattatacagcattgttgacctccactccattactgtcccccaagacccagctgtccttcggcagagcatcctggacatgactgctgttcttcttgcctgtggcataaacccggaaaaaagcatccttttccaacaatctcaggtcagcttctcagattagaactgagaaaactcttatgtgtagattatttgaggaaaaaatgttgaatggttcatacagcccctgctcgtgatttttaaaaagtgtttgaaggtgactttttcaaatgtgatttttttcagcttaatgttttacttgtatttatatcattaagtatcattatattgcaagagtatttttcagcttttcctccactgtattcggtaagtttatgatgcttcatataccaagaattgtgtttcattagtacttctagccctggaattgttttgctatgctgggttgctttcaaactgattactttgtgttgttgactaatctccttgtgatcaaggatagaagttagtgaccaatagttttatgtaattccaatgttgctttattagatgttctatttagaaggtctgttggatgattcccattgttcattctttttataatagtttttgagaagatttgatagcacaagttgggaaattggaagacaaagtcccagtgtgttgtgtctaagccaagaaaggcttcatagtaaagccaaaatatttgactcatatcttcactatggatgaatcagtttattcttggacaggccgatagtctggcctagagacaaggcaatcaagatacaccctagaaaaagatgaaaattctaactagatcatgccttcattatgtatctgctttaaccttaggacaaagcccagccaaggaatggtatgttatacatgctatggtacatgttaacatgcatgtatatatgcaaccttccttgattgtacatttctatcattatttttatatatgttttgttatacataaaacttaa

SEQ ID NO: 55835 - DNA, 1055 bp, Homo sapiens
tttaaaaatgtgccctaacatatgtaaattgtttcatatttttaaataaagttatagataaatacacttgagtcttaattttgatggctttatttaggggtaatatgaaggaaggaagaacaaattttttaccttttaatttatatagttctatgttatttgacttgttaccagaattatttgacaattttttaaaatctagtatggtgaagaggagtaaaaagatgacattatggcctgaagtttcagtacaaaaaagttaaagtacaaattctcctttaaaccacaggattccttttccagagcttctaaaggagatattgggtcagtggcatatgataattaaaatagtatattattaactactaggtatgggcctgatattcctatgtctagctcttgtaaacttgattaagcccaaagctcttgacccaaatccaaatgttgggatgtgaattaccacctatctgaggtaatgggtaccagagaccaacttgagctactgcatgagggaagagcaagttgaggaagccagacctggccctagcgtaggcttatagggataacagaaacggcaagactcctctggtgaaaaagaaacaaacaaaaaaccacaaaaaccaaaacaaccaaccaaccaacaaacaagcaaacaaacatggaccagtaatggtccttgaatctggtcaattcgatgagcaattctttgacacaagtggtaaacaagatcagataaataaagtaagctctcttgttctcttttccgtgaatattacctgttgtagcagaaaaaaaagtagaaaactgctgctttagatccccatttattgagaataaaaaatgaggaaccaacaaagacaaaattagagaaatcagagtgtaaaatacaaacaacgcagtgtagcttcatgaaagtgagaggggagtgttttataggatgataataaacagtgtcagttgatagattcaaagagatcattgaagagcagcaagacaaaaacagcctattggattaaaggattaggaatcattttttgtttttattttagaagagc

SEQ ID NO: 55836 - DNA, 1044 bp, Homo sapiens
gctttggccttcctaaatagtgggttaaaagttatttgtttccttttatagcattacatatttttcacatgtctaaattgaagacacacactttttaataaccagaaaaacgttttgaaatcataaatctttatacagatctttagtcattaatatcatttgtgatattttaggattctgaggaagatacttgtcccacaatgctgttattaaaatggccttagaaaaggactactaaaaatttatggccacttttcctgtatgtatcttctttttctcttgaaaagcttcctttgaagtcaaagggattttgtgaacagatgcagaaatatgtgaaagaggcattggattcttaaaccagatgcattagacatttttatgatatctcataacctttgtagaaaaaaattattttgcaagagtatagtataatgggaaaaaatgtatatttatcatatgaatggttccatcaaaaaccaagaaatagccaagttagtttttattagccttggctgtgcacttactcccttaggtgtaaagcaaaagtgaatgagccataacagtgctatgttagaaactctaactaataaagtgttgtgattcctaagttgttttaatggtttttagtgttttctttttttaaaacaaaatcttgggtaaaaatgttggcatagggcatctttgcttatctcagaggatgcagatgtaaactcaagttgaaaataaaacagggagaaacaggaataacagcacatcactccatactcattatgggatgtctacaatttatatgaaaacggtttattttgccaggtgttgcctgacagaaaactgttgaaatctgacaagatgagcgtagtcataaagtcagaggagttaagatctgacatgttctgtttaaatgttgatggtattaggtaaatttaagcctgtcatcattggccaaacacagaatccatacttctttaagcactaagtcatgattgtattgtgcaaagagtgaaatattgatggttagtagatttttgcaaaagtatttgttat

SEQ ID NO: 55837 - DNA, 1034 bp, Homo sapiens
aatcccttctcatttaagaggggaaatggagctatagtagtcgaaagagaccctcaagttaaaagagatcccaaattgttcagaatcaggccacgagatttggtaacagcaaatcaccttgtgtgtcctctggcatgtgattaggacagaaagcttttggttaggccactgactgcacaggttttgatggcacaggaagataataagttggctattgtgtgaaagggaggcaacaggatctgggcttgtgcccttgtcaccttctgtatgaagccaggaggatggagcttgatgacatcgcctaacaatacccacatgcacatctctgtcatccttaaatcactgagtcttggactttagggtctccttgttccagtccacaagggaaccaacccactccatggttttctgctgggcttcctcccagctgtaaattggcttatacgccagatctcgctgagccttcttgtaagagaaggtgaccatgctgttggacaatgtcactgtgtggcagttgaagggaggtcaataggtataaattgacctgagcaggaagctcactatttccagcaggaagccaattcagtacctcagggctaaaggaagcctccatctggaatcaaggcagaggccgaactctttgctcagggcgtaattaaggttatcatagctttggtgaggcgtgtcatctgagatgtagtagaactgtcctcagacacttgggaccttcttggggccccacagggcctcaaggccagaatgtgggcccagcccacatagactgggttggttgtggagaactttccaacagttgacaggatcgcattgtttttcaaggccttatttatattgtcagtaagaaatgggcttccttccccatagatatgcattgagcttaaggcacaagtgtacaacatgccagcatttttcagagtccacacattagccaccagcacagccttctcagcaagtttttgctgtatggatatggagcagaccatgtgttttccagatgctcttgtttgtgtcgattc

SEQ ID NO: 55838 - DNA, 1071 bp, Homo sapiens
aaccttctccatcacctgacaattgcctaaaaccccatgatgtgctggcgtgaatggaactgaatccgtgttactgggcatgcagatttccagttttgcactaacataatgcattttaaaacaaatttgagtagttgttgtgccatgaatggtatctgggtgacaggaacttcaagctcttttcagagcacacctaatcctccctcccctagtctaaatgaaaataaggatcaggaactactcccttcggagctcagaacctgccttaattctgaggcagcactgtgaacttttcatacgtcagccctaagtggggaactcactctggttctcccctctccctgccttcaaatctagaaaaaccatgtttccacgtttaatatctgatgtctcggttcccaataaatcacaaatcagaaagttctgttgttccattattgctatgtctgaggtgccccataagaagcctgtccataaaagggcttagaggggaagccctgctccctgtttcccagatcggactcctaaatcctgtccttcaggatggagtgctgcaatcccttttatgccatgctgggcactgtacctctgctattttagttttatgagattctgatgacatgcttatttgactttattgacacagaaccctcctgctggtctcaagattggtagaaaccattgattaatcccctcttaactccccccgccccccgccccgccaacgcctgcactgttttccactactagcaaatcaataggtcatgtttaatgacactactcttgcctagccactttcaggtgtattatatatgcagactcaagggatgtatttgtccattgcgtctgagctccaaagaggcaagagtgatgggcagaagtgatttggggtcagtagtcatggagtatacctcttaaaaggtttacagctttaatgagatttttctcctactgtcttagacaagaaatctccaaatgttggaaacttggtgctttaaacagtatacgttctaaaggaattcaaccgcatttcaggacctgttgactgaccaacctcagacacagccatat

SEQ ID NO: 55839 - DNA, 1113 bp, Homo sapiens
ttctccccacctgtgactctttttcttgttattttttttagtatatgagctttccccatcttttccttttttagggggggatgtgtgccagatttaatttaatataaaactagtttactccagaactgagaaaccaaaatgtgaaattaactggaagacacactccccttttaccaccccccttataacaataagcatcagttgaatttaaccagactgcagccacagcctacactagtctggggggcagttgccacaggacatcttttgtttctgtttctctacttcctaatatgtgcttgtgtttattgattgaataggtggtgtggtaagtattcctggtcaacacttcctgtatggcatgtaatctttactaactttcttaagagccttcatttgtttcccagcctaattctggacctttagggaaagggttttctaggctgatgattctatgtaggtgagaagagaaatcaagaaatccatgcctttcttgttgtagtaagaaaaacaaaacaaaacatgaaactcttgaaaactgccagagaataaaactttagtctgaatagccactcttaatgttaaatgcaaatctccccggtatttgaatgcactccctgccctgccttacccagcaacttctttagtctcataattactttgaagattaaatgttggtctttcttcattcgtcatttaatttctgtgactgctagtcccaattttccttgggtgggagagaagtagttgtcctgtcatagtgggacagtctggtagcattccccacaatgaacataaacagcactgtgccacctctgtttgcacagctgaatcaagggttaaacccttggagtggagggaggacccacacaggggcatttgatacaaacaaagcatgctggcatttgggccaagagatgtagaattcttttttgagaatggtctgcctaacttttgaggctaattgccatttcctgtcatggctacctatttagcagggtaattaagcatgtttggctcctggtgctaacaggttattggatccagttgggagagttaggttgtctctatgactctaccttacctgatgtgattttgccaaatcactagatt

SEQ ID NO: 55840 - DNA, 1047 bp, Homo sapiens
tccacgattttcctttttcctaaccgcctcccccaaccgcccccgccctgcctcccccacaggagtgaatcacccaccccttactacatgaaccctgggctgaattgaagttggtgatgtatccctgtccttgtagtgggcatgtttgtccttaacctgtaggatgacaccaatactccgcatcccctactgcgttaccctcctccctcaagactgagcgtctggtaaatgcggttggataatggctagcgagttaaatgtctttgagtagctgtggtggatgagtgggcaactttgaatacagtccaagtgtgactgttgtaactgaactcagcatgcctaaggggccacactcactatctctcctttctcccctcacctgattttttgttgatgcccccaactgtttaccttcttctctcaacaagccaacatgtggatattatttaatgtggaatacgtttgaggaaccaaatgaacctttaagaatgccacttatatggccaggcaggagtatgcaaggctcatggtcgaaagaatgatgctgtaggacatggagagagccctgagcctgatataaatggctttcgaggtgaaacaaaacatttcttccttagcttctttgggagagatgaggcatttgaactgagataaagaatggaatcgagaaaaaaaaccgagttgtttaggatgaggccatgaggataatgaagtgaagggaagaggctctgtgaatttagatgatttctagttagaacatattggccgtgtgtgtgtgtgtgtgtgtgtgtgtgtgtgtgtgtgtgtgttggaagtgggggttgttgttaagggaaagttgatgtcaaaagttcagccatgcccaacagagaataagatggcatcctattgaacaagatcataaatatgaagtcaggctgccctttacattacacaaaggaacacatagatggcttttcagaactactgggatagaggggtaaatggatgctagtcagacagaagaaccggctggattgatgcggctggattgaagtggtaaatagt

SEQ ID NO: 55841 - DNA, 1056 bp, Homo sapiens
atccataatgaggggttgttccatgaagtcaggaatcagctgggtggatgctgggagtctggtgctgaaacttggagaacattttaaaggcgctgaaaactcttggcaggagaggaggagtgtttgttggctaacttgactgctgggcatttttggactgtttgggagggctcagctttcttgtctgtctttgcaacacatttggttcagaatgccaattaatctccttggtcagcccactgaagggtcctcatttctacactatgcctttttattctgcatgaagaggtgtctggcatagtgtctcctgccctcccccactgaagtctctttaatgctgaaggaagcttcggcagcgttgctagaaccgggcctggccttggttcccactgccttgtattctgggcaggcggtctcctctcactcaccccctggtcaggaagtacaatcattcctccctgccctttcagtggtgcttttcagacttggagcaagtcatagttcagtttaaggggtcatgacgagcattttaaaaaacaaagtaggaaatatcagacagcaatgcagatagatagtaaggttgtaagtattgtttcatgaattttgtttcatttatgttgtgtagttgtatgtgtgtggcatgtgagtatgaaattacaacttaaaaatgtgtttcttggccgggcgcggtggctcacgcctgtaatcccaacactttgggaggggccaaaggaggcagatcatttgaactgaggaggttgagaccagactgggcaacatggcaaaaccctgtctctacaaaaaatacgaacattagctaagcatcttgcacaagcctgtagtctcagctactgggggatggggtggagggctgaggccctggttgctgtcactcttcccaacctggtgctctagtgggaggatcgcttgagcctaggagtttgaggctgcagtaagccatgatctcgccactgcaatccagcctgggcaacagagctagaccctgtcccacccctccaccaacaaagatgtgtttcttacaatgaacctcagtca

SEQ ID NO: 55842 - DNA, 1087 bp, Homo sapiens
cttggggatctgacttagctcacgtatagtggctatgatgaattcagtgtcttattttttgcatatgtatatttttagtctaatattgcctgggtgtctgagcaagtctagatgaatttaattgctctcatttttcccctgcccctcttcctttggtctctcttttaggaaatgtttttctttcaacattcgtttcattcattatttactcattcggccaaccaacatttattgagtgccttccctgtatcagggacaggggcttacaaagtagaatttgatcccacctctgccctcagtagctcagtgtctaatggaggtagtgatgttcattaagcgtcgccagatactgtgctaggtgctgtgcctgttctctctcgcttgttcctcacacacttgagaaggccgaagctgattcatagcttggaaggcaggggccttggatttgaacccaggcctgaccaatggcagaacctatcagatgtgtggacagatgacattgcctttctttctttggatatatcaaaatcagccagcaggcaggaactcccattttgagcaagcaatgtgcaggaatgatagggtatacagagaggaacaggagatggcccctgacttccagcatgtgtctgatggacatccaggctgcaggcatcatggtgctgtctagagagatgagccaggtgcccagagcccatgggccaatgctgccctttcttgagcatgccaaacaaagcggttggtgtgttagaggcacagtctcctccactctaagtaaaaatcagcatgagtcctagcccacatttccctagtgagtataccaaagatatctatgaactggcagtcatcagtgacttcctaaggttccggaaatgcatctcttactcaggagtaagcaatgatgtgcctgcggctttacgagttctcacagaatgactttctggacccaaatgttttttctgcttcaggactgtgaaggccttattgttcgctctgccaccaaggtgaccgctgatgtcatcaacgcagctgagaaactccaggtggtgggcagggctggcacaggtgtggacaatgtggatctgga

SEQ ID NO: 55843 - DNA, 1807 bp, Homo sapiens
tttttgcacgctcgctcactctgaggtttttggcatcaggttaaaggcctacatttaagtactcaggaggctggccgtgctggggttgactttgctggctttgaatctgttcaagtgcctccagttgggtgatctggggagaactgtttaacctccagtgcctccctccgtgcagctgtgaatgttagaggagttaatgtgtgtctaaacatttcttttaggatgtctaaaataaagtgctccttaaacattgtttctcaaatcttccttttttgcctccagagatgtgttgatgacccatgcccacaggacatatatcgccctttgacctctaatgttgccctaattgccacttcctctgtctcctccagaaaacacagatgtagactcagacttccatctggactaataggaggagacaggctgtgaagagtgtgtgtgtgtgtgtgtgtgtgtgtgtgtgtgtgtgtgtgtgtgttggtggtggtgggacaggaaggtggtgcggatgtttaaaaatgttgggaccacgcattcaggacagaatggaagtgtctgggctttggcatccacccacccactctagggtccagactagtctaagaccctcggggttaagaaactctcaaggaagcataggtaattaggtgtcctcttcataatagtagaagacgtcataggttatggtgctggatgagataggtagatcaaaataattccttgagcttctggagtactcgatgtcatcagagttgcccagtaccccactcagttatccctacagaccctggaggattggcgatcgcttaaagtaaaaaactcactctggttgatgcctcagtggctgaggtggaatccatacctcctcccagatgcctggctggtcacagaaatcccaggctttctaagtcagatcttgccaagggtttctctcttctgttttccctttatcccccatcagtgttcctaaacctgaacccccagacccagttcttggggaagtggctgtcatgggcagtgactgtgcaaacctgatgttgcatctccttcctgggctggcgggagtccgaatggaccctctgaacctgtgtctatccttgcaggcagattccccaggcgacggcttcgatgaaggacggcaaatgggagcggaagaaggtgagcagcggccttgactcgccccacctgggctcagggcccggggtccactcatgttgctgacttcagcttctttccttttgcctgtttggttgcagttcatgggaacagagctgaatggaaagaccctgggaattcttggcctgggcaggattgggagagaggtagctacccggatgcagtcctttgggatgaaggtaagatgttgctggaaccctgtgatgtgggactttctgcagcaattttgggaaaggcagcatgtctgggcagaagccagaagctttgttctaggagggtctgaccctctcttggagcccccatctaaataagtgttaaagtcaaggagggagagaacactggcctgctgatctggactcaaaagctggaaatacttggtgggggtcctttagctctctggtgagtgaatagccctgagtcccagtgaaccaggtgttgatggctcttttgagactttggttcctgtcttcttagtttaaaagaatttaaacaagagacacggtgcagcattgaggagtttattgcaaaggaaaaagaatattttgaaagttaagtgcagagtagacagtacacctcgggagagagagaattcagggtgggctgctcataagagtgaggcagtgttggccgg

SEQ ID NO: 55844 - DNA, 1012 bp, Homo sapiens
ccctcctgcctccactccccatcttatttatttaagtcagccagatatctttcctaagcctctgcactgagaagggccaggtgtattcttgatccctggactcctgagagaggcagatgtagcccagcaggatcattgatcatgtaaacaaaccacagccttgccctctgtgcagggatggtgggatgccataagccacaaagagcactccctcctccatcctcttttgtaagggatcaagggtcaaggtttagtccatggagaattttgatataaaaggcagaggtcaggagttaagtaaaactaagagcactcatagccaaataggtgagcatttcattgatgaagcagtaactgggagacaggctccagaccagtggccgttccaaggctcctgcccccttccccagggggtcctcttccccatgactccccttccccaggcttccttctccgtggcaccactacacatcaatattcctggcaatattcttcatcatggagacttcggcagcgacttcaaccagatgaaaagccccacctcattcctgaatgattgaggtgctaggtaagcttgtctgtccatctggcactgcccaactctctaccctgggatgcttccaagaggtgcatgggtacctgggaccttgagcatcagtgtcaggaaatggctgacacctctcgtgcatgtgtttgattgaaagagatgtctacggcctgctcatttcagtgttaatctgtgcctcagagcaggtcacccactgaatgttttattcccattcccagcatggtgtggagggtgccagtgccttcactttgcatttcttctgtccagatgtctctggagggtcattcttaactgtcttgcttccagaacatgctctttgtaaacccctgaaacatggcttggatcattccgtctcccacctcagcccctccggagctgcctggacctcatcattccggagagtctaagtggcctcttctcgtgctcagctgcttacctcaacca

SEQ ID NO: 55845 - DNA, 3261 bp, Homo sapiens
ccatgagaagattctacactagcgtcctgttgggaattatgccctggaattctgcctgaattgacctacgcatctcctcctccttggacattcttttgtcttcatttggtgcttttggttttgcacctctccgtgattgtagccctaccagcatgttatagggcaagacctttgtgcttttgatcattctggcccatgaaagcaactttggtctcctttcccctcctgtcttcccggtatcccttggagtctcacaaggtttactttggtatggttctcagcacaaacctttcaagtatgttgtttctttggaaaatggacatactgtattgtgttctcctgcatatatcattcctggagagagaaggggagaagaatacttttcttcaacaaattttgggggcaggagatcccttcaagaggctgcaccttaatttttcttgtctgtgtgcaggtcttcatataaactttaccaggaagaagggtgtgagtttgttgtttttctgtgtatgggcctggtcagtgtaaagttttatccttgatagtctagttactatgaccctccccacttttttaaaaccagaaaaaggtttggaatgttggaatgaccaagagacaagttaactcgtgcaagagccagttacccacccacaggtccccctacttcctgccaagcattccattgactgcctgtatggaacacatttgtcccagatctgagcattctaggcctgtttcactcactcacccagcatatgaaactagtcttaactgttgagcctttcctttcatatccacagaagacactgtctcaaatgttgtacccttgccatttaggactgaactttccttagcccaagggacccagtgacagttgtcttccgtttgtcagatgatcagtctctactgattatcttgctgcttaaaggcctgctcaccaatctttctttcacaccgtgtggtccgtgttactggtatacccagtatgttctcactgaagacatggactttatatgttcaagtgcaggaattggaaagttggacttgttttctatgatccaaaacagccctataagaaggttggaaaaggaggaactatatagcagcctttgctattttctgctaccatttcttttcctctgaagcggccatgacattccctttggcaactaacgtagaaactcaacagaacattttcctttcctagagtcaccttttagatgataatggacaactatagacttgctcattgttcagactgattgcccctcacctgaatccactctctgtattcatgctcttggcaatttctttgactttcttttaagggcagaagcattttagttaattgtagataaagaatagttttcttcctcttctccttgggccagttaataattggtccatggctacactgcaacttccgtccagtgctgtgatgcccatgacacctgcaaaataagttctgcctgggcattttgtagatattaacaggtgaattcccgactcttttggtttgaatgacagttctcattccttctatggctgcaagtatgcatcagtgcttcccacttacctgatttgtctgtcggtggccccatatggaaaccctgcgtgtctgttggcataatagtttacaaatggttttttcagtcctatccaaatttattgaaccaacaaaaataattacttctgccctgagataagcagattaagtttgttcattctctgctttattctctccatgtggcaacattctgtcagcctctttcatagtgtgcaaacattttatcattctaaatggtgactctctgcccttggacccatttattattcacagatggggagaacctatctgcatggacctctgtggaccacagcgtacctgcccctttctgccctcctgctccagccccacttctgaaagtatcagctactgatccagccactggatattttatatcctcccttttccttaagcacaatgtcagaccaaattgcttgtttctttttcttggactactttaatttggatcctttgggtttggagaaagggaatgtgaaagctgtcattacagacaacaggtttcagtgatgaggaggacaacactgcctttcaaactttttactgatctcttagattttaagaactcttgaattgtgtggtatctaataaaagggaaggtaagatggataatcactttctcatttgggttctgaattggagactcagtttttatgagacacatcttttatgccatgtatagatcctcccctgctatttttggtttatttttattgttataaatgctttctttctttgactcctcttctgcctgcctttggggataggtttttttgtttgtttatttgcttcctctgttttgttttaagcatcattttcttatgtgaggtggggaagggaaaggtatgagggaaagagagtctgagaattaaaatattttagtataagcaattggctgtgatgctcaaatccattgcatcctcttattgaatttgccaatttgtaatttttgcataataaagaaccaaaggtgtaatgttttgttgagaggtggtttagggattttggccctaaccaatacattgaatgtatgatgactatttgggaggacacatttatgtacccagaggcccccactaataagtggtactatggttacttccttgtgtacatttctcttaaaagtgatattatatctgtttgtatgagaaacccagtaaccaataaaatgaccgcatattcctgactaaacgtagtaaggaaaatgcacactttgtttttacttttccgtttcattctaaaggtagttaagatgaaatttatatgaaagcatttttatcacaaaataaaaaaggtttgccaagctcagtggtgttgtattttttattttccaatactgcatccatggcctggcagtgttacctcatgatgtcataatttgctgagagagcaaattttcttttctttctgaatcccacaaagcctagcaccaaacttctttttttcttcctttaattagatcataaataaatgatcctggggaaaaagcatctgtcaaataggaaacatcacaaaactgagcactcttctgtgcactagccatagctggtgacaaacagatggttgctcagggacaaggtgccttccaatggaaatgcgaagtagttgctatagcaagaattgggaactgggatataagtcataatattaattatgctgttatgtaaatgattggt

SEQ ID NO: 55846 - DNA, 1021 bp, Homo sapiens
aaggtccaactgtctgagagttcagtaactttatcccctgttgattccctagaatctcctcacacgtatgtttccgacaccacatcctctccaatgattacatcccctgggatcttacaggcctcacccaaccctatgttggccactgccgcccctcctgccccagtccatgcccagcatgcactatctttttctaaccttcatgaaatgcagcctttggcacatggggccagcactgtgcttccctcagtgagccagttgctatcccaccaccacattgtgtctccaggcagtggcagtgctggaagcttgagtaggctccatccagtcccagtcccagcagattggatgaaccgcatggaggtgaatgagacccagtacaatgagatgtttggtatggtcctggctccagctgagggcacccatcctggcatagctccccagagcaggccacctgaagggaagcacataaccacccctcgggagcccttgccccccattgtgactttccagctcatccctaaaggcagtattgcccaaccagcgggggctccccagcctcagtccacctgccctccagctgttgcgggccccctgcccaccatgtaccagattccagaaatggcccgtttgcccagtgtggctttccccactgccatgatgccccagcaggacgggcaggtagctcagaccattctcccagcctatcatcctttcccagcctctgtgggcaagtaccccacacccccttcacagcacagttatgcttcctcaaatgctgctgagcgaacacccagtcacagtggtcacctccagggtgagcatccctacctgacaccatccccagagtctcctgaccagtggtcaagttcatcaccccactctgcttctgactggtcagatgtgaccaccagccctacccctgggggtgctggaggaggtcagcggggacctgggacacacatgtctgagccaccacacaacaacatgcaggtttatgcgtgagagagtccacctccag

SEQ ID NO: 55847 - DNA, 1037 bp, Homo sapiens
gtgctatgttgagtacaaggaaacaaccttgaacaaggcttattttcccttcttgagaagcttacagccttgtggtggagatggccatgtagtgctgtgtaagcatttaacacatgatcagttaagcagaggtaagcagagtatgctttttagggccaacaagaagaattaaagtttactttctagtggagggtaggaaaagtgagaattgggtgctctggagatctaaaggctaaagcctagagtttgggattgggggagggagttgtctagatgatgcaggaaaggtaagcaggagccacatcacgagagcagtgggaagccaaggctgaggtaatcctctggaggggtggaggagtaggaagagagaaaacaatgggagataagcagcggtggtggaggctctggacaccttctgattagcagtttctggtggtggccagattgatagggagcattgttttcacctttcaggctgaagatgaggccttactctcagaagaagatgaccccattgatcgacggccatggacacagcagcaccttgaagctgcagacatccgtaggacaccatcgctggctctcacccctcctcaggcagagcaggaggtggatgtgttagatgtgaatgtccgtggcccaggtcagcaccgggcctcttcccctcttcactgggctgtgtctgcccatggttccacattgttgtccctgtgtttgccctgtccagtcataaaccccttcccaatttcacagactctaaatcagctcgaggaaatgaatgcttaaggaatgtagccacaaagaaattatcagctcagaaagggaaggatttcacattgcttcatgtacagtgtgttgagactaaacaggctgataaaatgggttagattgtagtgggatagaaaaataatatcccaaagcagaggatagttagtatcttatgcatgtattaattgttctattaatattagatatttttaaatgtccaattaaaataacagcacttaaacttgaacagaaaaacgtgtttagagaag

SEQ ID NO: 55848 - DNA, 1034 bp, Homo sapiens
ggaaaataaggactaaaaacacacagggatgtatgtttagagtagcaccaagtaccactgagtaggtatgaaagagtggaagaagaccactgaaaccttcgggaggaaagcacagcttctcactttgtcatgcattgcctcagccagaaggctttggtcagccagactaaggaaggtgggacatcctctatgtgggaattagtgtttaagatctcaagggacagtattctaattcctgagatatgtcttaaggcagcatcccagaggtggggacctgatgctgaaggggaggaagggaggctcctgtcaccctttatgacatgttctgcctgacctgcactcttctgttttacccccatctctcctcctccgcttctcccttggcatcccacagctctaaagtctttctggaaattgacaaccgccagtgtgttcaagactcagaccactgcttcaagaacacggatgcagcagcagctctcctggcctctcacgccatacaggggaccctgtcataccctcttgtgtctgtcgtcagtgagtggcactggtgtaaaggggaaaggtggcgggggaagagtgtcaattgggggaacaattttcattatgtagccctctattttttcaggactgttgaggtcaaagttgccctctaaatgaatctaatgctgacattgagaggttaatgttttattcagcactttccctgtctctgtggactttcaggtgaatccctgactccagaacgcactcagctcctctatctccttgctgttgctgttgtcatcattctgtttattattctgctgggggtaatcatggcaaaacgaaagcgtaagcatggctctctctggctgcctgaaggtttcactcttcgccgagatgcaagcaatcacaagcgtcgtgagccagtgggacaggatgctgtggggctgaagtaagaggcattgccaataagccactattcacagtataagtagggatgactagaaaagcatatcttgttgaatcatgattttaaattctaagctctg

SEQ ID NO: 55849 - DNA, 1044 bp, Homo sapiens
gtcgtatgtgctgcctgcattgactaaaatgtcattatgcggttgcataactgtatttattgttatgttcttttttggactgtttttatattttggattatactttggaaaaattactgagcctctcttgagctccagtttccttctctttgagatgggacaaataataggacctacaccatagggtgctacttcactggattgtgtgggagagtacatgcggagccctagtatgttctttcctttacttgtacaactcaccaggatgacagctgtcatgaataaagagtgtgctttgccctgcccaactacaaggtcccactaccagttgaggagtatactctgattcattgtgaaaatgccaacaagggtggttatcccttgctggaaagcaggttaaaaggattttcataattctgtacctcttctctttcctccaggcctactctgtgaagagaacattgatgactgtgcccggggtccccattgccttaatggtggtcagtgcatggataggattggaggctacagttgtcgctgcttgcctggctttgctggggagcgttgtgagggagacatcaacgagtgcctctccaacccctgcagctctgagggcagcctggactgtatacagctcaccaatgactacctgtgtgtttgccgtagtgcctttactggtgagaagctctctagcctcctggccactctgccttggaggatggttttagtgaacaaattgggccctgtgagttgtcccagacccaagtgaagcttttcttatataagaaaaacaacagcagcttaattttttaaagccagttttttcttagtctgtactttatggatgttatgatcagtgtctacctttaatttttcctaagagattcttttgttgtgcattgattatatcatgctatggcaggaatattttttacaatgtatattgaaagtagttgaacaaaataacattttttaatagtggcaaaatatccaaaacctaaaatttactatctgaatcattttaaagtgtacagtgtacagttc

SEQ ID NO: 55850 - DNA, 1042 bp, Homo sapiens
atttttagtgcacacttttactttttaatcaagttgaatttatcacttttaaaatggcttctggattttgagttgtagttagcaacatcatatacacttgaagatcgtaaagaaattctcccatattttcttcaagtacttttgccatatgactactcatttgttaatacacaatttattgaatattttgttttttatatatataatgatttgagatggcacctttgccagattctaaattcccatgtgtatttttggtgttcttctggattttctttattttctgtgttattctattaattcaccaataacgttctatttcaattattaaggatcttcttcttcatagttttcctggttattttttttcacataattttataatcagcttgtctgttaataaattcctgttgataatttttagtggggtctcattaaatttatgaattatagtatagagaaaactgataactttatgatgaggagtcttgctaaccaaatcctggtatgtctttccatttattcaagtctcttttgtgtctgttaggacagtattaaagttgtcttcatttaggtgtaacacatttcttgtgaagattgttcctaggtattttatctttggtaatttggtaattgcttttgaaaattgggccttactttacatttaaaaaaaaaaatcttgcttttgttagtgtatgctacaatgcaagtggcaggaatacatacagaactgttttcttttgtaccttttttttttttttttttaagacagagtcttgctctgttgcccaggctggagtgcagtagcgcaatctcggcttactgcaagctccacctcccaggttcatgccattctcctgcctcagcctcccgagtagctgggactacaagcgcccgccaccatgcctggctaattttttttttgtattttttagtggagacggggtttcaccatgttagccaggatggtctcgatctcctgacctcgtgatccacctgccttggcctcccagagtgctgggattacaggcttgagccactg

SEQ ID NO: 55851 - DNA, 1049 bp, Homo sapiens
ctaaacctggagatcaataattgcatgtctgtactaccatccacatatgccttttgaccgagtcatagggtcctcatcacatacggaggaatgtgtattttaaagatgaggaaacctgtacccaggaggaacaaaaggtttgcacacaagtcaaatctgaaacatccttcattgtattcagtccttgccttccctttaaagtgcctttttcaactgaaagaggagtaggtaaatgccagtaagctgcaggttttctgtccctgcatagaatgattagcagagagtgtgatggttccagagaaaacatacaaaagctaaattaggaggtgggagacagtcacagaaatgttccagatctcactagctctcatggtctgtttccagtaatggtccaatatttcttgtcctttttgtttcctcatggcagtgtgtcccaggctatcagggtgtcaactgtgagtatgaagtggatgagtgccagaatcagccctgccagaatggaggcacctgtattgaccttgtgaaccatttcaagtgctcttgcccaccaggcactcggggtatgaaatcatccttatccattttccatccagggcattgtcttaagttataaatccattcttagtgttcaggggattttataaaattaaagataggaagactagcttcattccaagcatttagttctacatcctagtaattcaagccattttattctcccatctcttgctagctctgatgttgtggtttatgttgtcagttttatctggttgtttggcatcttgatattccatgaaacacagaatatggaagggatacaacattagcataacattaaaaaattagcctggtcagtaagatttcttgttgcttcacagaaaagcaactaatggcctctaaaataaacaatttacatttacctgcttttgtatttttttaattagccaagtcttacctctataaggtgggggaatgaatgaaatgaaaatatctgcctattttcatagcttcaggggaggatactgatggtgtaaggttctaccttagga

SEQ ID NO: 55852 - DNA, 1053 bp, Homo sapiens
ttcagaccctggtgaatctctgcagtcggtctccatgtaaaaacaaaggtacttgcgttcagaaaaaagcagagtcccagtgcctatgtccatctggatgggctggtgcctattgtgacgtgcccaatgtctcttgtgacatagcagcctccaggagaggtaagctttgctcccttgggctcaggtcattcactgcagtattgactgtccagtggcatttagagaaggtatcatttttttgtggaataagagggaagggcagatagtagtgggtgggcagggctctggggaaagggctcaagacagaaggtgtaagggtagaggaataggttcagagattcggagaagaatgtatttgaaatgaaactaaggtatattccactttcagggtttatttttaatatgcatctggtactgagggttgtgaagaactggctaagaataagattggatgtgtcagccagtttagatttacttgctcattggttgatttgaaccccatgtgtcacatgttcttctatgacatttctccctcactgggtttcccaggtgtgcttgttgaacacttgtgccagcactcaggtgtctgcatcaatgctggcaacacgcattactgtcagtgccccctgggctatactgggagctactgtgaggagcaactcgatgagtgtgcgtccaacccctgccagcacggggcaacatgcagtgacttcattggtggatacagatgcgaggtgaggacactgagcaagcagaggtcatggacctcccaggagattgtacaactgtttgagcactgatatattgaatttagctgcttgtatcttatattgatagtttatagatttttaccaatccccgtcataatgtttaccactgtttctttcagcctctctgtgcaataagttaacaggtccctagtatgatatttttataggcgtctggaaccatcccagctccttaggcttgcttttaggattcagagccaagagtcactaccagagtgcattttacaggcccacccaacatagcagtccacacttccctgaatag

SEQ ID NO: 55853 - DNA, 1050 bp, Homo sapiens
agccctgcatgaaccatggtctctgccataacacccagggcagctacatgtgtgaatgtccaccaggcttcagtggtatggactgtgaggaggacattgatgactgccttgccagtgagtatgccagtcagctcttaagcccccagaggagaggaaaacacacagggagcagaggagagcccagtggaggctgccgcctttcacgcctgacattgggcataccggtcatttatccagcatatttaacagtagtgttttaactctttcttttgaagctagtgtccttgggaattgaggcagtggaatatattttaagcattccctttaatttgtgaacattgaaaatgtgaggacaatgctatgatagtgttttttaaaaaacagatttattgaggtataattaaggtacattaaactgcaaatattttcagtgtacaatttggcacattttgacatatagtaagtgaaactatcacccaaaataataaacatatttgtcaccctaaaactatcttcatcccattgcaatttaaccttctctctttcttgcctgtggagtcacagttttaccttctgtcactatagattattagttggcagattttatcattttatataaatgcagttagataagcataagtcaggagaggttctgacttgttttaatgaacatagtatttgagatccgtccatgttgtttatatcaatagtacattctagtttattgttctgcagtattccattgtatggacatattacagttcattggttgatggccatttgggtgttttccaatttggggatattacaaatgaagttgctatgaatgagtctttgtgtggacatatggttttagttctcttgagtaaatacctaggagtagaatcggtgaatcatgtcgtaagtgtatgtttcactttttaagaaattgccagaatgttttccaaggtggttgtactattttcattctcaccagaattgtatgaaagttctgtttgaaccatatgctcacaaactcttggtgatatcatttaaatttagctcttctag

SEQ ID NO: 55854 - DNA, 1050 bp, Homo sapiens
tggcatgcacctgtggttctagctactcaggaggctgaggtgggaggattgctgagcccgagaggtcgaggctgcagtgagccatgattacacaactgcactccagcctgaatgacaagagtgagaccccctgtctcaaaaataaataaataataaatagatcctgcaacaagcttttgaaccaagaacttcattattgagaagttatttgtagttggaggggcattaggctttcagatcattagaatagactgtttttccattcatcttttcaactaattgctgtcatttactgactgtatttcagggacatggggctgaaatgaatgaacaggtatttcagtggcctgaagaaatgaatgcaatttctgatgtgttcagtttttacccctaaagagaattggttagaaattgatgaggctgtcagaaagttttactgtttttggttttttccttttgtctacaggctataactgccaggtgaatattgatgaatgtgcctcaaatccatgcctgaaccaaggaacctgctttgatgacataagtggctacacttgccactgtgtgctgccatacacaggtgggtcctggaggtaccagcagggaccagaggggatacttgaccttgctttgtcagtgcctgagtctcagtgcccaggtctgtggggctgtaatgctcctccgagggctcactcctcagttgtccttcctgcctttactgactggatcttgagctttgaggaaacattgtggcctcctaagatgcaagtggtggacagtcatttgcctacattgtactttagtatttgaaagaaatttttttttaattgtatgtggctggaaccaggcacatagatgatggttgtctatcatttgaatgtttccaggacattagctatttgtcttagtttcaataatacagctaccacttattggtaatttactatgtgccagacactttttgtactttggattatttaatgtattcctcaataattctacaatgtagaagttcctattgccattttacacatgaggaggctgaggcaa

SEQ ID NO: 55855 - DNA, 1486 bp, Homo sapiens
tagtgaggactgtgagttcccagaaggcagagacctcgtttaatcatctttatagcaagtgtctaaagcaatgtctggcacgtaggaaacgcttagtgaatgttgctgaatgaacgaatgaatgggactcaaatatagcgcttttgctagctaatgccagactctgaagtgtggactataccatgttttcatttattaaacaccaatttattgagtgcctaagtcagaagaaacactgggtaacttctcattttagttacctagcccaaaaaatttcttggccttccactggactttcctcatgctcagtggaaactccttgagggtaggaccttcctgatggaacagctgtcaatcaacatagtggactgcatttaatgctttcagataaagatggcttgaaaatttattctgcaaagaataaatttaaaagcaaataaagaaaacttgggaggagtggcttctgaggagacgcttccaagaaaagaccaaaaatgaagaaacctttttcctgttatccttcactatattacgggccgaggctaactgtgtggttgaagagctctggttcatattttggtgccactgacaaacagctcaaagaatcagtggttgaggccaaggaaatagtatttaaaaataagctattaataaaacacttaagaggaaaacagcagccacttccagattatgggtttttaccacaagaaccaccaatgatggtttagagagcaatggagggtgaaaaaatgtgaatactcatacttcataggagtgggtatctgtttcatttggaatgtcctattctaaatacaggattgctctttcttaaatgagaaaaatgcatgttttcaaaatcagaatcagaacattgtgttctttgaaatatataaattcatagcagttgcttgatgccactcatttatagaattataggtaattttaacatttcatatcattttggaatatatagttaaatctcagttactcaaaatgtaacaaatggaaacacttgtataactgacccgtattactttattcagcctaagaaatatcaaggttatagcagacatctttttaaagagcaatcttggctatgtcttggaggagcaacatattcacttcaatttcacttactcccagtatccacattgtatgatgatgataagtaataattgtctagaacagaatttctcaaaatctagtttttacaccacctacatttaaaaaaatatggtttgctagattctattcatcacaatctatggtgatagggcctaggaatctccacttaaaataacaacttaaagtgatgattttgcacattaaagtttaagaaccataggtctgcagtgacagactgcattattttctctaatatcagaagacaacaaaattatactttgagactctacttcctgaggtcaaaaaaaatggattaatagactctaagaatgaaaacaaaataacctttctttacaatcaa

SEQ ID NO: 55856 - DNA, 1001 bp, Homo sapiens
ctcagatgagccactttctttctttttgcaaatagttaatgcttgtcagagaatccagattttgtcttcccctggccagattcttcttgtagaggataagtttcaaagagattaaaaacctttagctcaggtttaaaagtggggggaggactcctggagtcttttagggaaagatataatgtttgtctatttacacctcgaagaaaggaaatcttacttgtctctttttcttttaaattctcataacaggttcattcattttattcaaccagtatttatttaaaactactatatatgcatactactctcagaggagttgagagaagtaaaataaagctctcttacctccaaagtcagaattggggacataagatacatgaaatcattaacctgtatattggacttgggaagaaagaaatacaaagataaatatataaaggaaaaatattttgagctgttatacctgaagcctagtaagaaatgaaggtgcagttaaagcatctctgcaatgaaattattgatcagttgcgaaggtatttcaattctaaaatttgatttggaaatctttattttaagcacctctctccaggcatactttctaaatcaatgcagatcgtcgttttctactgctcaagacctgcagtattaattgaccacacatcgaatgtgtagagtaaatggatgtagctacacttgtgttctggtgtggaatatctgccttggtctttgagaatccttgataaaattctttccaaaggtttcactggtgtgttgtgtgaggagaacattgacaactgtgaccccgatccttgccaccatggtcagtgtcaggatggtattgattcctacacctgcatctgcaatcccgggtacatgggcgccatctgcagtgaccagattgatgaatgttacagcagcccttgcctgaacgatggtcgctgcattgacctggtcaatggctaccagtgcaactgccagccaggcacgtcaggtaagcccac

SEQ ID NO: 55857 - DNA, 1064 bp, Homo sapiens
tcttgaaggccctctgtgagactgttatttttagacatttcacccatgagttcagaaacagacaacacatgccaatttttccaagattctctgtctctccttttttttcctcaagctatttttgaagatatgccaaattgtcctccatagattgcatcttaccccattgtatcttcagagagaaggtttctgttgcctctgaagctacagttacttgtttgaggttccacctataaatttcacttcctacatccttcatttagaagtgaagtctgtctgtgaagaagcaatggtagagacacaccacaagtgcctctgattccctgagtgtcacctggttattccagttacctgttggggagaataataaagcataggcttattgacccattggtataagccctgctagtaacctaacatcattctcatggtaaagggagacacaagataatcctttgactcatgttaccactgtccctttttgaggtttcactgggccagtttgccagattgatattgatgactgttccagtactccgtgtctgaatggggcaaagtgtatcgatcacccgaatggctatgaatgccagtgtgccacaggtaagattcttctcacttttcatctccttggtaggtccatctgaacaaaatagggtgattgtccctgtcctctgctagctgctgtgccaggccagtccactcccagaggctcctctgtgtttaggaagagctgtttctaacaaattttttgctgctctctttttctgcagcacctgcctcctccaccacaacagtggtctggcccagatatttccatttggtatccatgtctttctgggacagattttggcagcagtaagtttccagctggctagattgactcatttaggaaagagaagaaatccagttgaaagctatttttcactggggcttctcagcaggaggcctggctctgtgtttcttgaagcaagtgactgaaagaaggcccagaaatttaaaggctgaatgtgtacaagtgcaggggtattctgcataaaagacaccaaaataggattgagagtcaa

SEQ ID NO: 55858 - DNA, 1015 bp, Homo sapiens
ttgtttatctaaaattcaactggacatcctctattttatttgctaaatctggcacactatctggaagatagctccactttcctgtctccgtcttcttatcttctggcctgtagatgtctctgtcctggaggagaggtctagctgagagctcagggtcagagtctagggttgcatctaggtgctttgctggtggccaagcatgtccccaaggtagggtcaggcaaagcagaagttgcgtataaatctccatgttggattctgaggaactgatcatgaggttttccctcctgggtgaaagagaaagctcttccccaagtgagagacattttctcttagttgtcctttgccccaccctgtgacaggtctcctgtgtcatctggatgatgcatgcatcagcaatccttgccacaagggggcactgtgtgacaccaaccccctaaatgggcaatatatttgcacctgcccacaaggctacaaaggggctgactgcacagaagatgtggatgaatgtgccatgggtgagtaagcagaactttttctgttctgtgaagtgtctgttgagctcagcaaatgtttaaactgaagcacattttactgtagaagcaaattacatacacccaaacctcagattactcttgctacatggccagtgtttacaagtgacctttcagcatagccataaccatatattccattctggggattaactgtatgaaacgtatgtacttgattcttaatataaagccctacctcaatgacagtttgggcagaaactgcaatagcagaaatgcataacagttgaggatactccgcttttatttctttttaaattaaggaaaaaaaaatagaaaattgggaatgatattattgaaggcctggccctgatgctataaccatcagatgctcttctattgttcacatttgtggaaactcaactgctttgatcccagtaattggtacttgtgtctttcagccaatagcaatccttgtgagcatgcaggaaaatgtgtgaaca

SEQ ID NO: 55859 - DNA, 1009 bp, Homo sapiens
ggttccttctcattattttttcttactcatttttatactcttctctccttgctcttcttacttatatgttcattgacccagggattagttaactcgagggtcctacaggttttaccttctctttgataagttggctaaaccctaatgttgttagagtttctaacggtagtaactattcatcttgaaacgatttgcctggaaaaaatatcatttagatggctcaaattggccttaaaattcatgtgaagacccagccttctggagctctgcttgccttaatttcagacaggtcacatgaagatgaagagtgtggggggctggtatggtactagtcctttgagactcaagagccctaatcaaaagtaatttccccctaaaaggacagttctgcacagaggatgtggatgaatgcctgctgcagcccaatgcctgtcaaaatgggggcacctgtgccaaccgcaatggaggctatggctgtgtatgtgtcaacggctggagtggagatgactgcagtgagaacattgatgattgtgccttcgcctcctgtactccaggctccacctgcatcgaccgtgtggcctccttctcttgcatgtgcccagaggggaaggcaggtaggtagcagaaggacggatctagaaacagggaaggggcagggggcattcaggactctgccttctctttcatcccaaacagcatattctttgagttaccatctatgggaacatatcactcaggactgttccagaaatgtaacctgctagccaaagtgctatgaagataatcttcctctttaggactttaggctctcttctcaactctacatactttagtttttcattccaaaaaaggaaagttagtaactattgtctttggaacatctgctgaagtccttaagatcttagactgaaaagcacctcagctattaagataaaatggctaataaatggatccacaggcttcattttaagaagaaaccatctatttactcagaagaagttggcaggag

SEQ ID NO: 55860 - DNA, 1088 bp, Homo sapiens
ttcactccctcatccctcactcactctttctgtattaatactttgggatgcagttgacacagcctcgtttcaaattagaaagacctgttgcaagaggcatctctcagaatggctatgccactgagtaggcttactagtagttgggcttcagtagcaattggaaccaacaacttgaatgccaccatgtttttttctctttgtgcacatcttttctatttttctttttttgagacagggtcttgctctattgtccagactggggtgcagtggcatgatcatggcacaagtgattctcctacttcagcctcccaagtagtgcctgcaggctggtctctaacttgtgggctccagtgatcttcctgtttggcctcccaaaatgttgggtttacaggtgtgagccactgtgcctggctctctgtgcacttctgattcacccatatcactttctctgcagaccagcctcctcatctttttggtctatgtggcaaagtggtcctactccaataatttgggagagatacagtgatgtagcttggatcagatgcccatcttgggtcagtcagccatggccaggagggtttgatcatgtaaagacatggttgctccttcaagaattatatggctggagttaggagaagagcatggaagggttatgccgagcacggagttccggagacatccacatacccatcctgccatcctaggcagttggctcttgctgggaatacaaaagaacccctctaaactgcagccaagtagtgggagacagatgtgcaaccaaataagtgtgatagagtgatattggttctatagtaatggaggtacatgttagataggaataaagaacaggcagtcagttaggttaagtcagacacaactagcatccgcgagtaatgatggctaacaggccttctacagatacatgagccagtcaaattgctaggtattctgggtctagagatagccttggcattttccaagcacaaatattgtgttctttttttattaggaggcctctttatcagagtgccttttaaaattatttgttgagttttatttacaaaggaagaatgaaggacaccttgaca

SEQ ID NO: 55861 - DNA, 1037 bp, Homo sapiens
atacattccaggatggattgaatggaatgatgcaatggtggagaatcatgaggagatgtgcatttggagacctactctattgataagacaggtacctcgccatgtgaataagcagggaaaaaatgtttcaggtggacagagcagcttatgcagcagcactgaggcaggagagaacttaatgtttgaggaatcaacaaaagttattgtggttagtataaactgtacaaaggagaggtgtagatttgagtatatttacgaggcaaaagtgatcaaccagaaaattgtcagtagttacaggtggcactcagtgtttaaggtatcagccaaggatatgctagtttgacatttcatttcagattattccagagtcattgtggcattagagagggtagtttttaaaaacaagttatcttctttctcttttgcccataggaaataagagcctaactagtccactgcctcagtcctgatgttaaaaaaatgacagtagcctgcaatatctggcaggtggaaattactgagagggataattattgctcttgaaaacttgcctaactgagctttgtgcaacattttgggagttcaccagcaaagtttgtgtgttgacacaggtgatgatacatgctgacacttgtttgtattgaagatttagtagcttggtaggacatggaaacaatacagctctcctgtttcaccaaaggcttttatttgctaggtagcctataacttagtgctctctcctgctttccctactaacataaagtcatttgcttttaatcccttctatgttctattggccaacttaccttcaaacacagtatcgatcatgtctttcctcatcctcctttacttgttgtatcaagttccgaattcatactcgaagtcaaagcctcaatgacctcccactttttcttcttctaaaaccccagccaaagaatacactgcagttattttaatatgtttaagacttaatcctgtattcctctgtaaatcttcaaccaccagcccaggctggtgctttcttgcaccagtgggat

SEQ ID NO: 55862 - DNA, 1319 bp, Homo sapiens
gacatttgagttgcttctactttttgagtattatcaataattctgttatgaacattcttgtataattttttggtagacatttatcttcatatttcttggatatatacctaggagcagaattgctgcgtcagatggtaatgctgtttaaccttttcaggaactgtcagactgttctgaagtgggtacattattttacattccaaccagcagtgtatgagaattccagtttctccacatcctcatcaacagttgttattgtctgtcttttttattatattcgtctgtaatgtgaagtgtttatctcattgtggttttgatttacatttccctgatggttgatgattttcaacatcttttcatatacttattagtcattatgtatcttctttggagaatgtctgttcagatcctttacctactttataattggtttatctttttaatattgaactgtaatagtttttaaaaaatatatcctaaatacaagtctcttatcagataatatgatttgcagatattttctgtcattctatatactgtcttttcacattcttgatgatatacttttcagcccaaatgtttttaacttgatggaatacaatttattttttcttttgttgcttgtgctttcagtcatatttgtgaaaactttgcttatcccacattacaaagatttactatttctaagtgatttataattttaccacctacctttaggtctccgatccattttgagttaatttttatgtgcgaggagggagtctaacttgattcttttacatgtggatatttagttgtcccaggaccatttgttgaattaagtgctgtttttatctaattcgtttaatctttacaataaccatttaaggtgggtcctgttaattccccaagaaagtttaagtatattgcccatattcactcagctattgcatggcaatgctgagagttgagcctagacagtttggccccagaagccatgcttttagctatgaaataactgtcttacctacctcccttcttacctacctatctacctattgacagggaaaaagtacctcaacaatagtcaatcagttataaaaagaaaacactttatttcttttctgttgtggttctgctgaaatgcttctgctttcttgtctgtggttggtgaattcagttagttgtaacattggctaatataaagttagagtcacagtttctattccttatagttgagctacaagggcttcgctacctccctgacaccctagtcaactgtatttagtcttactcatcagagagatcgagttaggggaggatgatcattgaccttctac

SEQ ID NO: 55863 - DNA, 1021 bp, Homo sapiens
aaaagggaagtgagaattttgtgtggggtgggttgctagtgagggaggagttttatgggcccactgtggtccataaactgagcaggggataatttagcatgtcagggtttatgatgatgagtggctagaaaattgtttattgtcccttttgtagaaacagtgagaaataagaggaacagagctctgggaaagggacaggcaagtctggaatggaaaagaacacgatgagaattagacactggaaaatatgtatgtgtggttaataaagtgctttaaactgaattgacattaacagtaggtgatcaactttcctatgtgcttgtgcttttgcttttgatggagtaattcattgttttcttatccacctaaatgcacccagctgcccttgattttctctgggctactggccttcacaaccctctcccatgtaccctctctgactttggggtaaccctcccctaacttaaagctagagaattctgaaactgaggaggggatcctctgttaatcagtgagcactttttgatgagctgatagatgatatatgagagactatgcgtggcacaatactttgttacactcttcactgatacaagtgttctagagtgcacacacaacccaaagatagaaacaaaaagaggagcagtgtcggggagcttggggcctggtgttccatggagagggagaaaggaacaagcctggccaattcattcaactccttataaaaatgatgaggaggctgaaaaccaagaattttgattgggaacagaatacaagcagctggagcagatgaattactaagcaacaaagatcctgtttttatacaaatatccttagtacaaaaacaaaagaaggaaaactgtaggggggagtaatgtgctaagtaagcagaattgcctcaaaaagaagttgttctagttactctttcagagtgggaatcttagattctggtattgtggatatggttcacatataatgggattgtgtgttttattttggagagattaaaggtcataggttg

SEQ ID NO: 55864 - DNA, 1029 bp, Homo sapiens
tgagagaagggggggttgagagtagagtgggaatggcaagaagtagtatgacagagcttcttctctttttttcccctctttaccaggaagttaactagaagtcctcatgcatgtttttaaaacaaagttggtaattagcataacctagttagttacctttacacagagtgacagaattaaaaagttgacaagcccatcagacctcagccaggaggtactgaaaggagggagaccagtgagtttagaccaataggtgggttaggcctcctgaatgccagcctagaagtttagacttgattctataggctctggggtacctacaagtttgtagtcggagccttgggaattgaatgttacataggaactttcactggttccagctagccttggctgttagcaattatttttatctactttaacaggggggacagagtaggggggcaggaaactaagctggcattatggtcacaggaaagaacagactgatttggagcctttcaaactgcagacctttgttactgaccgatgcttaatttggtttctgggttttgttagttttttcccctgcccttacctcatttaccttaacgacagctcccccctctagagctcagctagggcaggctgccactgcggattggggggccaagaggcccagcgcaagaagaaagtgggttgaaagcagagttctgttcaaagaattttctgctggaaactagcccagagggagtaaagaggagctttaatgaggagcagctgcagtgccgacgcaacccacatgagactttttttccccttcgttccacattctgtatagtttttttaaaaatcatgattttgaaatagctgttttgtaaagcatgcctctctttttcttcttgtatgtggtgggattttgctttgttgttgttgttgtttttttttgaatggccaaatcctcgtttttaaaaaaaaaaaaaaaaaagctaaagacagagctgcagcaaagccctggatgcaatttggcctcaccctgctgatacagaacat

SEQ ID NO: 55865 - DNA, 1086 bp, Homo sapiens
ccccttaaagctagagattatgtttattcgtttatttatgtattccatttctccttttttctggatcctaattttgtgcctggtgcatactaggctctcaattttagtttgtcgaattactgttattgctgtttctgattacttcttgaagcggtctgttttaaaacttcacctgaaggctaagtaattcatcagtataatggtgatctattatttatctagcattttcctaaacactcattgatgaatccttataatactcatctgaagtatctaaatcccaagatgatgtgtcatgccatagatggtatggctttaatttttaattgggagatggagatgtaacagctggagatactaaaacacagagaaataagagcatcattcaagaccacaaacgtggttattgttggaagatagttttgggatgggcttctgtgctagaagccagaacataaaaaactgattaaaactctaaaaagaaacccagattaggtgggaatgaatgctgatctggattggattacacttctttggtgtctgagggttatgattagtgacttacttctaatgtgcatttgtttttatttttagcattgcagtgtcgagatggctatgaaccctgtgtaaatgaaggaatgtgtgttacctaccacaatggcacaggatactgcaagtaagtttttctcttcatatattttctttttgcgatagaacactggacaagatttgattctactcctctatttttaatgcttctgtggaatgttactggttcttgagctttcctggtacagattttggttgggggtgaggatggaaggatgtggatgccagataattggctaataagaacttcttactatcttactgttatctttctcactatgaaaaagacttttcagtgagtggctagttaatgtatatggggtagaccaggcatggtggctcatgctggtaatcccagcacttcaggaggctgtgttgggcgaatcacgaggtcaggagttcaagatcagcctggccaacatagtgaaaccctatctctactaaaaatacaaaaattagccaggtgtggtggcgcat

SEQ ID NO: 55866 - DNA, 1218 bp, Homo sapiens
cacctcccctgcttctggggtacacacacctaattttgcagaccactggtccagaatgtaaattgaagagtttaatgtctaagatatttgttcttttgtttgtagcttatcttttactccccacgtttcaaatatccctttgcaaaataatttttgagttaaaattttcaattaaaaaactgtatacttgaggtagaaaagataaagatagaagatatatgtgaattaggttgtatctctccttaagagggaatactgttttttatctaaggagaactaacaaccctccctttcattgtctgggttggtataagtaaaaatccttgtttgaagttattaagccttcccacccatatgatgattagtttggttcataagctagagttagggcttggtaaaggctcctttttttttttttttttaaagtctttccaccttaactagcaagtaagctagaaatgacagagcagtagaagggggaatctaccagagtgtcctacaggaccttgttgaatgctactgctgcatgcaagggttgtggatttggtgtgggccttctgcagtatcacccaaatttgagcagtacatgtaactaaaagtaagaaaaataaattagacagtttatttcatttcagactttggaagcccaggactgtggggattagctattagctaagacaatgattcactgagcaaatgcagtgaaagattcttttgttacactgatcatcatttgtggagagactctgaagaaggataaagctctggctgcatagtcaaaccagacctactactcaaggacatgcatactagatatgtaggtgtttccaaatatttttttcagttgtggcggtgcaaatcatttcaatagtagagtaactcagttcattactgttactggaaaaacaagtttaaccaagcacatatcctactgagggtgagtcaacagtgtcattttaacataagaaggacagtacatgaagtgagttattccaagtcctgtggttttcctacagctgagcaaagacagctgttctttcggaagtggggctctaaaaagaagttgcccatctcctttctttcttgattatagccttttagttttcttttggcctgagacatttcaaaaattcatttcctccttagatttctatcaccaaataccctgaattttgataatttatttatagagtatattatttattatagacttattat

SEQ ID NO: 55867 - DNA, 1038 bp, Homo sapiens
caaagtgactggcccaagtacctagagctgggtcagggttggggccagaatccaatctcttgacttttagtcaagtgatttttccactatgctcagtactcaaattatgtatcaatatgtcggcccttgttttttgaggtctgaaaagggttagtgccagtcaacaacagtagaggagtagaaagggtgttgggatgggagaggtgtggctatatttaaaatttcaatgacagcagtgaaaataatttgcctgtgaacctctgcctgtccctttggacttctttgtagtagttgagacaacccggcaggtctggtgtcattagtgattcagaattggattaacctggactggtggagttactttctcagaaaagggctttatattttaacatttgtttcccttgacagtttgcttcttctcaagttttggcagccttgaacaagggttgtcaggtttttattttgttttgttttaagaaaaaattccaaattttattttgccgatttagtaagttatcctctacctgccactcccttctgctccctctataattatttctaagactttatttttccattgtgggaacattatggaaggttttcttttacagtctgagatatttataattacgtgtaagcacacagtttatagaatatgtaaatggtccatatgttaacttaaatacccttaaaatattttccaataatttaaatctttccataaaagtagctgaagctgcttataataaaagagaagtatacacgaaggatagcagaatttggatgtagttaatatagataaatatgaatgtcactttggaggaactggaagtatttgcatgaatactgatcaagccatgcctccttgttaatagagtgaacaaaacagatgaatgtttctgttttcatgaagtttatgtgactatcagtagcttccatattctgagggtttattatgtgacagatgcttggggacaaaatactttacttgtttcctttagtccttaaaatagatgttaggattcttgtttacagaaa

SEQ ID NO: 55868 - DNA, 1723 bp, Homo sapiens
gaggcaggcacgttttaaaattgttgtttgcttctttttcatctctttttattttcatctttttttttgtgagaagattctgtaagtttttaagcttcaaatattttcaataatctattttaacgggtacctagcagggagaggttgttctattggtatacctaaccaacattcaaataagaataattgaatactgtttactcactaatctgttctgttgagtttctaagtatgaataatcacaaaactagatagtgctgatatatcaacttctctaaatggtaaatgtggtaagtagcaaagacatttttgtttaattctctccttacacatgctttggttcagacgctgtcaagacacattgaagtttgaggacatgtgtatttcgattattttattatatttttatttgctgtgaatatgggtttatttatttgctagatcttctttagttagaaacattaagggcatttactttattacaacatttaaagtgcattctaatcttcatgaggaattttaggtaaaagaccgtatcctgagattcatgcaagtctttggcattatgttactatttaaagtaagtaatatgtagtggcttctctgacatattctttctaagagagttaaggaaaatagttgtaactaaaaacaaacattgaaacagtttaaggtaggtttacgtagcaacagaattattcgttatgtttacagataattaactcgtatttatactttgctgattttctctggcacctttacaagatttttttatttttgtaaaataaaaagtaattatgtttgaaaaagtagttaaggatgtttgaagaatctagaaaagcataaataaaatgtccacaatcatgctgccattaattttttggtatacgtctttggtttttttacccttagatttagaaaagctgttgatttatttttatatatatatatatatatatttagtttatgaacagatctacatatatatatatgcacacacacataatatactattgtcaacactaggttttatttttaaaaatctttaccatttgataagtggtaaatattacttaatcttaatatgcctctctcattacagtgatattgaatgttttttcatatcatcagtggcgtttgtattgcctttttttctacttcttttggtaaattgtgtcttttactcatttaattattttcttactggtttgaaaaagctctttaaatattaagggtgttagtcttttgtcttaaatatgtcacaatatgtatggaaataattagcagtatataacataacatcaaattgctaccaatgttgatataaaaattgttcatttcataggttaatttttttaatcctttggtttctaatgatattggttaattcatttgttaactgctattttctgtagctacttgaaagttcttatctgactgtatcgtaaatcagcatgctttcagctgtatatgtctaggaaattgacatttactttaatacttaataaaaaaatatgttggagaaaagcagtgtattctggagtcaaatacatgattttgggtgggtgacgtaatcggctactgtcctccttttctagatagccaagatttttgaagcatttaacatccctgaaaggcaggactaatgctatgtctaccatgcactgctaattctgacactttgacctaatggataaatgccagtacagtgggtctagccagt

SEQ ID NO: 55869 - DNA, 1038 bp, Homo sapiens
taagtacatttttttttaccttcaggtgtgtgtatgaggtctttctaaatttaagaaatttccataacaaatgtaaccttagtcattccagtgtttaacgcttctgactcaaggaatttaaaaattgctaacgtaagagatatagaatataatgtcatttcttctatttatctgggtgcaatatgtctgcattgaccctttagaagggcttcatatatttagatgatataataaattctccacctctccttttcccttttcttctgttatctctttttccttaaatgtcattcatacatgttgttttttgaccctttatctatatacgtctgcaatgattttagagtaaaaaactgcaaggcgtgatttgaataaggatataagaaattttacatcattttctttatattgtgttcacagtccatagttacatgcttcctttcttgatgtctcagttcgaatgcctaaatttgaactattgattttccttccaccctttcctgattttcctgtttttgtttctccccctttctctgcaaatgacttgaaaccaaaaggtcttcttttctttctttgtcagcctaccgtatgtgtagtattttggacagatcactgaactaggagccagaagaccagaattcttctccaggtctgttattaattggtttggtgaccttgtaggagagccactgtttccgtcctccattttctgatgttcattgttcatggtcacagagccaattagagttgagactagaattcctttcttctggtgtccagtgcctcattcactgtcctcattgcttccatctcgtgtacaaatgcgcttatgtgcacaaaaactcttataacatcctcaagtgcttattgttaatgcgtacatgaggaaggaatcgtgtattttcatttatgtgtttattctaatgcccataccctacccctgtacctggcatgatgccttggtatctaataggcacacaataaatacttgttcagtcgaacaattatttttagccattttcttattttggacaactg

SEQ ID NO: 55870 - DNA, 1051 bp, Homo sapiens
gaaattctgagtgccgtcagaatgagcattttgccttgttcatctctccaagtcagcatcctggagcatagcagatgatcaggaaatgcctgattgccctaattccactggcctctgaattctcactcaaaagggcataatacccaggcccctcctaggtttcaaagaattctcaggaatttgcaggccagaagcaagtatagcctggactctggaaggaacttcctccaggttggcccgagaagagggagaggtagctgccctaagctgtaccccttgcctacaagttgctacagtccaccatcaggatagttgtgtagccttagctgaaggcagagttcccctcagtgctcgaagataaatactttagaaaggagtgcacatctgtggtagactgaataatagccacacagagatatccacatcccaatccttggactctgtgaatatgttaccttatatggcaaagggactttgcaaatgtgaacaaattaaggaccttgagataaagaacttatcctggattattgagatgagcccttaatataatcacatgaatccttagagagatgagagggtcaatcagggagaagggggtgtgatgacagaagcagacattagagtgatctgtccaggtgctaaaaaatgccagtttctagaagctggaagagtcaaaaagtggattatatacctggagcctccagaacaaaccagtccttcagacatttgttttagccccttaaaacttatgttgggcttctgacctccagaatgataagagaataaatttgtgtggtttttttcgttttgtttggtttcatgtttttttttttttgagacagagtttcgctcttgttgcccagtctggagtgcaatggtgtgatgtcggttcactgcatcctctgcctcccaggttcaagcaattctcccgccttagcttcctgagtagctgggattacaggcacgcgtcaccacacccgactaatttttgtgtttttagtagagacgggttttcaccatgttggtcaggctggtctcgaactcctgacct

SEQ ID NO: 55871 - DNA, 1020 bp, Homo sapiens
gcaaggcacgcccttcccgcttcttattggaagagggtctacagtctccaccggtctctactctttattggttaaaattccccgcaacacccctcctctctaccccggcccaattggccgtgcctcagctcaagagtttgtgtttggtcgtcggttccaccttaatcccgcccatcagttctacttaggggttcaacaacccggggtggagcttaatctgtgaccacgcctcggcagtgctagtcacacctccaagttttgccagctcctccccctcattccgggcctctcgggatcagctcttcctattggctatgggccccatcggtcgatagaaaacgggcggtgattggtaaaggggtgggctctacttcccggcggggtcctgcggagttggcggaggctcctccagggactggggcacagatctgcgtagaaacgggtggcggggaagagaggggaggagagctctgagtgggaagcggagccgggggcctgggacccgtcgcgtcagagccaggtaaaggctccttccctcttccttttcttcctcccggccgccgggctggagccctgactgaacaaacccgggctggggcgggaaggagagggcgcggatgctgctcgcggcatcgccttagcggtgccgcccggaatccctcagaccgcccctcctccaccctctccaaatctcccagtacagcccataatacttctcaggactgcgagtctctccgcccatcactgtacagcctgggactctgtcctggctcacggaccgcagcgcagccggcacccagccgcctctccctttcctccgcacacgggcagccgcggtccaccgtagggcagtcgtcgttggcatcgcgcgtaatcatcggccggcctcctccagtgtctcccagccctggcggacagcccgggtcccagcctaggacccaggaggatgggtgttccgcgcagcttccggggctctccccgagtcccaccccccggcccgccccgatggacttctcttcg

SEQ ID NO: 55872 - DNA, 1631 bp, Homo sapiens
tgctgccaagagaagctagtaaccaaaaacaaaacaactgggaggaggggcgggagaggaagaaaagttgtgccctggtggcttgtccctccccggctttgatcccctttgatgtacagggaggtgccccggccgggggtctggggccacgtcgggggctaggtcgggagggctccctcgggctggccgctgcccagcgctggcggggctcagcaggccgccgaggtgccgcattccccgcccggtgccccgcgttcctgcagttcccgcccggagcccgcgcaggcggctgctccaaagtgttttctttcagccttaaaatccggagggagcttccttcctccccacctcgtagcgccaggctctgcgggcggggagacgttaagcggacaggaatgggcccagggcgggctcggaacgacgtcccctaccccacccccgccgcgattaggatctgcgctctggctgatcgccccctcccccttttcctgcatttacaggcaagtgaaccggagcaaacgacttccgatccagtctgcgctgttgcggctcccgtttgggatttgatttgcagcatctttgagcctctacgacaaaaaaccgcgaagcacgcccagccctcccccggcaccccgaaaagcacccactccctcccggggacacagctgggcgcgtccacacccccgcagccccacaccatgttgtgcggaaggacttccactccccgcctgtgtcgttgatgtcagaccccaggccagcctccgggcgctgcagttctcccggctaatgctgaggctgcggctccggctctagcacaggcaccagccgccgccgcacccggcctcagcgcccaccgtctgcatgtgcccgccgtagccgtctgcccagcccgcagcccgcgctccacggagcgctggagaccaccgtggggggccccttctgccctcgagagaagcggtcttggaggtattgatttaggtggttggattttttccgtggatctatcaattcacaattcgaatttggaagaaagaaggaaaacatgacgtctccagccaaattcaaaaaggataaggagatcatagcagagtacgatactcaggtcaaaggtaagggttttgaaaaatagcacactgcaaatgctctgtggactggtgaggcgtgtatttccaccgtgatttgcaggttgttcatttctttgggtggagcagatgggggcaggctgaccccagaggtggtttcatagatgggtctgaacctccaaaggatgggcaatgccagggggccattgacactggaaaggaatttttgcagtgggctgtaggagtatctttgtggggctgaccatgattttggcagccctttccccccaagccgggcagggtggggggaggggcaggaggctcttagagaaaggcagtttgcctccggttctctgggtcaggtttccttgaaagacaactgaaatctgacaggtgtttggacatttgtttcagagattgaagaggagtccagacagaaaggcaaccttgggaaggtgtaccatttggagagccttgggagaggcggggttttttggatgcactatattaaaacatgagatttgcaatggcattggcaccaaaagtcca

SEQ ID NO: 55873 - DNA, 1166 bp, Homo sapiens
actgggattgagagaggtgtggttgtgagttattattgaggtcttggcctcttgtcactgttcataatccaggcctgtttttgtaaacaataggccactggcctccatgtcctgtccagatgcattgcatttgctcttggaatcccccctgcagttttaaccagatatgtcttttttttttttttttttttttaacacatcctattcttaaactgttgccatcgggagtgttaataactttgatcttcccagatttctctccagaagcacgccatttgactaaggtgcaaagtgactttaaatgtttaatttttggaaggttcaaggctgataggtgttaatagaaccatatctgccaatttcttattggcaaaggatttctcaagagtgtctcaaaattaaacactttggatatttacaaacattgctcattgagatgaggtaatgcagtcggctatttgggttctctcttcaaccttgccacaaacagactattttgctttgctctgatattttcccattgatactattcaggatcatagaattttataggtggctgagcatgatgtcttactccgagaaggtgcctgatgaatgcttatggaactgatttgaatagtttagtccttcattttacagctgaggagaatacagagaactgaagaggcttgtccaaggtcacacggctagatggtggcagatctgaaactagaagcagatttaccaactctcaattctctattctgtatctttactatgaaacatcatctgaccagggtggaaaaaaataaaaaattcttaaggagcccaaatctgtcaatgaataatgatagtaataatgataatgataatagattacattttggttgctcattatgttccagtccatcccaagtgctttaaatgaatggtctggtttaatccttacctcaacccagggaatgggtattattgtcaccttccattcaccatataaggaaactgaggcttagagaggatgagaagcccttccaaggtcacacagccaaaccatggcagcttgacttcattcctttattcattaactatttattgagtgcttgctgtgtgttctggcgattggccatacagctgtgaagaagaaaaagtctctaccctcgtggagcttatattctggaagctgggct

SEQ ID NO: 55874 - DNA, 1028 bp, Homo sapiens
agtggcacctgtagagttgtccttccagaagtgagaatgcttcatgggaattgtgcttaccttatacccttgacctctgacagctacattaggaaaatatgtcatattgcagggaaaaagcagttgatatgtagatttctggtagtaataaaattagcagttttaacctggtgtcagctccagaattgactttttggggaatctgggaaagttgccttggaagttgttaggtttaaacataagtaataacagcacttaaaatcattttaaaaaattacaaaattaacacccttactgattttacaataatgtgtaagaactctcatctctcccttactctctgtaattgtggtagaatacacaggaggttgaccatcttaaccattctagagtacagttcagtagcattaagtacattcacattgttgtgcagccatcactaccatccatctaaatgactcttttcatcttgcaaaactgaaactttatacccattaaacaacagctccctattccctcctgcccctgtctctggcaagcaccattgtactttgtctctatttgataactccagatactgcaggtaagtggaatcatattgtatatattttttgttactggcttatttcacttcctataatgtcctcaaagttcatccatgttgtagcatatgtccaaatttctttcttttttaaggttgaataatatttaattgtatgtatataccccattttgtttacccattcgttcattgatgaacacttgggttgtttccaccttttgcctattttgaataatgctgctgtgaacataggtgtaacataggggtgttcttttttctttttttttttttttttttcagatggggtctcactctgtcacccaggctggattgcagtggcttgatcacggctcactgcagccttgacctcctgggctcaagtgatcctcccacctcagcctccgaagtagctggggctataggcacatgccaccacacccagctagttttaaaattttttgtagag

SEQ ID NO: 55875 - DNA, 1080 bp, Homo sapiens
tgaaaaaagtgaggtgtaggacattcagttatttctccagggtctgcagctggtgaataatggaataggaaccttggttgtcgccagagtctaagttctacgtgttgctcatgaaatgcccctttttcgctgcgcagtcccgtatcttcacctattgaaatctcatccttctgctgggggcagtggatcacctgaggtcgggagttcgagaccagcctgaccaacatggtgaaacgctgtctctacttacaatgtagaattagctgagggtggtggcacttgcccgtaatcccagctacttgggaggctgaggcaggagaatggctggaacccaggagttggaggttgctgtgagccgagatcgtgcccttgcactccagcctgggcaacaagagtgaaactccatctcaaaaaaaaaaaaaaaaaaagaaaagaaagaaagaaatctcacctttctggtaaagcccaacgtttctgggattccttccttaattgctctgaccagaaataacccttctctctatttcacccacatagtgcttctcttaatagatctcatatggcattgatctcatactgccttatgtttggaatatttgtatttcattcttttttcttctaccagacttctgaatgtaggaatgttttgaagttgtgtagtgcaatgcaaagaatacaggctctggaaccagccctcagttggagtcttgtcagcatcacctccttgctgtgtgaccttgctgaagtcactcaacttctcttccaagcctccttttctgtgatgtggagataatgagacctgccttgctattaattgcagttgtgttaagagtactggctcagtgtatggcaaatattaaatgctaaataaatagcttattataaggtcccttcagataggaaacgtgtctggaagactattgtagctcaaatggtggctctcagtaaacacttattgtctgtagtactgaatgaatggatgacctaactactacaaataatcttttagaaatagtttaattgtatcttgacactgtatcttgcacaatgtcaccagagtgatttttaaaaactcatttt

SEQ ID NO: 55876 - DNA, 2585 bp, Homo sapiens
gaaactatttggagtaggagtgaggagctagcattgttttcagggcatgggaaccccctccccacctcactagccaaatatgtttgcctgggccgagagtgtcagatctctgagagatcttgacagagtatttaaatacattctgccctcggacaattcttcagtgttaatcatttcaggaaaagggctgtcagctaacctttaaaatcctttccagaatagtataccacagcccacctttccatcttgttccagtgacccaatctataaatggtcagttccttcatttgcagaacttgaaatagtttaaagaagagacttgatgaattgaactcatgtttttgctgctgtggccacaccctctatacagacatttgcttcatttgggttctcagcaacttgggaaggaggaggctattgatgaaactttcaaggcgttggcttatagctactggagtgttcttctttcctgtcccctcccctcctcacttcctccagtgttgggacactttgtattgaacaagaagatcatgagctaatttcaacctggcagccatttatttagcacctactgtatgttgtcttttttttttttttgaggcagagtcttgctctgtcactcaggctggagtgcagtgatgttatcttggctcactgcaacctccgactcccggattcaagtgattctcctgcctcagcctcctgagtagctgggattacaggcacgtgccaccacgcctggctaatttttaaatttttagtagagacagggtttcaccatgttgttcaggctggtctcgaactcctgacctcatgatccgcctgcctcagcctcccaaagtgctgggattataggcgagagccaccgtacctggcctatatgttttatactatgctaagctgtgggcatagagagatacagaaaaaagtttctgccttcaaggagctgcagtctattagaaatgtcttagtccgttttctgttgattataacacaatgcctgaaactgggtaatttgcaaagaaacaattttttttttccggttctggaggctgggaagtccaagattgagggctgaatctggtgagggccttcttgctgatgggaactctccacagagtcccaaggtggcgtaggatatcacatagagagggagctgagtgtgtaaacttgccagctcgggtccctcttcctcttcttaaaaagccactagtttcactgccaagataacccattaatctattaatccattcatgatgacatgccttcatgatccagtcacctcttgaaggccccaccatggggattaagtttcaacatgagttttggaggggacattcaaacaatagcaagaggggtgatcggattacacaagtacagtgatagggtcatagtagagagatatcgaaggctctgtggataaggaatagtctaacagtgagtaatgctgatgagactggttgatagaggaagatgatgatgttacctagtatttacagggcacaaggcagtcaaagtgccttgccatactttatctcatttaacctcagaattgtacaacacagggcaggatgatatccggcctttttttttttcttttttttaatattttattttgagataattatgcattcacatgcagttgtaagaaataatgcagagagattgcacatacctgttacttagattcctctgatggttaacatcttgcaaaactataacacagtatcataatcaggaccttgacattgatacagtcaaaattctaaacagttccatcactgcaaggatcactcatgttgtccttttctagtcctgcccctcccagttcactctttcatctcaccccactttagtccttagtccttaactgctggcaaccactaatctcttgtccatgtttataatattgtcatttcaagaatattataaaaacggaaccattagcatgtagctttttaggattggcctttttttttcactcagcacaagtgtctgaagactcattcaggttgttgtgcatatcaatagtgtatccctttttattgctgagcagtattctatggtatgaatgtatgatggttcggacatatgggttgtttcctattttaggctgttatgaatgaagctgctctgaacattcattatagatttttgtgtatacaggtattttttagaaaatagagataagccaggcatggtgatgtgtacctatagtcccagctactctggaggctgaggcaggagaatctcttgagcccaggggttcaagatgagcctgggcaacattttggagatcctgtctacaaaaaaaaaaagatggaggtagttttttgtaatggcaagattgtacattagaagatagaaaagtaggttttgcatcttactagggaagatacatgtatatttctctccctttggactgatcatttaagttgtttcaatttccttatcaagaaactggcataatatatgttctgcctacatcccagggtggttgtatagataaactgagataatatatggcctcctcccaagtaactgggattataggtgcgtgccaccacgctgggccaatttttgta

SEQ ID NO: 55877 - DNA, 2534 bp, Homo sapiens
attatttgatatataagaaattccaagtccaagcatggtggctaacacctgcaatcccagcactttgggaggccatggtgggaggatcacttgagtccaggagtttgagaccagctgaagcaacatattaagactctgtctctaccaaaaatacaaataagttagctgggcatggtgatgcactcctataatcccagctactcaggaggctgaggtgggaggatcacttgagctctagaggccaaggctgcagtgagccgtgatcatgcctctgcaccctagtctgggtgacagaaggagaccctgtctcaaaaaaaaaaaaaaaaagaaagaaattccaaatttaatatagtcaaatttactttttgttaaagaaattaattttctttactgttttgatttatttaaaagacaaacacacacaatcataaggatattcttctatattttcacctacacattttgcctttcacataacgtcttgaataaacaaggagtaaattttcgtgaacagcgtgaggtagggatctaactttattttatattccatgtggctatatttattaaagggttcatctttttccccattgatttgtaatgtctcatttgtacatacattaagtttattatacatatttgtgggcaagatgagttctccatcatgctgtagcggtgctgccgctggatgtgcatcaggggttgctgatgagggagtcaaatattttcccctttgaggtagcagcactaggctgtccccacagctccaaccagaatagctctgcttttatgttcacgatattgggtgtcccgctaagattttatttgaataactttttagatggaacaattttaaaagttaaaaactaccatttttaaacaaattacattttggatcgttttttgagatagcaagggtttcgtctctcatcttgggttggatgaaaagtgtaagacaacacagaactcagaacctagcagcgagggaagtgcctgtttttcaaagggaaaggaatgtgttattttgcagttgtcagtagttccaaatatatcaactattccacaaaataatgagtatgtagtttccgtgagagacttagaactgtctagagcctagtccttattgtctgtgatcatagaaaccatggagaaaaaaagcctacctatacgaaagtagttaaaaaaaaaaataacccacagcaatacaagaaatgacatcagccagcagatgactgaaaatgagtggtgttgataagaacttgaggaattttgagatgggagaggtgtgggccagaatgaataagaccttgatttatggactaggatttggctaagtcgatagtaggaggaaagaacagaggcagtgtgtcttccctcagtggagttcccacagcccccaccgtgcttaccgctcctgcatcacttcctacaccctaatacaatgatggttttatccaccctcacccccacccccacgctccttcccccagactacactcactaccagaaagcttgtgagttctttgagggtgggcagtgggcagcctgtcatttcaacattcccagcctcctgcaccatgtttgcatgtggtaggcacccaataaatgtgtgctgagtgagggagtagactcttgggctggagcagaggagttatagacagaggagtaagatcgaactggatagtttttgatgaccttgaagatcagccagagtctggcttcatactggggcaacaaagaacagtgggggcactctgagttgaagagtgatgaagtgtgatgaagtcatttcagagggactccctggttgctctgagttgcctggctgggggcaagaggcttgttcctgcccacacagcataccaggccttgtggtgggtgctgcaaacatgctgttaaatgtgatcaattactggagtcacctgtgagggaattgcgagtccccatttactgaacaagaaatttgagtcaggcagatgatccgaggtgatggtgacccatgatggaatggggactgcagctcaggtctgtccaactctaaagcctgctggttcttttatcttggatcttatgtttgaccacactgtaatcaggagataccactaagatgggaagatgagctgccgagatgggtgtggggcctaggggtgaagtaagagtcaggaatgcctgaggtttttagtttgggagacagggagaacgatggtggcaatggcagaaatagacatatggaagccaggaagaggtgcagcagttggtgagagaatgagcattattttagataccctgagtttgagatgacagttccattcaagcaggaatttcattaggcaagtgacaatgccacccccatccgcctttcattaaatctgtcattttcttttcttctaaattgggaatgttgcagagaaactgtgaaatagatgacacccctcttacgtgccaaatacctgacctccttttgcagcttcttacctttcactttcagaaatattctcccttgaaggggcttcgtgtttgtgtgcaggaattaatag

SEQ ID NO: 55878 - DNA, 1048 bp, Homo sapiens
cttgaagtatgactgtgccaatactgtactcgctatttaacaaaatgaggtcataccaatcacactattttgcacgtatttgtttacacatctcttgtctgctaagctatgagctctttgagagcagggactgtttctgtttatcgttgttttctagcatctagcagagtgcttagcatataataaatgtgtattggatgaatgaatgaacgaatgaaattctttgcatttttactcggttagagagattttttgaaaggcatatatgtgggattatttgtgccgtcatctgctaatttcacagatgtcttctcaactgtagaccttcatataagggaaagacctatttacccatagttgagttgcagctgctgctgccctggcctgatggcacagtggtgagggctgtctcaatatctgtcccatgtctctttcatagaataataccctccctcagccccttttccctgtatcttcctttcaagggttgctgtgtagttaactctgcctcaggcaatttatcttatctgtacttttctcttcctcattcctcttctcttttccagtgcttgtccagtaacctcaaggaaatctgttccaacccttctttgctgttggtgtattcctattcatgagttaaatcccaaacaaaacatactctaatcagggcagtcgaacttgaaaagagtcagtgagaaatctgaaaggaggaaaagcctggccacgaggctccaagtgaaatgaaagccataaacaccagcttcgtcaaccttgaaagcttctaaaagtgcccctaagcctccttttgaatcactaaaagttttcacttacctccctgtctttctcagataaaatttcctctttctcagccatgagtcttaaaaaacaaagcaaaacaaaacacttcacacctgcttcttattcagttttacactagtggaaagagaacgggatttagagttggaaggccaacgtgagcgtcctgctgccacttagtagctgtgtgactctgtataagcttctaggctttctgtgcctcaatttcttc

SEQ ID NO: 55879 - DNA, 1306 bp, Homo sapiens
gaacaactcaagtttcgtcctgtcctcagtaagcagatgagaggtagggttgacgttagaagccaagtttttgtggagcaataaggtaaaattatgaaggaagcctatagaattccaggagagtttaaagaaaacagtagaatactttcttagcaagggtatgggtgggcttctgagtggaggaagcaggctagaccttgggatgttccagtccaaattctgtttcggaagctccctaaatgtatgcagaggttgtgtaattgtattcatcactgttgaatgtattattggtttgatttggtttcactgctcctaagttccttttgtcttatcttgcaagcatatcactgtgagtacttaaatcattaacaactcattaaaactcttgaccattttcattttctaccaagctgaagcctgggtgtggtggaaacttgtgcaggcctgcttggctgtgccgcaactgagcagctcctagcagtttggctgtcaaaaggtcactgaataaacaaattgataggaatggcggacataatctctgcagttccttgaaaagaaggaaggggctgcaggatacaggatagtgaaggatccttctcttcaacctgaaggactcttcagcaattaacaccttgactctctttttatgcaacactttttttttgtcctctcagagactctatttgtacttggtcttttcttctttcaggatttctatagcttcttttagagactcaaagtgcttccagttttgttacctcatttattctctaggggcaggaattaaggtcttgatggagatgaagtggtacatcacttactgggctgtggaggcagtctacaacaggcagttgcagcagttcttctggttacatgttgagagagagatatatatatacacatacacacacacacacacacacacacacacacacacacacacacacacacattttaccttatttaggatctcccagaagataattttaactatttgtaatttctatatattttaaatagctgatttatgcctcataagtaaagaaaaaaggtttctctgcttttgacttgaattgttgaactatttgtcccttggtaaactgatcagttgccgtgcagattgagagaaagccattcaatcaatcaaaatgtttctactgcattggcatgctttgtaatggaaatgaaaatgacagcatgtttttgtcagtttaaatgaataggtttcctttagatcgatgctgaagttggtattataggtatctagcctatgaatgctaataattaattacggaaatgcctcatg

SEQ ID NO: 55880 - DNA, 1051 bp, Homo sapiens
ctaattcattcatgtactcaacacatgattatgtatgcctactatgtaccaggctctggtctggtgctagagatagagttattaacaagactgaggaagtccctgctttcatggagctgtatttgtttttttttttttttttttttttttgagacggagtctcgctctgtcgcccaggctggagtgcagtggtgcgatctcggctcactgcaacctccacctcccgggttcaagcaattctcctgcctcagcctcccaagtagctgggactacaggcgcccgccaccacgctcggctaatttttgtattttttagtagagatggggtttcaccatattggccaggctggtctcaaacacttgacctcgtgatccgcttgcctcggcctctcagagtgctgggattacaggcgtgagccaccatacccagcccagaatggtattcttaacgtatggacttaaaaggagcatttgcaaggaagagtggcagtggcagtattgtatggggagctctgattctcatttatgcaagatatgtaatgcctttctaaagaatagtgttgctacttacagctcgggcttggagataagacccactactctgcaggtccacttgaacttctttgtaagcccacttgaactaatctggaagagtttcaagctttggtaccctatttgccaacagctgggtacaaaaccacctattgggtatgattttagggctattgtcaaggtccctgaaggtggatagactgaagacatctcttctactggtagctttatctctttaaaacattcttttattgtatctcactcaaaagactagctgtttatttatactttagtatgagattccatttgtttctttacaaggttttgataagggtctaagactactagatgccagtttagtgagggagggcactctgggggaagtaagcaggtatatggggctaaaatcaaaaggttgaagcacctccagtttgacctacttaacaattttgcttagccttgaactcttggcttctctgataattagttttctaattttt

SEQ ID NO: 55881 - DNA, 1045 bp, Homo sapiens
ctaattatagttacctcctatttgcttagcattttgtgcttttaaaaatgggtcttatttcatatctcatctgatcttaaatatcctgtgagctaagcaggtcagaaattatcattattattattttttgagacagagtctcactctgttgcccaggctggagtacagtggcatgatcttggcttactgcagcctccacctcctgggttcaagtgattctccttcctcagcctcccaagtagctgggattacaggtgtgtgccaccatgcccggctaatgtttgtatttttactagagatggggttttgccatgttagccaggctggtctcgaactgatctcaggtaatccaccagcctcggcctcccaaagtgctgggattacaggcataagccatctcacctggccagcaggtcagaaattagtaatcccatttaaaatatgagaaaactgaagcattaggtaggctaagtgacatggccaaagtcacacagttaatagggcaggatcagaatttagaatgcatgttttttcttttaaaaacaactttattcaggtataatttatgtgcaataaaattcactatttgaaacctatagttcaatgagttttgacaaatggtatatacttgtgtagccacaattataatcaataggttgaacatttctatcaccccaaaaagtcccttcacggtccttggctttaatcttcctctttccttccccaattccccctgtcttttgatgtctaatgcaatgctcttttcactgtcccacactcggacttgacagcccttcagccatatccttctggagagagtcctggctggcagccagcctgcctcatcatgttgagttatgagagtgaatgggaagttagtgggttgcttactccattgttagttccttccttcccttcttttaccagctccaggctatagaaaaattatgtgggttctccttcccaggagagcttgaaaaacaggacaccagctcacctgtctgctcttgcttcctggtagcctgctgctggggaggggtgggag

SEQ ID NO: 55882 - DNA, 1059 bp, Homo sapiens
agcctgctccttttcatagccagctttgcctccataccagcaagatggaagataggtgccttcactaagcccctcaggtggccacaggatatgatccagaatggtggtctctacttttctatttgctcctatttagccacccagtttgggagtagccctgtgtattatgattatctctttcattcattttgggctatttgagtttttagggccctttcctatccattatctcctgttctcaataagtctgatatcttctgttagagtaaaagctccatctcctctgatctaagacagctgcaaggacaggacagactcagatttcttctctgcaaaggctcctgttaaatcttgggccctatggtattgattttcttctagttatctctacaaatttttctggctttgctgaagggggaaaaaatcaccagactgcatgcttgagcttcaggtttctccttagctggcagcctcaaccagaaaaaaattctttttgagagcactgagcctcaggcactggttttgccctgtactccccagtgtctaactcttaacagctggtggccatccctggcctccatctttactttgctgcatacctcagcttgatgagtccttgatgttgactccttgaccttactgccatcttctttcccctgcaggggcctcttgaactatggggagcttagaaaacagtgggcttcctgtgttttgtctaccagcaaagctgggtacctgaatccccatgtgacagtgctgcatggctgactccagtattcttcaggagacacagtagcaggaacagagacttagttgaaagccccaagtgtgtatatctgaagtgtttgtacaaagatgggggcagagagctgctcatgtctgcaaagagggacagtcccactcttgcagaggtgacagtccacagcaatgctgtctcttccatttctcattggggttaggtttccaaaggtccatgaaggttttattcgttttcgtgccccaagagagctttccatagtaatgaaagaaatgttaagaactgcaggaaatgggtaagat

SEQ ID NO: 55883 - DNA, 1068 bp, Homo sapiens
gtctccttcctttattcttcatagcccttaatcacttctcattagtggactccctgggagggagggaagaagggttttgttctgatgccagcctcctggaagggctgtatcccaccaagacagatggctgcctagcctatttttaactgtctctggggaagaagattccacaacctattttgaaacctgtttcattgattgacagctttccaattaggaatttcttgctgatacctgacttaaaatttgacagctatagttgaaactcatttccttttgtttctttgaaatcatagagtttgggaaagagagggattttaattagaagtcgtctaggcctacccctaatgaagaaaataagttgaagttgaaactgaaaatgcctcctcatcctctcattgaggatcccatcagttttgggatctgcctttgaaatcacacatttgggtaccattctgtaagaatcaatttaattttcaggggaaaaaaagtgttctggagctggaagtttagagcgcaagtaagtcgttaatacgacttactctattttgtttgtagtgagaaagttaaatggtgcttatagaattaccttgcctctattggcagagagtaaaaataaactgagctctcaatatacaaagacttccccagttcttttcctttcgctcatatcaatgcctgtctttaaagaaaaaaagagggttatttttctctcctccatcagtgggattctctgtattttaaatatcttttttaagactaatgtcaggtgactcaaattccactgaagtctctctttttagttgtctttctgccgctgcagacttctcttgacatgagactctgtgctgcttctcttgacagactgcatctcgatggcagaacactggtaagaagctaatgatgttggttccgtttcagtgtgtggaatcttgttatgtggtatagaagtccagcattctaggcgaataaaccgaaaggtattagactgactataaaggggtcttgggaagggatcttactcctctttgatagttggtacttgtaccttttctcaacacctgtgac

SEQ ID NO: 55884 - DNA, 1052 bp, Homo sapiens
tctgttattctctttccaatgctataattaatagtctggtctaaaatataaaaacctcaaagttattaatggaaatgtcactactcacctcatttttacagaggccgcttggcctctaagtcattgagtctttggacaaacatcatttagcattgactatgtgcaagaactgtgctgtatgctggggatttaaagacaaagaaatacagtttctgcctctgagccgtgcatcatctcactggtgaggctcacatacaaacaaacaggcagaattcagtgtaattgagaaatgttgtaattgagttatatatagggttcttattttgcacgtctctgtagagtagtagtttccatactgtgcggtatttgcctgttcacttgcctgttcctttgtgagctctcgagggccaggaacaaatatggatataaacatggaaccatgagcgaatagatgtttcttatcaatgctcggcctgtcttacgaggtgttccatagtggaaccacctgggaaacaattgattttgcattcttgtttgttagctaaatgcctgatttgctttttaggattcttttaggttaaatcatatgaaattaccattttgttgataatttcacatggttccatgtaataaaaagagatcaattttacagacttctggtttcaggtcatgcacagaggtgaagttctgcacaggtactgggcatcctatatgtatttccactaggttactatttccgagtgtgagtctctatttggaacttcagagagggagcctgtggcccagctactcctgtgtcactcagctctggagtggaattcttctaggtagtgcctgtttgtagactggacagggaataaaaccactactctgtgcccgtttataaatatttgcatttaccttggagaatgtacaagacctgggcttcatgcgtgtgtgagagaaaatagcaagtgaaaaggatgtgtacacagcagcatgaatggggtgctattcttagctgggtctctaacctagagaacaggaaacaagatgcttctgaatgtggacta

SEQ ID NO: 55885 - DNA, 1526 bp, Homo sapiens
accggctgtagacttgacaactgttaacttggtgaacagcatgttcttgtttatgttaactgtgtactttgactgttcaagatccccattacttttcacttgtcatgccacatcattgctgcaagttagcctccttagataagatacatggcagttagctatcttcacctgatggggaggaatagggtagagaaaagaatgtgaccagctgttgtcagcttctccgtggaagtggtaaccatgtcagagccaggccctggagacctggcttggaaaagaatgaagttttcctactaggaacttctgtagagccctagacctttccatcttagtgccgagttaaatgagtcacgtagccttcaggtaaagtcatttccaagggattgtgagaatgtgcccaggttggtttggactgtgtcacacttacttgtactggcttatctttgctactaatttttttgtgtgtgttattgttcttctaactattgttgatgatttgagtgatgcgaaagattttgatgatggtaactttctataagagatgtagaagcaagaggcccagagaattgatcttgcccttcatctgacacattgtgaccagtttgttgaacatgataaggcctggaattgtcacttcgaatgtcttcttaatctgggaaatttgaagaggtctgcagcagggaggctggtcagggaagtaactttgcaaaataaaatcttcatactgatgcaatcccagagaacttgcctttgggtttgtgattgcaaagtgttgaatcagtctttggtgtggatacagaatatttgaagctagttgaagtgtaggggtgttgggacaggagaaatgatgagatgaagtcttatcagaggctgaaggtcaccggatattttcctagtaaaggttcctttgatgtggaatttatccgtttagcccacctaattggagttatctggtttctgtccctgaagattctgctgttggccctggactacttaattctgtttgctcaccaaatcggtgacataagttacaagttatgagatttaatgtttagagtatggttttggattataggttccttgcattcttaagttagcagaaggaaaccaagagaagcagcatggtacaaacaaaaccccaaacaagtgctaatgtcagagagacctgggttcaaatcctagctatgccacatataagttttatcatgagagtaaattgcgtaatctcccagaacctcagtgttcttgttgctaaatgtgcacaaaataactggctatcttatagagacgttgtgaagttagagtgagtgaaggtgacatgcctagtaaggacctggcacgtagaagcacacaatcagctttaactgtttctgttattagcagtggacttagcactgtataaatctgtccctccatgcttcccacttgcccatttgtcaaatggacttgacattccttactcagtggttgacagggagccaagtgagatatctgagctgttgaggatggatgtgtatctcaagatc

SEQ ID NO: 55886 - DNA, 1026 bp, Homo sapiens
cgtttagcttcattaggttctgcagtagtcccaagattttccaagatcatcctgtcctccagtgttctattgattcaacttcagaatatatcccagactctgtccctctttactcctcactgctgttgccctgggtccatctgccatcatctctcacctggattatctcagtagtttcccaactggtttccttgtttccattcttgcctccttctgtctactctcaatataacagctagaacaatccttttacaatggaattcagatcatgtttacccctctgttcaaattctccagtgactttccagtttttacatgatctggctcctactacctgtctcactgtgtttcctactactctcctgccctttctcctcttaataaacactgggctcatggtgtttcctttaacatgccaggcatgcttgaccctgtcctgtctcagggccctgctgttccctctgcctggaacattcttcccatagtgtctgcatggctcgctctctcactgctttggattgctgctcaaaagtcaccttatcaaaggcctttcccaaaggtttaaaaatcattctactataaagacacatgcatacatatgtttattgcagcactattcacaataacaaagacttggaaccaacccaaatgcccatcaatgatagactggataaagaaaatatggcacgtaagcaccatggaatactatgcagccataaaaaagaatgagttcatgtcctttgcagggacatggatgaagctggaaaccattattctcagcaaactaacacaggaacagaaaaccaaacaccgcatgttctcactcataagtgggagttgaacaatgagaacatacgggcacagtggggggaacatcacacaccagggcctgtcggggggtgagaggcaagggaagtgatagcattaagagaaatacctaatgtagattatgggttgatgggggcagcaaaccaccatggcacatgtgtacctatgtaacaaacctgcacattctgcacatatatc

SEQ ID NO: 55887 - DNA, 1263 bp, Homo sapiens
cggcccttatatatattttttaattgaagaggtagagaagcaatctcaaggtcaggacaacttaccctgaggttctcacttgtcagggattgtgctggattctgacttaggttctgccatcaaacacagaatgccctgatccttagaggcagaggcagctctttagcctatagggtaaataaccgggaatggaattctcaccaattcttatcttctatgctaaaagttttactttaagatttaggcctgcttttttctttctctctgtctctctctctttttttttcccccagtaacagtttaaaattggtgccttagacgcaagcaaaaagatattagcacagctttagaaataagtgtgagtccgcatgtaattttttagtttctcctctcccttcgctttttgctttcttggtagtatgctaattgtattctttttctgcatcttttttccccattctttggcagatattattacttgtcttgaaagagtaggtgaagagctgtttttaggactctttgaaagggtacagtatggatgacagtcttggctaaatgtaatcagatccaggaagctggagtcagtgtgagctggaatcagttcaaattagcaaagcactggcgctcagtggcaggaatacaagtgaccacaaagtgttaaacacatctggaaagggattctgacatcatcctgagaatctttggggaatacatatagcctgtagacccattcctctttgaccctataaagattctttaaagagtaataccctgagtggttttctggccagcttgcctgctcatttatctttgaggagatggaaggagacaatatgcctcgtggagatccacaggccctagaggtgtatggattgtgcatttggaagtgctgaagctgagagactgggtctcttggtggaccccaagggatctgcttttcctctactcattgtccctacacaacttttcctggcagctggcattgctgtttagatgggttgttctttgctgtttaagttgtttggcagtggtgtgtcaggatgcgggttttctgaatactttcccagctggttacttgagtggtggttagggaggggctgttctggggctgctctggagctgttgaggtcgggtgtctgtctggatactcacagctggtctgtcgaggagaacgctgttctcattctgctgcctttggtggtgctgtgtgtggctctttagatgtgggtggagatgagttgggggagttaatgagatcttttt

SEQ ID NO: 55888 - DNA, 1049 bp, Homo sapiens
tggtacagagaaagctttctcattcgtatatcagagctgcatagtattccattgtgtggatggctgcctcctactttattgaatcagttccttacaaatgtgcacttgagttgtttccagtatttgctattacaagcaatacttcagtgaacaaaggcagctttttaaagggtcgcacagcactgcatatgctacttaaaatgagattattattcttcattcttagaatgccagttggttttgttggttgataaattcccaattactcgtattcatgagtgcaacattgatgatgaatgtgacatcccttcataacttaagaatcattagtatgactgccccatggaggcatactgttctatctcaggtttatttcaataataaaacctttggaaattttaataatgaaacctacttaagaccctttgcttaagaagtctgaatcactgatcactgcaattactgccatggcagctgtagagcaatttaacaggataatagtgaataagataaattacacttcagattcttaatggattgatgtgcagaagtatgcaagggaagatgggggtgggagaggagcgcctttaaaatttcagcacacagtaataaaatagggaactgggccattgtagccgttactactaggagttagtaatctcgtacaaacctctggggctctgtggtgggtagaatgtcctgtttattatagacaacaaattgggttaattctcttgtttgtgtgcctctgtggagtgggtggaaattctaggtgacttgctaattgtcttatttggaatactcccgtttctactaaagaattagtatctttggtataaaaataaggaggcagaccagttttacaaatagctgctggccaggagaataacagtttctgccaggtgagcagttaaaaaaaaggcagactggaaaaataactgtggaatggtgtttcttatttacaaggctaacataaagtctccctgtgtgttggggatgggggaggggacggattggctaagaagtaagtacggtgcttgctttgtatg

SEQ ID NO: 55889 - DNA, 1031 bp, Homo sapiens
ctccgcctctcccgggttcaagtgattctcctgcctcagcctcccaagtagctgagactataggcacgcatcgccatgcccagctaatttttgtatttttagtagagacggggcttcaccacatttgccaggatggtctcgatctcttgacctcgtgatccaccagcctgggcctcccaaagtgctgggattacaagtgtgagccaccatgccaggccccattgccttctaatagcccttttctcttaccctttagctcttggcgcttgacttcctatgtccatccccaatatccctactccgtgaaagtgaggtgaaaatgccatcatctttctgcctgtcctgcttttaatcatcttccaaggcagcagcaagtgcaattctagtccctttcaaccccgtccatgtgggtgttagactgattgtttagcttctttatgaagatgcacattagccattcagaaacttaatctcataatgatttgtgtgtgttggtaaaaaagaaaagccatgatctctgactggtatactcagatgttccctttggtcactgatggcaggatttcagaagcgaaggaccatttaatttaattttgcagatggcaggaggtaagcaggaaagcttggtcacaatatgccccctcctgggagagtggcttcagtaaattcaggttgccgagagccttagatgtgagaaatttaaccctctgccttctttccacttcccctcccttatataaaacttggttgttgtttttgtgtgtggggttggggggtggggtagggggtggagttgaggaagggtgggaaggtggagtgaagaaaattgcctgggttgaaaagccagtgactgatgtgagattaccttgtagtgatgttgctttgggcatatggattatgaccagatacagattaacccgttcctctataattgttttatggcctcatccttctgaaattgcctccttgtggcctgaaatcctttctggggttttccttaggctgggaactctgcttgcagatgagaaata

SEQ ID NO: 55890 - DNA, 1029 bp, Homo sapiens
ttctgcctcagcctcctgaagtacttgggaccacagtcacataccactatgcctggctaattttttaatttttaatttttattttttagagacagggtctcattttgttgcccaggctggtctcaaactcctggcttcaagcaatcctcccacctcagcttcctaaagtactgggattacaggtgtgagctacctgtgcctggcccaggttgcattttaaaataaggggtagggagcttttagatgaggcctcatggaataggtcacatttgtgcaaaaatttaaaggaggtaagagtgtaagccacgtggatattgggggaagggcatttcaggcagaggaaacagccagtttaaaggccttaaggtggagccctaaggctcaagtgtgcttggtgtatttgaggaatggcaagaaggccactgtggctgaagcagagtgctctggtgggaatgaggcggaaaaggactaggagatgaggtcagagaggagagggtgagaggtttttaggaggaagggaggagatgcctgattacatcataccatgttaggctgttggcttttattctgtaaatatctatatctacatcaattatatctctcaggacttacaactttccatctttatcgtcttctgaactccataagatctttctaagaattgaggggaaagttgattataagggagaatatacaaaacctggcatcgaagccttactagagacctggaacctactctttttgggacttggtaaattgatgagattccatgcgcccccaccccccattctctggcatacagaacaggaatacttatatagcttactctcaacccaacctttcccttcgtctgcttcaagaatctcaaatacttacgatttttggcatatttgacattattttagttaatttctgaacatgttttcccactgttaaccctcttaccccagacagcattttgaaacacttttttcttttttttcttttttttggcagggtctctctgtcaccaggctggagtgcagtggt

SEQ ID NO: 55891 - DNA, 1077 bp, Homo sapiens
tggatttgaacagtaggatgttttttcagaggtgtgaaatgatcaggcagcttgataactttagacatactgtacgttatgaagcattttcttgcttcttgttgtctttttctggtggattgagtcaatgcagttggtagaatcttttccacttatgttattgaggcatgtggttgaaaagtggcctttaaatggtgtgaggtgggtaggcaggggataaattcttaccacagtttctaggatgaggaaagtgaaactcagaggcccaaatcttctgactcacacagtgattctggggctgtctgtaatatctaaacgatgagactgatctacttgcaaggtcagggcatgtggtcattttcttgctagcctttggatcaccaggctgtcagcattttgagggggagtatttgcatcttgctttatttggaagattcagcttgagggagtcattattagaagattcttagaacacttgagccctctgaaaatgaaaagtctcacatttcccttctactttggctctctgttggaggggaacacttatgtcattaaaaacattgtactttgcttatctaattcccactctgtgttcacattaatagcttcccattgctcttaggaacaattccatacttcttcagactatttgcaatactcaccagagcttgacccctgcttctttcaacagtctcatctttttttcctcttctcatttaaattctatgcttcagttaccctgaatttcttcgattatttcggttccttgcatgcagcttcttttctgttgcctctgggcctttgaacatgctgttggctggagtacttttcctgccttcttcccataggtaattccaatcctttacgtctagctcctctgcgagcctcttgctgagccctagaccaatttctgtatactcctacagcatcgtctttttccccgataatgggctttttacattgcaattacttcttatggtagtctgtcttctctggtagactagattcctttggaaggcaggcccaagaagctggtttaaattactggagtctgactaaaaagacttttatattaga

SEQ ID NO: 55892 - DNA, 1079 bp, Homo sapiens
cctcaaataaccagtgagtatttattgattgaccagttctgtgcttgtacaaggcattggaaaatacaagagaagtttagggagtcattatgtggttggagagaagattttgaatacaggaagcaattagagcataaagcagtaatgatctcattaattggtgttatgtacaacatagatctgatgagaggtcagagatggttaaaggttctggaatagtctggaaagttgtcatgaagcaggtgggacctaggcttgagaggtagatttgtgtggcagaggagagaacagcaagtgcaggtgagaggaagcaggaatatttggtgatgagagggtgtaggggctagtgtgggatccagctttattaaagggaaggttcctaacacattcatctaactgatttccattgcacattccttgaactcctttgtgccttggagtgtagcagggaacaaactgctacacttagcacttagcacttagatgaagaaatgggcatttaacaaatcacacaattagatatgtaatttaaagttggggtaagtgttgtggaaggaaagtatttaatacaaggtggcacaagaacctggaagagggcaacttttccactttatagctggtttactccaatagcttcctgcctgatcatattctgggtaacaatcagtctacttattcaacaaattacttttaaatacctactgagtactgtgctctgtgttgattcctataggaactaacataaacttaggaattcctgtttaagcggagcatggtgacttatgcctgtaaccccagcactttgagagggtaagataggaggatctcctgaggccaggagtttgagaccagcctaggcaacatagcaagaacccatctctacaaaaaataaaaaattagctcagcatggtgatgcacgcctgtagtcctaacttctcaggaggtgggaagatcgcttcactccaggagttggagcctacagtgagctatgactgcaccgctgcacaccagcctgggtgacagagtgagaccctgtgtctaaaaaaaaaaaaaaatccctggttaacagggaaaagagc

SEQ ID NO: 55893 - DNA, 1038 bp, Homo sapiens
accatggtgtgtatcaggctgaacatggctgtggggccaagtgccatgcacaggcaccagtggatcaggatctttgctctgctcctgactctacaagttacctctgtcaccgtggcctccatgggcacgtacaagctgttgggcacaaagtgagccactgtggggagagtgagaagatcacggcagactcttcttccttggtgactctgtcagatagatcttctttaagatggaaaacctccttcatctctcctacaatgatcttgctacttattcctgagcagtgttccctaagtatatttgggtgtccacagatgctgctagtcttgcctgatatttttggagttgccattttcatgtttcagagctcagagcaccgctgtcatccctaaggtggtttgcctcactataggagctgtctgcaagcaagaaaatgaacactgctaacagtgcttgtgcttggttctttccctgaaagcaagactctagccctggtacccctgggtaaacataaggccaggattccagttctctgtagaacatcatacgttttctttcattcatggattttatagattccatccatcattcgagtcattctgctgtgttgtcttctaaaccatcatcaaccagtgcatctcagggggctaaggccgaatccaacagcaaccccatcagcttgccaactccccagaatacccccaaggaggccaaccaggcccattcaggtatgcaacagccaatggggcagaagcttcatctcctctttctctgctgcctgtttgatttttcttcaacgacagaggtttggactgttaggggcctaaatgcatcaaaacctagacagaatcgagaaaccatcctcattttccagttgtgtctgatttaagaaaatattttagaaaataagtaatccacatcaggttttgatctgcataccagttctgaccagtagttggctaatcatttaaaaagaaacatttttattggttttctctcattttatcctgggagcaaagaggcaaaatgtttctccca

SEQ ID NO: 55894 - DNA, 1040 bp, Homo sapiens
tgtatgaacagtcttaattttaatcaatataaggaggaagacacaccctagatttgtgctgtccaatagggtagccactagccacatgcagtcatttaaatataagtaaatttaaataaaatttaagattcaatgctttgaaatgtgagccatactacccacatttcaaagctcaatagccatatatgactgtgtccactgtactgggcaacactggcacagaacattgctgtcattgcagaaagtcctcttggtcagtgctgccttagacctttgcccataccacaaactgcagctacttgtaccttagagcaaggtgtagatgtttgggccctagagtggctgtgtccatctctggagaatgaaaggatgggttaaatcccacggggataaagcagtgcaagaaacccttcaggcaaagggtgtctgcatagaataagagtttgagagaggtgaggaggaagggaggttagaggaagaaattagggaacaactgaatcctttggtgtcttgaatcttgactagacctgaaccttactaggacacaggacccccagagggaagttcctcagagagattgtcaccctatgcacaactgatcccaacaatagatacctctgagagattcagggcagctctaatctccaggcactcagtggtggggaaagggttaagcatgttggactcatattatggaagagaaagtttttatgtagccaggcagtggggaataattcaggctttcttgacattcgagtggggtaaccagtgcatccgacagtcggctccttagaaatgggtctgtgcaggcaaagtcagcttatgttgtgaggctcaggctggagtatgagtaagaaagtgtctgtgatacaaaaagttctatttttctttccagccctgctggctagggagaatttctgccccatgtatatggagaaaggaagaaatcagagtcagcgggcaaaaagagtataatttaacctgctgtctggaagccatctgtgaagggaatcacttttcttttctggacttgtttccag

SEQ ID NO: 55895 - DNA, 1014 bp, Homo sapiens
tcaagatcattcagatagtaacatcaagtataaaacttccttctgctgatgctatttaggttctgtggccttcaactttctcagtcttcaacttataagcccatggactacttcagtttacttacaataacaataataatattgtttaaggatggtatttattgagtacacactgtgtaccaagcactgttctaagcacttcaaaatcagcaaaccctttaaagttcacaacagtatggagtgggtaacactcttaaccctaattattaaatgaagaaacttagttatggaaaggttatgacttgcctgaagtgacataactaacaataaaagcacaattcaaatcaagacagtctatctccatagttcttgttcttaattattatgccatactcaatttaaaaagttctacaaaagtatgaatttttgcttcagtgataagaataccttatatttgcataacgcttacattttcacccaaggattttatggtcttatgttttagaggtttatttttgtgtactttgtagaattagatagctgatagaaaatacttttctaaataagggacatcttggtatcacctccattttgtattgttcagagcctagaaacttccaagaaccacaagttgagaacttttattgaagcctcaaataaaagttttttataaaattgccagtctaacatgtaaaacttaatctcgaagaagcaagttaaatgaacagattcttagctcccagagaatctaaaggcggcaggctattttatattttatcaaaaaataagcagacgagtcatcaatataaaatcataggtaccttaaattagaaattcaaaatattccaagttagttctgaagacagtgtttcgttgtgcagtaaaagtttagaaaagggtatcacacaagagaagttctctcatttatttaaaaaaatggaaaatggtaaaagatgtctaatgtcttgtatggaccttgtatgagataacttactcttttattcccatattttc

SEQ ID NO: 55896 - DNA, 1305 bp, Homo sapiens
gactagtttgtcgtgtcattacaacaaggcatttagggaacatctttccttaattttactaatagaccaaccaaggaagccttctgaatcgctagtaagattcagctctgggtgattcttcatttctaatggctcatagtgattacagtttatgttaataatcactcctacttctgtcaacctccagcaagagtaaattgatagcaggataaattaaaagtctgatcttaatgtcataaatgtgactagaatatggtactaactttttcgggtctagatagctggaatgaggcttgcaaacagtgttatctggagagagcttgctggtctaacaactttgtgtgataatttggcatctgattagagagcatgagtctgataaattttataatccacacagagatcatgctgtggttggacacatcatttaataatatttagcatgatataatattccattttctctacaggagcacagactctttctcatactggattattttacctttgacagtcatttttcaatgacagtaattttaaataaagcatcgtgtgcttatagaacctgtgcttgagtaaaaatagtcttcaaataaaaataatgaagtaaatttttacttaggccatgcttaattggaagcatagaacttaaattgagaaaaaaatccatatgatagattttgtttttctcatgcttcccttttgaataatagcaaataatgcagagtaatggttctaagagttcagggtagatgaagtctgtaggttttagaagtatagagttgaaaagaacctccaagaggacttatttaatgagtgaaataaatgtccttagatagatattgtccctaaactcttttctattgaaagtttatagtattgaaaatttgatgattattagtacctagtataaatcaacattcatctgatgttctctttttagatagccaagttataacttttttgaaaagacattattggactaagttagtaggtcagccttttcctttgatagtgtgtactcttatctgtcacccaaccttctccacaccctcttctcttcattcagttgtggacagcagtaattttttcaggacctttgcttcttagaggaaatacatttttccttatttatatttttaaaagatgtttctattacattatatatagcaagagatctattaaggatccagaaaatcttaacctgtagaggatatgagttcctcatcataagaattagtttccttgagggttctttagtatattctatttacacagtttatgcataagtaaactctgtggccg

SEQ ID NO: 55897 - DNA, 1050 bp, Homo sapiens
tgcagatgcttatgatactgaagaggggagaaaaaagagggacaattaccggggctacccactttgtcatttgttttatggattgctctgagcctcagtgtcaaaatcttaagttgggattagtgcctgtttcacacagctattgcagagattaaataagaagacagcttttgtgtctaaaacaatgccttgcatgtagtaagcactcaatgtatgttcatttcttttctgtgatccatgtcctgttaaaggctgttctattataaacgtaaggctatgccctgtctctactaaaaatacaaaaattagctgggtgaggtagcgcgcgcctgtagtcccagctactcgggaagctgaggcaggagacacacttgaacctgggaggcagaggttgcagtgagctgggttcacaccactgcactccatcctgggcaacagagcgagactccgtctcaaaaaaaaagaaaaagagtaaggctataatgggcactgatattcatttaatatcatcaaagaaaatatattaattgggatggctaatatcatcctgggaccaccaatagctatcatgatgaatatatttttcttctacctcttgatttttggtcacatatatgatacctctctggatcattttatattctcttcatttttgttttctcattttgccttccctactagccccttttattctttttcaatttttattattattattatttttgctattcagtttcttgtaatttattgttgggctttaaaaatgttttctttctaccaggaaaatgaaggcagaggaaaggtatgataggaccagttgattgtgttactttttaaagaacctctggagctttagtttttatgaaccagattccttttcagcacaccatcccaccgtcaagtttggtaacaaatgagaaaacaaatatcttcagtagtggttctacttggctcagtcttgctccagtttatatttagtttgtcctgggttttagtttttcagaaacaaaagcttttagccaaataatgaaatttctcttgtttgggcta

SEQ ID NO: 55898 - DNA, 1305 bp, Homo sapiens
cgcagtaaatttgtagttttattttaacatccttagcttgtaatgattactaagaatagttcaataagtttatcttattgtcccatatataaatcattgttccatatataaattgtcccatatataaaatcatacttttttctcctgaatcttttaagtgaattgatattcctataaaatatatctctttcccatttcactatggattatttatctgtgcttatgctataaatctgcctttaggcacatctattttaaatttattttaatttttctctttttattttgaaataatttcaaacgtacagagatgttataagagaaataccaagaactcccatataccctttacccagatttaccagttgcaaatattttgtcacatttgctttataaactctcccactgtctgtatttgcacagtattttttaaaaattcttgaaccatttgagaattagttgtagatagtatactcctttaccctaaatacttaagcattatttcttaaggacaaggacatctcttatataattacagtacaattatcaaatttagaaaattagacattgataaaatactgttacctaatatatagtccatatcaaaatctgccaattttttccaataatgtgaaacaagcatgttgtaagaaaggtagccggaatgtaacttctctcaggaagtgtaagtttgatgagtatgccttttcaactccttgattaaaaatagaataaagcaaatatttggtcattgtaagcatttcctttattaaatcctccccttctcattgaactctgaattacttgctttcgctgaataaacatgtagtgtttgtgtgaattggtacagaaaagtggagagggaagctggggagcatagtacaaatggaggtgaatcagtgttcttaataaggaacagacctgtctttaggaattcatactgataatttatgcaacaaatctgattctctaaatctctggcaaaagatgcaacagacatttttgaagacaaaaaaaaaattttgttggccatgtttaactcaccttactcgttttgccgtttcttccttgccgtttcttcctagcccatgactgaagagttgctgaaacaacaaaagctgaattcacatgagaccactataactcagcagtctgtatctgattcccacttggcagaactccaggaaaaaatccagcaaacagaggccaccaacaaggtatgattagtactatgccctaggagatgacaaggttttcctgaggatgtgactggctctagcctgagtctgtcaacctttgtaggac

SEQ ID NO: 55899 - DNA, 1035 bp, Homo sapiens
cattaaaccccattgtctgaagtatattaatttaagtaagtacttattttaaaccaggagccctctttctctaacctaaggatgctcggaggattctttagagattatgtgaaaaaaattgtcatctgaatgaacacatataaactatggtaactgtatcttcaggtcaagtccctttacttcactaaatttggacattagagctttaagatggtagtgtatgacctttctgctgtgacttgacttacattgtttactgtttctagaaaaacaaaaattaggaggtgggagaaaatgtcattcagcttcaagaaatgtggcatttaattattatgccattttctctaataatttaggatgtcagggaaaatagatgaattgggcccaacatgtttgtaaataaaatgggcggtgtatctattgtttaaatctggttacttttaagctccttaagagccttatgacaaaaccagtgctagatgggacaatggcagactggtttttgtctatttctctgaacaaatatggaaagaatagaaataatataattttttttggtagttctcttttttagtttgtagaaacacgaaaccatgaaagaaaaaaatgtttcctttagttcagttctgccacaaatatggagaaaaccttttatcttaaagagcaagattgttctgtaaggttattttgattcctttgtttaatcctccacttaccatattttatgcactattaaatattgacatcaggattcctcctgattgcttttcctcttttttttctttccttctttccgtctttttctttgttcctttcttatttattaaagaaaaatagcaacagtgtagttctgcttactgatattctgatattatacaaagtaatttatttcccttctacagaatttatgtatgaggacctaaggctgttcagatatctaaagaaaggtttgaagccttcttctagctggtaattcccttctttattgtctggccctgaactagaaaagctatgatgggagggatgtggtccctt

SEQ ID NO: 55900 - DNA, 1110 bp, Homo sapiens
acaggtactattaaaatctccaataatagataaggaagctctgaggcttagagaggatagatcacttgcctaaattcacagctaatgagtggcataatgaaatttttcatcagggtttttccccttggcactgttgacatttggggatggataattatttgttcttggggactgttctgtatattgtgtaggaggtccagcaatattcctggcctctaccctctagatgccagtagtaccactacccttccccactttgtttgtttgtatgacgacaaaaatatttctagacattgctaaatgtctcatgggggcaaaatcaccccaattgagacccagtggtttttattaagtttttgtcgactcagacaaaaacttaataaccactgtactttagtgcctaaccactgtactttactgccttgttctaaggccttttaatgatgtcttacctcttaggagtccaggaataactttttaataaacagatatctcaaccaaacagttttatatttaatcaccttaattgtccaggccagataattcaatgtattttcatttttgtatgtttttgttttcttatcagtgtactttcagtatttacactgataatagatatcatattttaggtatttactaggtgcctgtacaagctgccatattaccgaagatggacagttattcagataatacaatagagagtaaaatttacaaaataatgtagacagagtattttatacagggtgtttcctctgtgtttaactgaaaatttagacttagggcaggaagagagatgagcgtttcttctcaaatgtggactccctaactgataccctgtttatcttttttcctcattccttttatggcatgtttctccttttaggatttttgcaatttctttatctacctttctgttctgcctcaaaattattgtattttctttcattttcctctggcatcgtgaagggcagtccagacttgaagaaagtgttagatctcaccaaataggcagcaggaagctccaagaaagcagatagataacatgttatacagttaaattgtctcacgctcccaatcactgagggttgattaatccacttactgtaactg

SEQ ID NO: 55901 - DNA, 1053 bp, Homo sapiens
aatgataagagctatgaaggcaaaagttgttattgatacaactagttgttcagcagtcttaggtgacagcaacgaaaagtattgcggttgtgtgtcaagttactaccttctatcttttgtaatatatagatccaaatcctacatttgctgttggataacctcaaatttgtttcacagtttttccagttattctgatccactgcattattggattactaatagatatctcataatcatatcatatacaaatttcattaatcttttctagatgaagtagaaaacacaatgaggatatctaaatatttttaggtggactggctaactgtgggccctttgtgactttgatcttgaaagcaaactaaaggtcagtatgtaaaacagtggttaggttgttttgtgagatctagatcagagctgccccatggtttcttgagcatttccaatgagttagaattacatagtaagacttcacctaaaaggtggatctactattgaaacaatttcaattatagagttagggtagcataatgcttaggagtaggggctccagggccagattgcctgcattcagatcctagttcctccctttttagcttagaggctaaaaagtttgacttctcaagtaaaaaattgacataataattctaatcacctcatgaagaataaacgagttaaataatgtaaagtgttcagaacagtggctggcagaaagtgaacacttaataatttcatttgatcatttctgaagaatcttttctaattccatcttgcctttcttttttttttttttttgagatggagtctcactctgttgcccaggctagagtgcagtggtgtgatctcagcttactgcaacctccggtccccaggttcaaacgattctcctgcttcagcctcccgagtagctgggattacaggcacctgcaaccctacccggctaatttttgtatttttagttgagatggggtttcagcatcttggccagtctgatcttgaactcctgacctcatgatccacctgccttggcctcgcaaagtactgggattacaggcg

SEQ ID NO: 55902 - DNA, 1255 bp, Homo sapiens
ataatatctgaaatattttctagaactctaattttcaacaccaaaaatagtcactcacttaatatctagtatcctcattttcaccatggtttagagaaccaagacctaggaaagttctcatggaattgagaagagattttcttctgcctgattcctttaggacattcataatctcatatcatcctttatttccatccaagagctattaagggtttattctttgccggaccttatattgagtcctgcatttaatgtccataccttttaacactgttctcttagtacagagagagacatatactcaaacaagtatactataatatcttcattgaaaagatgttgtaaattagatttaaatgaaatgttttgggaacagagagaaggaaggaacaaattcccatttgtagggggtaagtttgaagaaacgggacagaggaggggagtatatttaaagaagtttcacagaaaaaattatggtagaattgaacatatggaaatgaacaggatttctccaggtatttaaaagagcattaatggttagaaaaaacaatataagcagaagtccacaaatatgtaaagaacctagcatgttggaaaacagtccgccatttggtttattaaaatatatgatagaatgttgcttacacttgttttgaaaggctgtaaatataataccatggagtatgattttattttgtaggtattagggaacccttagagtttgtaagcagggtaatatggtcatctgtagtctctgggaataaaactgatggtatagaagatggtgtagactaaaagcaaagagaccagttaactcaggtgcccaagcaaggaataagacagctgtattattaatattattttaagggacctgagagatcatataatagtctttatcctttatggagccctaggatgcctcaggagccacatagaaagggcaaggatgggagtatatataatgctttgggcccctaaactcctccttatgttttaaattttttccttttattttcagttgacatgtaataattatacatatttatgggatacagagtgatatttcaatacatgtatacaatgtgtaatcaaatcagagtaattagcatattcatcacctcaaacatttatcatttctttgtgttgtgaacattcaaaatcttgtagctttttgaaaatacgtggtaagttatagctagccatatttaccctacagttctgcagaacaccagaactcattcttcctatccagttg

SEQ ID NO: 55903 - DNA, 1739 bp, Homo sapiens
gggtgatcgaaagagccctgtctcaaaaaaaaaaaaaaaaaaaaaaaaaaaaaagagaatctaatggatgaaaaattataataaatatgtctaaatactccttttagaatatacggctaataggctgggtgcagtggctcacgcctgtaatcccagcactttgggaggctgaggcgggcggatcacgaggtcaagatatcaagaccatcctggccaactaacgtggtgaaaccccgtctctactaaaaatacaaaaattagctgggcatagtggcgcacgcctgtagtcccagctgctcgggaggctgaggcaggagaatggcttgaacccgggaggcggaggttgcagtgagccgagataatgccactgcactccagcccgggggcagagcgagactccgtctcaaaaaaaaagaaaaaaaaaaaccaaaaacaaaaaaaaaagaatatacatctaataatgggaagatgtttgctttctgattccaaggatttgcggttttaaattgactctcgtttagccagcctcaaagtatttaggctagatttttaaaaaagtttgcatggtacagagattctgctttaaactattgtcagtgctattactttacagacaactttgtcttgctttttatgtctcaccagctacattattgagcagggggtgtgtgatttggttttatgtgaagctgccttccctaagacgttggcttttgcctacctagaagatttgcactcagaatttgatgaacagcatggaaagaaggtgcccactgtgtcccgaccctattcctttattgaatttggtaagtttttgcccctcacttctctctatcaagggagcaaacaatatggagaagctatttgttacactgatataatatttatacattttttctgatgtttacttgctgaagttttagcttctgcttccttttccattccacttctttttgtctttttgagtgactaaggctttgttctgaaaagtaattttctctagtcttttgatctttcccccatagaaattgttgccttttgccctttctgttatttggtttgattcttctttagagtcacatgtgacaggaactttgctaaagatctacttgattggcatataatggctgagttcttctttaccccagtccacagactcacactcacaataaggctcattttatggagatcagaattgggaaatcagaaagaatgatgttttgtttcttttagtagaataagatcctctaattaaaaaaacaaaacagaacaaagaaatagaagatacctggtactcatggtattggggtataatatttactacattcaggaatggtgagcataggtgtctgtatttgtacaagaattatagaaagactaattactaatcagacctggtaaagtatctgatggtaagggatcaaaggaaatgtcctaagtacagtaagtacagggagtgagaacaagtaggatcaggctatatcgctgcaatttttagttaaaagagaaattggttttactggcttagaatttttgaagtgtttcaagtttgctagataaatgggtcatcttgctttggaaaaacactctagtgtttcataactatatactctccaagtgctgctttatataatgtccagtttttcaaattttatttttatagacagtaatactcccataaacctccctcaaaaagaagacaaatgtatcagggtcatacaggaaacagatggcacacc

SEQ ID NO: 55904 - DNA, 3286 bp, Homo sapiens
gtatttcaaaacgttcatatataaattctctcaactatgacttgtttcatagggtctaataattgttcctctgctgagttattctcagcagatttagattcatttagcaaatgtttattgagcactaactatataccaggccctgttctgggcattcaggatatagcagcaaacacaataatttaaaatccctgtccagtgaagtgtatattcttgtaggctctgtaaaaagatgccctgtgcattgtcatggttatttctcagtccctgactcttcttccgtcactagatgtttttcttactcatgtgatcagttgctaattcagacgtggctgtcatgcctgtgttattaagtaacgccatgtttcccaatcaaaaccagtctctattaagcaactccaaatattccaaaagcattctttaaggaagaaacagccggattgcaaaatagttttttctgaaatttcaagaagtgaaaagtttgatcagaatttattatgtcaaatggagagtttgtgtttattattaaaatatgccctatattttaatatggtctagcttgtgtctatctggctatttctctaagtgtttagttaactgttataagaagataacaacattacaaatgtccttgggggtgaaaaaacttgccagaaaatactaaaaagcttaatttacttgcgtttttttttgtagtacttattgtattttagttacaactttcctatgtctattgaaatataaatcctgatagctttaacttcatagtagtctctactatgtggagaatcttagaaatgttagcagtcatcattgaagtatagcttaagactgtgtttggttaattgaattttctggttatctgagtttgttttacatggattatcattatcgtttttcaaaatataagagaatatgattcagaccattagaagattatgaagataataattattaacatgtaataattattataatttatcatgtgcaggcattgttgctcactttacaggcaatctcatgtacatacaactttatgacatagttactgttattatccccaattatagatgaagaaactaggttttaaataggttacatgacttgaccaatgtcacataacttgtacaggtgatatctgaaccaaagagtctgaggccagaacctgcacttctaaccaccttactatatagcctcaaaaattcagacataatctgatcagcatcatcagttaattagtatatgcaatgttagcctcaaaataaaaatgatgatttaagattcatggttgttgcagtgctgctcattttggttatttttaatgccttaatactttcggtaaaatacttccagggactaattaatgttttccttttttcctctttgacagcattggattcaaaggctaacaatttgtccagtctgtccaagaaataccgccaggatgcgaagtacttgaacatgcattccacttatgccaaacttgcagcagtagctgtatttttcatcatgttaatagtgtatgtccgattctggtggctgtgaaataatgaatacagtcactggtaagggagaacctagaacccagtaggtgtatattttcaggaaactgagctcacagagatgtgtattagaatccaagtggaacttctgcctctaaagaccttgcaagaaaagagatgtcctgaaaatgaaaggttgcacctcatttaatgaagcttaaccctatgtagaaagtctctttcgggggcagaggctttctctgggtgccaagccatatatattagggaatagtagattgttatttcgttttttccctcccagtgcattttaaaaacagcactggctggggcattctcattctctgatggagccatcaatgagatttaacttagtcaacctgtgctagcaacattctgaaattccttcaaagaaggcagtcctttgggaaggtgtttttttttttgtttttttgtttttttgttttttttgactctaatcaacattccttttgttggtgacatttgtgattttcagtaatctgagtttttgatggccttttaaacaagactccagtatgtgaaagttaattgctgtgctccacagatcttgtctattggcccctgtagaaagttaacctttgttgttttccttttataatttgcttattgcacaattgctttagggtaagtgaattatattaagatgccttgaaattatagcactccttgattaagaagctaaaatgtttctctcatttactccttaaacaaaagacttaaattagtttgggtcattattacttttattttgcagcatttggtttgttattagtgtaagagcaagtataggatatggagaggcccctggcttcatgagaacaaaggcaggcccaggttataattacagctttctcctgccccttctttactttctctaccacagttttctccgctgtttgttttcctcttgccacaatttgctaacacttaaaaaattttcctgcacccagtagtttcatatcctgtagacatcctcttaggacattctcaaatttcaaaataaaaaatattcatctatgtagttaattaaagttaaagtttctgcagatcaactactcaaactactaaatacatttacctgagaaaaagtctctgagagcacttcattcctgttttagttcgtgtaaattctctgagaatgttctggagatagataactcatttacagtggtttctattaactaattaaagtacccatgattttttccttttctgctcagggatgatggagatttccttttaccttttttaatggggtaaattttttaatggggaaaataggccttttaaatattattgccagggtctgcaatataacttaaaattcctgtacatactgcaaatatttctttaaattgcacaggaaaatgagcgaactttttatttcttaatatctttggcaaaaaactttaaccagtaagcaattttataaccctgagggatcatcaaagatactatcctgattcctggtaaggaaaaatatattatttccttataacaaggcaaggagaaatgctattttattcctgataatttatatagctagaataatttttttcctttcttttatggacctaaatctgccaattgggaattttgtgcatgaaatatgaagttactttttatagataatcagtgcttttaagtccctaaaaggctcctgctgaagtaatgatgatgttcataataaaagcctttgaaaggctgaaaacctacatagtggt

SEQ ID NO: 55905 - DNA, 1167 bp, Homo sapiens
ctcttggactatgtatttgacatgtaaaatatgtacagtattaacgtcaaccatctctttaaagttagcctataaatattgttgtataattttctttggtcagaaacacttggactgaatagtgacactcggtaaggattttcagtgccatttagcaaaacgtctttagtctatgcaactagcaaaaatctgcataatgcaacaacacagttttcacacttcaaattttacatgaggggttcttcacgattctcctggaacccagtctagcaaaatgagaggaaaggccctagggagatttatttctgttaaatagttaactctgctgagtatgacaaatagtgtctactatctcaaccctccaaaatttgcagagtgttgggactgtcatttgtgatttttttttttttttttttttggtggggtagttgaataaaattgggcagctaaatttttcagttccatgtgcctcccaaataaaaaacagaaaataagtagtttttgtgaattgacttgcagacaaagtagaaactgtgctgcatgatgttattttgtaaacagatgacattttctgaccaggcacatgccatccaattttctgtcaatcacactgttgtataaagcagcagaactgaaggggaaaaatgattgttgtatacactgaattgctttgcatggtctcatttgagataattgatgtaagaatcctgacttttttatatttggaaacatcaaataaaaatggaaaaaatgaaaaaaaaaaaaaaaagaagctgagatataaaacttttagaagaaaactaactcttttgacctgagttaagcagtaaatctttgtgactttgagttaggcagtaatttctttgatgcaacatcaagagcacaaataataaaagagaaaaaaagttgataagttgaacttaatcaaaatgaaaaacttctgtgcttcaaaggacaccaacaagtgaaagaacagccccacagaatcagagagcatatttgcaaattatactatctgttaagggactagaatataaaaaacacaaatcaataagaaatgacaaatgatctaagttgggaatgggcaaaggattacaagatatttttcaagagaaaaatatgcaaataagcacatgaaaagtcactaggaaaatataaatcaaaagc

SEQ ID NO: 55906 - DNA, 4912 bp, Homo sapiens
attccctcataagcacattttccttttacctcaaaacaccgctctcagaccagaaacgtccacacccgccctccgatggcctgtcgccctggctaggttttagggtcagtgggatcctccttccactggacccgggagaagacgctcaacagccccctccttcccctccttcctctccttcctctccttcccccctccctgcgccgctccagagcgcaacaaccattttcccagccaggagcacaccgtgtccacgcgccacagcgatctcactgattggtcgggctcctggtaaacaaggaccgggcagccaatgggagggatgtgcacgagggcagcacgagcctccgggccagcgctcgcgtggctcttctggcccgggctactatatagagacgtttccgcctcctgcttgaaactaacccctctttttctccaaaggagtgcttgtggagatcggatcttttctccagcaattgggggaaagaaggctttttctctgacttcgcttagtgtaaccagcggcgtatattttttaggcgccttttcgaaaacctagtagttaatattcatttgtttaaatcttattttatttttaagctcaaactgcttaagaataccttaattccttaaagtgaaataattttttgcaaaggggtttcctcgatttggagctttttttttcttccaccgtcatttctaactcttaaaaccaactcagttccatcatggtgatgttcaagaagatcaagtcttttgaggtggtctttaacgaccctgaaaaggtgtacggcagtggcgagaaggtggctggccgggtgatagtggaggtgtgtgaagttactcgtgtcaaagccgttaggatcctggcttgcggagtggctaaagtgctttggatgcagggatcccagcagtgcaaacagacttcggagtacctgcgctatgaagacacgcttcttctggaagaccagccaacaggtaagcggcccaattcattgttggagggtgaaagctgattagagaagagaattgaatacacaaaacctgtacgaaatgttttaagttgctcagtttgagtggtttgaattacgtgttgttgcttccttttttctgttttaatttgcagacattctcctccccccccaaaaaaaagggtgatttgtacaattttttatggtgctgtgtcctaaaggggatcctgaggggcgttgcctcgggtagttaaagtcttatgtgtgcataagttgcttattctttgtctacttcctatttgagatgttagtagagaactgtcctgggtgaatctttcagtattgcagggcttggcaacttgctgcccgacaaaatacatcagaatttctctttaagaacaatatgggatggattaaaaaatatatatatgggatgaaattgggggtacttcaataccttgcatgccacccaagcattccttatcacacagatgcattttaagtgtaacagcaagcctaatggctactcgattttctttcccttcaggtgagaatgagatggtgatcatgagacctggaaacaaatatgagtacaagttcggctttgagcttcctcaggggtaaatatcagctaaatgcatctttgaacttttctgtctaaaatatcttgccctcctttgatcacttactgttcttggagagcgttttaaaattttcattttcttgacacaggcctctgggaacatccttcaaaggaaaatatgggtgtgtagactactgggtgaaggcttttcttgaccgcccgagccagccaactcaagagacaaagaaaaactttgaagtagtggatctggtggatgtcaatacccctgatttaatggtgagatccattttaaagattctattctcctgggtcatgaggatgataaatcagacgtcttgggcattagattgaagcatctcaaaacacctttttatccccttctatataggcacctgtgtctgctaaaaaagaaaagaaagtttcctgcatgttcattcctgatgggcgggtgtctgtctctgctcgaattgacagaaaaggattctgtgaaggtaaaatcctagtgcttatggcagttaaaacaggaactgggtttaggggcaagggcatgggactggggtagaggaagtgtcattaactatactgagtatcagtaagttttcatctttctcattgctaggtgatgagatttccatccatgctgactttgagaatacatgttcccgaattgtggtccccaaagctgccattgtggcccgccacacttaccttgccaatggccagaccaaggtgctgactcagaagttgtcatcagtcagaggcaatcatattatctcagggacatgcgcatcatggcgtggcaagagccttcgggttcagaagatcaggccttctatcctgggctgcaacatccttcgagttgaatattccttactggtgggtagatgcagggtggcttcagcagagaaattgttcatctgttaccacagctgtcttgtttctccagacctctggtgtaataaactgccatcttcctttctagatctatgttagcgttcctggatccaagaaggtcatccttgacctgcccctggtaattggcagcagatcaggtctaagcagcagaacatccagcatggccagccgaaccagctctgagatgagttgggtagatctgaacatccctgataccccagaaggtgagccagacctaatgtcttttctttgtttctggtctacctgggtttgtaaaattgtgatggtccagcatttcttgggcaggattcttatgtggccatattttcttttctagctcctccctgctatatggatgtcattcctgaagatcaccgattggagagcccaaccactcctctgctagatgacatggatggctctcaagacagccctatctttatgtatgcccctgagttcaagttcatgccaccaccgacttatactgaggtgaggattgtcatctttactgttaaatttgtcctaagctttctataagaagttgacttagacggattgctaaactggtttgttctttttgttcttacctgaactgaaatagtctgtttctttctttaggtggatccctgcatcctcaacaacaatgtgcagtgagcatgtggaagaaaagaagcagctttacctacttgtttctttttgtctctcttcctggacactcactttttcagagactcaacagtctctgcaatggagtgtgggtccaccttagcctctgacttcctaatgtaggaggtggtcagcaggcaatctcctgggccttaaaggatgcggactcatcctcagccagcgcccatgttgtgatacaggggtgtttgttggatgggtttaaaaataactagaaaaactcaggcccatccattttctcagatctccttgaaaattgaggccttttcgatagtttcgggtcaggtaaaaatggcctcctggcgtaagcttttcaaggttttttggaggctttttgtaaattgtgataggaactttggaccttgaacttatgtatcatgtggagaagagccaatttaacaaactaggaagatgaaaagggaaattgtggccaaaactttgggaaaaggaggttcttaaaatcagtgtttcccctttgtgcacttgtagaaaaaaaagaaaaaccttctagagctgatttgatggacaatggagagagctttccctgtgattataaaaaaggaagctagctgctctacggtcatctttgcttaagagtatactttaacctggcttttaaagcagtagtaactgccccaccaaaggtcttaaaagccatttttggagcctattgcactgtgttctcctactgcaaatattttcatatgggaggatggttttctcttcatgtaagtccttggaattgattctaaggtgatgttcttagcactttaattcctgtcaaattttttgttctccccttctgccatcttaaatgtaagctgaaactggtctactgtgtctctagggttaagccaaaagacaaaaaaaattttactacttttgagattgccccaatgtacagaattatataattctaacgcttaaatcatgtgaaagggttgctgctgtcagccttgcccactgtgacttcaaacccaaggaggaactcttgatcaagatgccgaaccctgtgttcagaacctccaaatactgccatgagaaactagagggcaggtcttcataaaagccctttgaacccccttcctgccctgtgttaggagatagggatattggcccctcactgcagctgccagcacttggtcagtcactctcagccatagcactttgttcactgtcctgtgtcagagcactgagctccacccttttctgagagttattacagccagaaagtgtgggctgaagatggttggtttcatgtttttgtattatgtatctttttgtatggtaaagactatattttgtacttaaccagatatatttttaccccagatggggatattctttgtaaaaaatgaaaataaagtttttttaatggaaaaaaaaatgtctgtgagatggctttggaaaagtttttggaaagaaggtgtgtctaaaggagttttcctctacttaacaatccacactaatgaaaaccttgtggagaaaacactccctatggaccctaaggaatgtcggcagagtgggggctagaaggtgaagagggaaaccgtttgaggcatgtttcagattcactgaacaactatactgggattttccggttgtctaaactagttttccaaatccataggtaatcattactaaattccttcagttttggagttcatgggttcttgaaatacagggagatgatgtttatgagggcatttgaaagaaaagagtggcggttccttttttt

SEQ ID NO: 55907 - DNA, 1063 bp, Homo sapiens
gacagtctctatcacttgatgctgtagggaattcagtcggcctgcctgaatgcagttggggaattttttgaaggttcttctataccccatcttacggctttcaaatgctcagcagggttgctatgatagcatgccttcttattcagttcctattctggacacgcagcttgcccgtgactgttgcatgtcaagtggctggaaccaatcagcttatctaaggcttcctcagaagccaatcagagcctcggaaagtgacctcacccaagggagagctctgtgggcgagaaagcatctctcagatctgtgagtgtccctaagtcactcccttcctccccaccctccttacttcctgtaaaacaacaccacaccgcctacctcccttcccccaaagaaagggagtgagaaaggctaactaaattccacaaagggaagaaccaaaagagaaactgcaactcagccacacactggtttctgtaactggagaacaggatatttagggggacttgctctgcacagacatacctttcaaagtggcatctccagagtctggaagaggagggagtatggtgaataagtcagctcctcctccctcctcatacctggttttcttgcctttccccacaaaaatagctgtaatcattttttgtaaataaggacaagatcaaggtcaagtgtgggaaagacaggacctatgtccttgtgaacatgtgtgaacagacacaatcatgtccttgtggcctgaggaccagaggctcagaagtcagctgtactgcagggggcgtaggctgttctctacaatttactttgcattgccctacagatgaggccttgaatattccttggctgggctcgattgtgaatatgtgtcccaccatgggggtagaagggaagggacaaaggacaagcgggctgtagggctgtaaccctccagtgtgtcacaccagacccggcttagttaagcatttccttcattcctccagccctctgtcaccaggcctcacccacaacagagagacagataaaaacactttatttaaaagtataaaaccaggcttactccttc

SEQ ID NO: 55908 - DNA, 1050 bp, Homo sapiens
agagacctcctgagccctggatccattccctctctcttggcccatgtgtgcctcaatttttcccttctgtgaactgaacctgagtttctattcctattcatccccacatgagaccctggagaagaaggaagaagaagtaacttcagaggaggatgaggagaaagaagaagaagaagagaaggaagaggaggaagaagaagagtatgatgaagaagaacatgaagaggtgaaggggactccttccaccttagtccccctccctttaccctctttatactagggttgctctcctcagagggttggcatgccaacagagatagtgccccccagggtaggggcttctctctacttcatctgccccccttctacaaactacagctggaagagatgtctcaggcctggaatggtgtgactgagaggaaaggggtctggtacacaggaaggaaggtgaatgccaaattgacttttacttttttttttttttccatttcaggaaactgattacatcatgtcatattttgacaatggagaggactttggtggtgacagtgatgacaatatggacgaggctatatactgaagaaggactctggaccctcgtgtctttctttaggatacagagagtaactgtacctattatttgtttcttcagacaagcaaatcatttggtcagagttcatataatctgtctgttccctggagatgggaatagaggatgatgacagtttattttctacacttcccctccttccacatttgtatcacctttgctatcttggggaaagtgcaaaggacaaacatctcaattgtatgaagggagaaaggagaattgaaagaagaactggggttgttagagctgagatgactgtacacatacccctgcccaatttatatagctctttgtggagataattaggggtgggagcagtttgaaggagtaagcctggttttatacttttaaataaagtgtttttatctgtctctctgttgtgggtgaggcctggtgacagagggctggaggaatgaaggaaatgcttaactaagccgggt

SEQ ID NO: 55909 - DNA, 1008 bp, Homo sapiens
aatgacattaacttttcatgtcccagagataaaagattgaatgtcttgtacctccttggcttcctgtccattctactacatttctttttctctttgtttttgtctttattaggtttattcactggatctctgaatacccaggccccctccaccatggccagccggggtgggggccggggtcgtggccggggccagttgaccttcaacgtggaggccgtgggcattgggaaaggggatgctttgcccccacccaccctgcagccttctccactcttccctgtgagtctctccactcccttcccagactctcatgtgcccctggctgactgtacatgattctgaattcctcctggaccatcataaaaccatcctcgctttggccctctctctatactcccaatgcacagggatgttttgcaggcaaagaagtgtccacctttacttctccccagctttcaaaataatatgttactccctcgattgtcatttggccctctgctcagtgggagtgttagactaaattgggaggaggggtcttcctaaatttgtactagcattttctccctgaactgaccactgcccctgcctctttagcccttggagttccgcccagtacctttgccctcaggcgaggaaggggaatatgtcctggcactgaagcaagagctacgaggagccatgaggcagctcccctacttcatccggccagctgtccccaagagaggtcagttggaatgctagcatcatattctgagtgccttccatggggagtgccctgtgctcagcaccactgggggccagaggggcacaggaagcatactatctaactggggagatcataatagttacccctgtatctgaaatgcattatagtattcatggtttgttttgagtctcatgatagtcttgggacagcaggaggttaaatattaaaatcccatttcacgtgtataagtagggggatgtattttctaaaaaattatatattttttatttttttgtaaaata

SEQ ID NO: 55910 - DNA, 1065 bp, Homo sapiens
tcatgcctgtaatctagcactttgggaggccgaggcggatggatcacctggtcgggaggtggagaccagcctgaccaacatggagaaaccccctctgtactaaaaaaagtataaaattagccaggcgtggtggcgcatgcctgtaatcccaggtactcagcaggctgaggcaggagaatcgcttgaacctgggaggcggaagttgcagtgagccgagatcgcgccattgcactccagccgggcaacaagagcgaaactccatctcaaaaaaaaaaaaaaaaaaaaaaaattgattcgtatatttgttacaattaatgaatgaatactgatacattattattaactaaggttgatacttgattgacatttctttggtttttacctattgctctttttctgtacatgaatcccatttaggattccacattatatttagttgtcacgtctccttaggctcctcttaagtgtgacgggtttctcagactttactgtttttgatgactgacagttttgaggagttgggtatattgtaggatgcctttctgctggaatttgatatttttctctttattagtgtggggttatgggtttttaggaggatgatcacagaggtgaagtaccattttatcatgtaattttaagggcacataccgaaaacatgatttatgagtactgatgctgaccttggtcatctggttgaagtagtgtttttctggtctctccactgtaaagatattcctcctgatttcctaaattattgaatgagggccgggtgcagtggctcacgcctgtaatcccagcactttgggaggccgaggcaggcggatcatgagatcaggagttcaagaccagactgaccaacatggtgaaaccccgtctctactaaaaatacaaaaattagccgggcgtagtggcgtgcgcccgtaatcccagctattcaggaggctgaggcaggagagtcgcttgcacccgggaggcagaggttgcagtgagctgagattgcgccactgcactccagcctgggtgacagagtgagactctgtctcaaaaaaaaaaaaaaaaaaa

SEQ ID NO: 55911 - DNA, 1017 bp, Homo sapiens
gagggcgaggtatcggtggtgatgatgatgacctccgtacccttggccttgcaggcgtccagcagtgtggcaagggtctcgcggtccccgcggtccagggcgtggacaagagccgaggcgcccgcgtgatctcggactgaggggtctgcgccgtgggcaaggagcagcgaggccaccgcggcgcccccacccccggcgcaagcgtgcatgagcgccgtgcgccctaatcggtctgcgatattggggtccgcgccttgctccaggaggtagcgtaccatgcgtgccttgttctgggggtcgtcgtagcgggcccgacaggctgccattagcgcagtctccccctgcgcatcaccctcattcacgtaggcgcctccctccagaagcaaacgggccaagcgtagcttaccctgacccaccgcccgaagaagagcgtggccctcggtgtgcaacatagctgcggctggggcgagggcacagatggagccgggactgagacctgccgaggatgactaggggtatggggagggggagtggctggcagaggcctgaggtctcagtgacgaagccgatccctgcaagagagacatctcattgatagattcggcaggaaaactgaggcacagatgcagggacccagcgtggggtggaggagaccttcacggcatacagtccttcctctaactcatgcctttgagccggcccttcccccgcagcgcatgcctgaggaggtgggaagggtgcacccgcactgaaggactagcgcgcgtgcaaatgcgttcgtgcacgcgcagggatgtccgcacccccaccctcaccccatggcttatcagacctttcctctgtcccccttgtcttatccacacttgggatccccctttctaggatgctgaacgccacccacccacatacatgcaccctacagtcacacatgtattctcattcctaacctgttttagcttgccacaaccccaaaaattgagtggggggagggaagcagcctgcatttgagacctaaaa

SEQ ID NO: 55912 - DNA, 1034 bp, Homo sapiens
atggttgtgaatattgaaagccttacctaagtaccctcttcattcctataatctttcctgtgtaaatattagctgtgattcttttgtctatcttgcttcccgtagcaggaagtgcctttaagaatctccttgaagaacttaggtgctgacctcagttaggtctctaaagctgagttcttagtcccagttgggtcagtgtggtatgatatgaacctttaccttctcaatgatgttcacattcccctcccctactaggaggtgttggctcattattcgcaccgggccctggatgatgatattcgccaccaaatggccttggactgggtgagccgggagcagagtgtgccgggggcactgtctagagagctggcctctactgagcgggagctggatgaagcccgactggcaggcaaggagctgcgcttccacaaggagaagaaagatattcttgtgctggctgctgggcagttgggcaatatgcattcttccaactgctaggcatccacccacataactccccaggctttccacagcctttttttatgtctcctttctaagatttaggatgattttttgtacatactttctcatttttatactttaaaaaatatatatgtgtataaattctacacctagattcctatttgctaagagatcccttttcttactaccagtttttggatgtagttttatttgaaacatcttcagtccactttacaacaaagagcagcttgtctttgcagctttgttagctcttaaacttccagattaactgtgtagccatttcagtagcactaaaagattaactctagtgttcatgtgtccttcttttcaaatatcaggtaacttgaataaggattatgtgccccacccttactctcattcctgcttcctcttggactcaaacagggtatgagtatgaagattttgcctttagttcctgaactgaacctgcttgctatccctttcctccccaccactaccttattccttctctgcctccaaattgccactttgttttgaggcttccttcc

SEQ ID NO: 55913 - DNA, 2999 bp, Homo sapiens
agcagctgccgcggttaagaggaagccacggccccctgtagtctgtacctcctaagatggatgatttagcttgcgatctgttcaagatggccacagaaacacttccggtatctttccgcactaggcccgccccaatttgcgtgtttttaccgtgcagagggagggatttagagttagcctttgattggtcagcttgactggcgacctttcccctctgcgacagtttcccgaggtacctagtgtctgagcggcacagacgagatctcgatcgaaggcgagatggcggacgtgctagatcttcacgaggctgggggcgaagatttcgccatggatgaggatggggacggtgaggacagtggagacggctggtgggaagcggggaaggtgcgagagaaggctataataggaaaatttactcttttttcctcggtcgtaaggatgggaatcgaggaaccgggtcttgggtggattagagattccgcccccttcaggagaagggagggcgtgaccgggaaggcactaagactggaggcggtgtgggtcggcttgctggtagtgtattgggaaagagacgattgttacaaatgactgtcatagttacttattcttttatcttctggggttccagagagcattcacaaactgaaagaaaaagcgaagaaacggaagggtcgcggctttggctccggtgagtgtggggaaaatggggtagagtggcctagtagggcaggagctacgggttttggagtccccacccacctcataggaacaatgggagaaaggaggagttttcggtgatctcgtgtatgtcccttatagaagaggggtcccgagcgcggatgcgtgaggattatgacagcgtggagcaggatggcgatgaacccggaccacaacgctgtgagtaataatggaacctgtgaggtatccgtgtctgtggtagtagttagaaaccaataaaatagttaaacgcagtaggaatgggttcagagatagcttaaacaatctgagtccgcactcactctattcctgtgagcctgcttaaagtgtctctcatgtactcatacaacttccccccgtcccccaacagctgttgaaggctggattctctttgtaactggagtccatgaggaagccaccgaagaagacatacacgacaaattcgcagaatatggggaaattaaaaacattcatctcaacctcgacaggcgaacaggatatctgaaggtatcctaagtgacactttattgcctcctttctttcataagccttaggtagcattcgtagttctgtgtttgctgtggttggccaagagcaaagttgaaataaaatgacattggaaatctatgttttgtcagacacgccaaagagacagaaacggagatgatgtatatatacagtagagatatatgatgtacattcattgtttaaagtgtgtagatttttctgagtttagatttgaggaaaaagatactcagtgatacttggggaaataggagggttttcatatctgtcttttcactttccccaggggtatactctagttgaatatgaaacatacaaggaagcccaggctgctatggagggactcaatggccaggatttgatgggacagcccatcagcgttgactggtgttttgttcggggtccaccaaaaggcaagaggaggtaaaatgaagagggcaaatactgtctgggtgaagggaatacgaacgaaacagaatgaggacttagtattatgtccctctaatggactcctctccctgcttctttttccctagaggtggccgaagacgcagcagaagtccagaccggagacgtcgctgacaggtcctctgttgtccaggtgttctcttcaagattccatttgaccatgcagccttggacaaataggactggggtggaacttgctgtgtttatatttaatctcttaccgtatatgcgtagtatttgagttgcgaataaatgttccatttttgttttctacatttaatgttactttcctgtcctaaaattgaaagttctaaagcatagcaaggctgtatggatcattgtgaagatacttctagggactgaactctatgtatttcttttttttcttttttttgagatagagtcttgctgtgttacccagggtggattgcagctgatcatagctcactgcagcttcaaactcttgggctcaagccatccttctgcctcactgtccctagtagttgggattacaggcacatgccaccatgcccagctaaatttttaatatttttgtagagatggggtcttgctgtgttacctgggctagttatgtgagtttctatattagacatagtctcaagtttcaggtagggtttaaagtagagacactggtcagtatttcttttttggggggaactaggagagcaggagtagaagtgagatgttaagatcttatggcactaaagacttactattctgttcctacatactctgttaggatcagatagatgttatagaaatgccttttgtttctcctgcccttcttgatgtcacagttttttgtacttccagctgtctaaaggcatgaatctcctcttggagcattctcccagacccttctttagaagagtctatactaagttcttggtgccctcttcggcagccaagggtgaaggccccatagaggagaggatccaaaggagcattgaggaggcccaagaggaaaaggatgtggctcaggctgggagggacttcagttagcatggtgggggagaaccagtaccacatacccagtaggtaataaggtgtccagcagaggatgaaggtcagcaagataagcagggccagtctcagggcccggagacgaacacggggacaattgtcaaaggagcgggggagggcaaattcaccagcaggggctaggaatttagaaaatatactgtaattcagacactcagcttctgatctgagtatagggtgaattgatggaggggcatagctagtgagacagagctcacctcctacaa

SEQ ID NO: 55914 - DNA, 1076 bp, Homo sapiens
agatgactcgtgaagttaataggatgtctctaatttctagatgtgcctgagcttctgttcttttcctctttctttgtgtctctcttgaatatatttactttgtgtctcttaactctgtttaaggttctgtgtctatgcatctctctctttcttttttcaaccttctcattctcctatccagggatttaatcagcagaattactttttgataggggaggtataaggtttggcctgtaaggttctaactgccttcttttttctcacagaggtggcttatggcagatttttcctccttcaaactccaaacataatttttaagactatgtgccagtggactcttcccttatatctctgcaccacaagttgttggatgtttcctcttcctcccttatgtctacctcaccaacctcgctcatcatttggcccttatccttccttgtacacctaccttcagatttctgcttacactttgatttcagagctttattccccagtctgttcttactcctttgtcgcttatccagaatgatgctatgtgtagcatcttgctgtaaatcctgtacaatgattctgtgtaaatagctgtggcctatgccaataatgaagagcaagcctttcaggtaagcaaattaaagttcagtttgctcatcgacatttggtctggtccctcattttttggtaatttgaggcccctattcctgtcactgtggtttgggtttttctcgggattagccactaacatcacccacattatttttcttgagcacctacagtatgtaaagcaacatacttagtgggcatccaaaaatctaagaagctccacactcccaactttaagaagtttataacctagctgaggagttggggtggcagaggagtggtctaatactaaagttattgtcctggctccacaaagcacatctcataccagttcagatataatccctctaagaagcagaatgccatatgacagcataggctaagagccaaggacagaaccaagtggagtggggctggtaaggatttggagctgtgtcttcacaagttgagactcccctgggtgggtagggaaatga

SEQ ID NO: 55915 - DNA, 1102 bp, Homo sapiens
atccccatctggactcagcccggcggtacgccgtgtccgggaagcgaccgagactgggtgccggggctcgggtgggcgccgacgacgtggcaggcacgagctgctgaggatgggagagaagtagctgagagcgaggaaggggctgcggcggggctccgggggcggggctgcggggcagatgtaggggtggggccgaggggaattgcagctgttgggggctgaggcgcagggggcggggacgaggggtagaagtcggatttagtagtaggggcggttgttggggtagggccagggggaaaaggtgctgtagaggcactgggggcgagtcgatcaaggccaagagatgcaacagtagggggcacatgcagggatgggaccgcggggcagacgtaggggaggctccgggggaaaggcagctgagaggatagggtctttggggtactctcgggatccgagctttgggaaataccagtaggctgctgagatgcagggggcggggctgtgcgggccgatacctcgaggggtggggcagaagcatcctggaggctcagaggaaggtcctgccgtagtgaatcgcggtgtttgggaagaggcagaggcatgtgaaactatgggatagaaaggtgggaagttataggggaagctaatggagaaaaaaagacaggacagaggagataaggatggggagaaagaggagcaagtttctcatcacattccataaaaggggtccaagacaaagcctcctatgagaagaattgtgtagggctagcaagccctgcacatgacaggatctcctagagattcacagaagggagtcttctaaggagagcgctcccctcctgctacatagagtttggagggtgaccacatctgaggacatctcatagaacctcaaactaccgagttcatccgcctgcctcctggttttcttctgccctttgaaatgggagctatggtcctgggaaggctggaggtctagccactgggcccagctaccttcaggggatttgcgattctgtgccctgactcagaggcttttccttcatccacccagggtctctgtttagagctctgccctctcctcttccacccctataggggg

SEQ ID NO: 55916 - DNA, 1146 bp, Homo sapiens
cggcgccccctcctggccgtgtcagcagcattgtggcccctgggggggccttgagggaggggcatggaggacccctgccctcaggtccctctttgactggctgtcggtcagacatcatttccctggactgagttccctggattatggaaacttcgctgtcccccaacactgagcaagtatgctgtggagtcccaaccccagctactctgatccctctgggggctctggccaagggccagacagaccttcacagatgcctacttttggcctcatctctgcctgacaaggccagcacccaaagggttaatatttaacctctttttaaggacactggggtctgtttctggaaatgttctttagatggtggcacattcctttgggtatgttaacctaggcagtgggaggcaaatgggatggtatgtgagctaggagaagggctgaaccctcagccttgactatgtctagagcctcttggggaaggggcacctctcttgaaccccaaatgctctctcttcttattacccaaacccatggctctatttcttcttcacatccattgtctcttcatgtctattccattcccttcggccaaacagacaggtggaaaaactgagacaggcagtttcagagatggacagagaactttattttggattgtggatgtggacttttttgtacataaataagaaaaaccaaaatactccaaagatgacttcccctgcctcctactccagtatgacagaggaggatgtaaggccttagccatgatctgcaggggtctgggagtcaggcccggcctattgcttgggtctctctccatttatatatctaagttcacagtgtttcttattcccccctaagcttctagaggctcatggccctgtagttaggcctggctcattctgcaccttgccagggaggtggaaggaccctgtgccctccttcccaatcttctttttcaggctcgccaaggcctaggacctatgttgtaattttactttttatttctaaagttgtagtgaagctctcacccataataaaggttgtgaatgttctgtgagtgtcatggagatgggctagggaggggattttacacttcactttccagacccctggtttgggggaagagggtccatgttccattct

SEQ ID NO: 55917 - DNA, 1924 bp, Homo sapiens
ttgcttgagccggaggtggaagttgcagtgagctgatatcacgccaccgcactccatcctaggtaacagagcaagacccagtctcaaaataaataaataaaataaacacaggtactgaatgactaggaaacaggaaagtgtaagtaaaaaggagggctaagtaactccaggtagaatgagtgtgtgctttgccagttctaaaacagtataatttctgctatttttctttctattggacaaataggaaattcccaaaacaccagaccatgccccatccaggaccttctatttatatactgtgaacatcctgtcagctgcccgaatgttgttgcacaggtgctacaaggtaactcaatctggaccttctccccatttcctccatacggtcaagtacccctcatgtgcccacttcgccctgagctgctgaaatagaactatgtgcattccttgtctgtcttctctttcctcagagcatagccaacttgatagaaaggaggcaatttgaaaccaaagagaataagtaagtaacattttcagttgagttatttacatctttcaagatcaagggcctcaggggaaatttcctctagaaataggaatcaatagacgctgggcctggcagggtggctcatgcctgtaatcccagcacttcgggaggctgaggcgggtggatcacttgaggtcaggagtttgagaccaacctggccaacatggtgaaaccctgtcttcactaaaaatacaaaaattagctgggcatggtggcgggcacctatagtcccagctactcgggaggctaaggcaggagaatcacttaaacccagtgagtggaggttgcagtgaaccaagatcacgccactgcactccagcctgggcgacaaagtgagactccatctcaaaaaaaaaaattttttttttgagaagtaggaaccagtagagatagcaaccagtctacttgcattgaatcattggcttagattagtgtaaatcatgcattagtctacacttttctaacatgctcccagtgaaataatttttcagattaaatttgtgagaaacgtacaaaagcaccaaacttttaagtgcaaatgagaggcaataagaatttcaggagtgaagttatatttccaaataagtttgtagaaaatgtccttagaaggtgacattatctactttgatcaggaaaatggtaaagggtggtgggtagtgcctcagacacacgtggtaagagaatctcccaggttagggaagatgtctcagagttgtgtttgtttgacaggcgtctactagaaaaatctcagagggtagaagccatcattgcatctatgcaggctactggtgcagaggaagcacagttacaagaaatagaggagatgatcacagctcctgaacgtcagcagctagagaccctgaaacgtaatgtcaacaagtaagcatcataaacttcagacctgcatttcagaataccatccagaaaatccattttgacctcctgtaaccctccagcttagcatgagcaaacctaaactcactgtctcctccagctcacttaacagaatttaatccacctatttttgtaaactagcaattctgaagatgttctgagcttcttctccatcaccatatacactctcttgttcatcaagtactgataaattttttttaagagacggggttttggctgtgttgcccagactggccttgaactcgtaggttcaaacagtcttcctgcctcagcctcccaagtagctgggactacaggcaagtgccactgcgctggcttaattttacttgagtcatgtgtctcaaatctggcctttcatcttggtccacacgcaggccttcatcacctctttcctagaccttcacatttcagtgcacaatttgtgcacctctttcattaaatttatttcttaagtattttttt

SEQ ID NO: 55918 - DNA, 1051 bp, Homo sapiens
gggatctgaaagaggaatctgtggatactgaggaaaggtagccagaaaggttcaaagtaacgccaagaaaaaatggtgtcggccaggcccagtggctcacacttgtaatcctaacactttggaaggccaaggcgggcagatcgcttgagcctaggaatttgagaccatcctgagcaacatggtgagaccgtctctacagaaaaatacaaaaattacccaagcgtggtggcacgcacctgtggtcccagctgcttgggaggctgagatgagaggatcacctgagcccagggaggtcaaggctgcagtgagctacaatcacaccactgcactccagcctgggtgacaaagaccctgtctttaaaaggaaaaaaaaaatggtgtcataaaaccaaggagccacataaagttttaagaaggaaaaaatgtccaaccatgtcatatgcttccaaaaggttaaataagatcagaagtggaaattattatttgaacttaacaacatagaatccttaaggacagttgtggaatttcactggaatgcgagtgacaattgacatttcagtacaatagtggaaatgggttgcgtaaatctaggtagagatacaactgagatggccaactgtttgagaagcttggctgtgacagtaaggaaaagaagagaaggcatagggttgaaagagaattctagagtagaaagagacttggacagggtaaaggctgataagaaggcggtagagaaggaaagcctgaagatgttagaggacagggtaaaatagagctggatccccaagaatgaatgagagagtaagatttggaataccaatatgggcattaaccttaggtaaaaggagcatttttcagctgtgataaaagtgagtgaaaatatgaatcaagaacaaaaaagaaatgtggtgaggatgtgcacagagctgagtgagttctggcctagtgtcttctattttctctgtgaaatgagaggcaaagtcatctgccgagagtgagaaggaagaagggtcaagttggagacttgaaagtaatggagaagagttaaaat

SEQ ID NO: 55919 - DNA, 1095 bp, Homo sapiens
tagagaaggggtttcactatattggccaggctggtctcaaactcctgacctcatgatacgcccacctcggtctcccaaagtgctaggattacaggcctgagccaccgcgccagcctattatgaataattttctacatgaatacgcatcgtactaaataactttaaatgttggtgtagtatgccattgtatgggtatggcatcatttattgttagacgttagattgtttccactaagtcggtattataaagagaactaatgacttcattattattagctttttctttctttggacacaatatccaaaaagaaattgttgtttcaaagatatgcaagatttttaaggctttttgatatgtattgtcaaattgccctccagaaagaatacatgaatttacactcagcagctctgcttccagcgtgaaagactttctattgtaccattttggtgttttttccctagctctcagactccccagtacaatgactcaagcagaaattaagctctgttctttgttgctgcaagagcattttggagagattgtagaaaaaattggagtccatctgataagaaccggcagccagccactaagagtaattgcccatgacacaggaacatcactggatcaggtatgtctaaatgacattcattttctctcatttctttcactaatttatttcacccacctttgaatattgttcttctcaccccagaaaaggaaaaatgaagaaagcctgcccttggagcagaacaatgttatttcggggagaaaaggatgagacttagacatcaacattttgtttctcaaagtgttcctagttcatcacagcttttaggcaaatctttgctcttcccatgccgtacctcatttattcacaataagtctattaatctcagtactgcctttaaggaatgagaatgatgaaagtaaattgtgttttgagagataaggatcagaggaaatatagcaaggaatcttcctgatttattgtattgatgtgtgattcttattagctcctccagtggagagaggaaataagtgcagaaattatctagccattttctgatgcttactaagctgttggacaaaaaatt

SEQ ID NO: 55920 - DNA, 1191 bp, Homo sapiens
tgcagctttctgggagggtaggggatgaaggagtagaggaggactcagggatttatgtggtctccagattacttcatttctggagtagtttacagtatgcccattatgaatgtgtctcatcctttatgtgtgtagtggagaaaaaaggttgagtttctgatcctcaaggtaaagtcgatattaatagttaactaaagtttcctacattctggcccctatctgcctgtctgcatatccacattcataccattcccttccaacctccatgcatgctgttttctatcatcatggtcctagacctagaatttcctttttcattggacaaatattttaggtctctgtttcagtcagagctttccctagttcccccaggcaaactctgtatttgtttctgtttctagtgttcattggttatagcaattattgtattaaatttgctgtttcttggtttgactgtctcctcaagaaactaatctttttgacatgagggattttttttttcttttaaaaaagcacttgagggccaggcatggtgggttttgcctgtaatcccagcactttgggaggatgacttgagcacaggagttcgaggctgccttgagccgtgattgtgccactgcactccagtctaggtgacagaatgagaccccatctctttagaaaaaaagtgtttcagtgtttgaattaccatcctgtctttctttgaagagccaaatacagcttacatcatcttcaggtaaaacaaaatttagggttcagaaactatatggcataagaaaatagttgaactgggcacagtgtttcatgcctgtaattccagcactttgggaggccaaggtgggcagattgcttgagctcaggagttctttcagaccagccagggcaacgtggcaagaccttatctctaccaaaaatacaaatagctggtcatggtatgtgcctgtggtcccagctgaggccggcaggattgcctgagccctggaggtcaaggctacagtgagccaaaactgtgccactgcactccagcctgggcaacagagtgagatcctgtctcaaaaaaataaataaataaaataaaataaaaaataaaaaagaaacaaaatggttgaaaatgtctttcccatgcctttggagtctaggatgaggtttaaaaaaaaatgtgtttctcaggtctattttaataggtagtta

SEQ ID NO: 55921 - DNA, 4537 bp, Homo sapiens
tacaataccaacactaaacgtgtaagattagcatgactgcaaaattagcaattttgtgtggatggcatgctaacttgggatagctttttgtttgtgccattataattgcatcaaataacttatttcaggcacttatgctctgcatgtgctaattaaaagatatattggttgtgggagaacaattaatgggcttatcttttgccaacttttcaagtagtaaccctggtttctttaggcagatagtacttttatgcaaatacagttataaatgagaatgattaactgtaggatgaatctttgtctagcagggaactgtggattctgtggtttttgttcttaattcttttatgtgtctttgtagatcaaaggttgtcttatataggtgctattggtagcaatttactcaaatacaaagactctgtggtttgaaagagattagtgttttaaatgaaagaagaaatctttttcttagaatccttgtcttagaggcagtatgatatttccttctataaagttcataaacatttgctgatttaaatacttagcaattgcagtggtaagtagtggagggtaaaaaccagtaagaggagggccttgcatgtaaatattagataatgggctccatctgctcttaaacttccatgtagaggagcaccttgtaagttttcttaagctttgtaacatttctcagaacaatgtggtggtttttattatcccttctctatgattagctctattattctttaaaggaattttaaggaaagggaacggtgaggtagcttcagggagagcagaaccccagaaaataagagttgcggtttcaattaccaaggatgtttgaatccctgaaactgtgtagtaaaggcaggaaggaagagtcttggaagcctgtctgggcttgagcaatcaaatggatacatagccactcaatgtagttttttatggtatgtggtagttcaattagctgtttatttagcatagatgtacaagtacttttgggcttgttatacatttggagtgatttttacaaaagcgtttttctgaaattaatgcaggtattaaatggtttcttatcagggaataaggcttgagaatggttgcataaagagtggcattagctttgctttttcacttttggtttcagactaactagggtgtgtttgtttcctcagtgagctcagcacaatgcctggattggtattgtaatcctacaaatgaaaactatttgtagtagtttgtgaacttaccattggggtgagtgtttgtatgtttgtgtgcttaagtgtgtctcttgaagtaaaagtggtatccagcagttcctgtgattctttccatcccctcttcccggatgtgttaacttgttttctttgttctttgcaaatttcatggggacaatgggatttaatatttctctccactcttcagggtctttgggaatagatagttattttatcattttcacatgtgattaattcaacaacttttgagtgtcaatataggatattgacattgcaggattttaaaaggtgatagtactgtgtaatgtctgacacttaaacactctacatgtatttgaggcattaataaattgcagtctttgccttctgaatttatattaatgaaggagggaaatgggttgaaatggatgtggcaaatcctagatatttataatacaaggtaggttttagaatcaaagtgagagtgcagaagggtgtggaagagtcttatttggttggtgagttcagaagggcttgatggaggaggtagcatttgagatgggtcctgaaaggtgggtagggggagaaatatttattgaatccttttataatgttttaaatacagtaccaggccccttacattactacatttaatcattcctaagaaatattaactattgtagcctcaaatgttgtgttcatctggtggttgaatggttttttagtgaaacattttgttttgttagcgttcttgaggataaatatttgtcttttgataggtcaaatccgaattgcattgctgcctgtgggtcctccttccttctctatggtggcttctccaatttttcactggatttagccttgaaaaccacttgattttgtggtttatgatacttttcatagattaattcacatgccagttattcataatttcctttaataggtgttgtgttgggatgagttatttttccttattgggctttgttctcattatgccattctatatttagcttctgggaggggagcttgttcctgggaatagaatcaccactcattccttttctctttagttttttaggtggtggcggcagtcggatagacaataccacaacaacacattttgcagaggtaagttttcctttagctgtaggaattctttaagaagtggttaggtgttaaaatcatggcagatactaactttccagtgtggcacaacatcagagtttaactgaatgtataagaaaaaatgtgggccgtagtaacccttgggaagatttgtgttttcagtagctggggcttgggcgtgttacctttgataaacccttgattaggagaaagtaatagcctcaaactgtattcttttaaactggtagtgtttttaattcttgttttctactttgttattgtatatacagtgtgagaataagaagcttttgctgtttttgaaataacagtgttgcagactctgctttagtggtgtgacaaccaggtaaagtgcaggccaggataagttgtcgaagtcacaatgaaatagtcttcaaccttgtacagaggtactgatttccagggcttacctctagtcaacacagtagtttggtgtagattaaggatgtttacttgcctttcagatcccaagatggggtctgtaaataatttctatatcttcttataatgtggcgtccatattttttgggaaaaacaaatcttaactgtgatttgaaaacagggcattagtcttcattcttgaataccattttatattgaatccagagtaattttcttttttcacttcgtccattggcctaaagtctctttagttgtgttttttttttttaaaaaaagaaaccattgtaactgttcttaagtgtataattcagtggcattaatactctttgtttttaatcatttagagactacaacccagaaggtaccagtcagcctataaaaaacactgacgtttttcttttgcttgtttgtatgtgtaccctatattgccgtacaacttgttcagctctagaaagctgacagatgctaaaaggaagaaataagttaaatcccataatcaggatttctttatgttttaggatcacattagccttttccagagatagccgaagtgcctagagagatagcaaaatatttcactgttttgtatgtaaattgaaattgtactagtagtatatttgaaaagtgatatttaataagaagcctgtaaaaccctaagcttctctcccttattatttgaaaattattttaagacctgtagcccccacattttgatgttgttagatttatcaacattgtctgggtaatggtcctgttctatttagggtggtttttctgcttatggtctgtgctacttcttaatatacagtattaagagttttggttaactctgaactgcccgggttgattagagtgattccagacagatcgtgttttgaacttgcatttttattttcccattttaatggattgaaaaacattatttaatatgtgttctgggccaggcacagtggctcacgcctgtaatcgcaacactttgggaggccgaggtgagcagatcacctgaggtctggagttcgagaccagcctagccaacatggtgaaaccccatctctactaaaaatacaataaattagctgggcatggtggcatgagcctgtaatcctagctacatggtaggctgagacacgagaatcgcttgaacccgggaggcagaggttgaagtgagtcgagatcgcactactgcactccagcctgggtgacagagcgagactccatctcaaaaaagtaaaatacaataaaatgtattctgtttgccagtcctggaagcctttatgatttcagtattctttcctcttgtgtgtgctatttgtgataacacagattgtcacttactgattaggcatatgcagaagaagaaatttcatttgatttttctttagtgttctcttttaggtaatggaaatagatcggtctgccaattttgtaggtatgactcaccagaaagagatgcattgagtaagaagaaaaacaaatatatgtagtcagtttcctaactttagtaatgctaaatccaacactgatggcatgagttatccttcaggtgttaaagtatttttgctgattcatagcttgtaacttcgtgttctttagatgttgccagggatttttaataaattagctaagaagtgtgtgtgtgtgtgtttttaagagatggggccttattgcccaggctggactcgaacttctgagcttaagtgatcctcccacctcaggttccctagtagctgggattacaggcaggtgtcactgtg

SEQ ID NO: 55922 - DNA, 1050 bp, Homo sapiens
aaattttctttttggcataggaccgaaacatgcattttaattaaacattcgtaatttttcttacacagcaaaaccaaaagccccacaatggaaaatcattttctgttcactgattgttaaaaactttttttaaaaaaagtcctgtgacatcaagtgcttgccaggatgtggcacagtagaaactcttaaacacttggtgggtgtttaaattgctacaaccagtttggaaaacaatttgtcattacccagtaaagttgaagatgtatagatcatgtaatagttttacagaccaaaaatatagaaactctggtacctctgcagaagaagacatacagtaatattcacagtggccatttgtaatataaaaaactgtaaacaatccaggtgtttattgattgatttttctaacatgtgacttatttctggtctttactagctttggggccatttggatcacacgatgttttttcaagattttagaccctttctaagtagcagtccactggaccaagataatagagccaatgaaaggggtcaccagactcacactgacttctggggagcaagacctccacggttgccattgggtcggagatacagatctcgaggaagttctcgtcctgacagatctccagctattgaagggtgagttgttttattttaagttctttttaaggtagtttcaatgaaggacaaattggtataatctaatctttataagggtctcatacttattacctttgtggacaagatggacatatgtagaaaggatgaaagtgaagctaaattgaatgttagtactcacccgatgataaaccagagagtgagaaatgctatgtctctgattaacatttttattaatggctcagattaatttatagatgatatgtgtctcagtccattttgtgcagctatagcagaatacctgagactgggtgatttataaagaacagagattcatttcttatatttctggaggctgggaagtccaaggttgagggatccacatctggcgagggccttcttgctgtgtcattccatgttggaagg

SEQ ID NO: 55923 - DNA, 1045 bp, Homo sapiens
tccagtgaaacaatttcttcaggtttttcttttgctgaggcatcactccagtatctctttgggtaacaaagactcattcgtgtaaagaactgtgtacctgtgccatcttaagtattcagagtgacaaatgctaagcatgtgtgtgtttatatgtgtttgtgttataatcatctgaaacaaccttaacatagaattattgcttaaacttttttttaaaggactctttaaatgatatcttattcagaaacccaatgtgtacaacatacaaaaatggaactacccttgttaaagggaggtgggtccagagttccactggctcggcatcccttttaacccttccttatgttgatgtcagatattcagggaacatagtttgaaaaactataccataccatcagatccctttccagcttaattcacaaaaatctattaatctgtaagatagcagagctcaggaagatagccataatagcaaaatagcacaccgctgtgtggcaggctgatttctgatgctgtctcttgtgtactagccaatgaaaagccattttggtttagggaattagttggtgattaggcagccatggatatctgtagagtacttttcattagtctgttgtcttatctaattttttcttctgtaacagaatactacaacacatctttgcaggattctttgcaaattctgccattcctggatctccacaccctttttcctggtaagtaactaattgttttctatcttactctattggagtgacatattttaggtgctgtcatttctgtgcagtagagaaaaagagctgcataggccgggtgcggtggctcatgcctctaatcccagcactttgggaggccgaggctggcggatcacgaggtcaggagatcgaggccatcctggctaacatggtgaaaccccgtctctactaaaaatataaaaaattagccaggcgtggtggcatgcttctgtagtcccagctactcggaggctgaggcaggagaatcacttgaacccgggaggtggaggttgcagtgagccgagatcgcg

SEQ ID NO: 55924 - DNA, 1247 bp, Homo sapiens
cagctaatctttgtatttttagtagagacagggtttttaccatcttggccaggctggtcttgaactcctgacctcgtgatccacccgccttcaccctcattaacagtttttacagaggactttaggacagccacactgaaataggatgcttcatcccatgctgaaaagagcatggtgaaagtggcaagtggcttgagacgctgcactgataagattgctgagatgaatcccttggctatggtggacagattcacagtagcaactgactgccagagggctgtcacacattgggaagatgtttttcctgttttactgagcagatcatctaagccccagtttatttcttccaactctttacatcaaaaaataggccttatatagttcctatataggcctttttggagtaggccccattcatcattccttcttttcatgtctctgtctactaccacctttaccctcattttgaaatacaagtcatgcctcttagctgcctgctacttgggtgtacattttcttttgtctcttgtgtcttttctttatgcattcgtagggttggtagagacattgggttagttttttcttctttccttttgcctgtttactttaaaaggcatttccttcttcaacagatatgggtttagagtgtccagtatgcaaagaagattacacagttgaagaggaagtccggcagttaccttgcaatcacttctttcacagcagttgtattgtgccgtggctagaactggtgagtacagcaagtcatggcttctttgggggatgattcagagtaaaggtatagttaacagttcctcgagatccaagtagatcagattttatcccataaatccctggcttactctgatactgttatttgtttggaacttttctgaccaagggttgcaaactatgttctacaggtcattgtgtcctgccacctgttattgtaaataaaattttattggaacacagctatgttcatttggttatagattgtggctacttttgtgctacgtcagcagagttgattagttgtaacagctgtggtgtggcctgcaaagcctaaaatacttattttctgtcccttatgtatttgttttgagacagagtctcactctgtcacccagactggagtgcagtggcgtgatctcagctcactgaaacctctacctcctggtttcaagtgattcttgtgtctcagtctccagagtagctaggattacaggcgtgcaccaccatgcccagcc

SEQ ID NO: 55925 - DNA, 1132 bp, Homo sapiens
ggttgtaatcttgagcaaatctgattctggtgggagtgggaagggggctagcctttgatcgctccttgctggaaggaacaatcaaagaagcaatagatgccactcaaaaagttgaaggtaggttttccacgtatagctctgaattgttggcacagtggtaagacaaggatattcactgaaactagttcatgagctgagagaggcacagaggtccaggaaactccctcctccttttccccacatgtaagcatgataacttgacctatgtggtgtttctggacctgaaaaagcatgtgtactattctactgaatactacctctttcaataattctactaagccttgagttggggaagaaggataaagaaaagaaagcttctaagtagtgtatattttctcgtttaatcaaatattgagctttggttttttcctttggttaactttaaagctacttgaattgaatataggagaaaacaaaaaattggattcaaaagctcattctcttcacctgagtggaaaaggaaaaaaaggccagagatgattttttttttttttttttttgctctaggatgacttgggaatcaaagatagtaactagtagtaggttgtatggctagactcaatttcccctttataatttttattctaaaataaaatttattttactggttacagtggcctaaccaagggaatttaaagtcaacaaaaaattatgtctaaaggtcagactgtttcatattcatgtttcctcctgaaaactggcataggcttaaatttggaagatccttaccaaggattacagataaggtctctgttttctttttgaaatctctgttttcttttgatgacttgcaaataagggactggaatagggaatgtttaggtggtcctgtttctggaaaggggaggagtcaatctcagaatgaatggggtggtgaaggatgtaagaggtgctttgcatatagtagatcattactgagtgtaaggttttagagtgagaaggatctgtattaattgctgtgacaggcaacaattaactctttttttttttttttttcctttgagaaagtgtctcaccctgtcacccaggctggagtacagtggcatgatcatggctcactgcaacctcaacc

SEQ ID NO: 55926 - DNA, 1004 bp, Homo sapiens
tctagagatcagacccctctggtggatagacacagaagaaatgaaggcctatggatttctagaatatcattagcagcaatcatttgaagttggagtccattaaatccagcaggctttgttccccagttcaaacagccaaaatacatggtggtacacatctttagtcccagctactcgggaggcttagttgggaggatggcttgaacctggaggcagagaggttgctgtgagccgagatcgcaccactgcactccagcctgggcaacagaatgagaccctgtttcaaaaaaagaaaaaaaaactggagatgaaagaaagctataaccattcctgagctcgggggggaaaaatcaatagttgacaacaaagttgtttatctgtgggaaagagaacaaagtgttggctggcagacaggaaccgctcgggggtgagagccaatgagattttttttttcaccaattttattgatgaaaaagctaattataccattaaattttgcttttttccaaaatgattagattattgctgccaggaaagagaataatgtggccgtggtcaagaagaaacattaaataccctttagaagttaggaaggcttggtaatgaaaaggagggtggtatgacctctggatctggcaaagtagaaagaactaaagccactggtctattttccataggaaagaaatagctggtgggacctaggggacttcttcccagcccaaggcaggccaaggactctcaggccccagacggccatcaacaggattgatatatgagatcctcagcaccaccctcaccaactcctctgcacagaaagctggaagtctgagctgggagctgttcctgagtgctctttgtgtaactcctatgagcttccaggtgttattttgaaaaggaattctgggcctggcatggtggctcacgcctgtaatcccagcactttgggatgccaaggtgggtggatcacctgaggtcaggagttagagaccagcctggcaaacatg

SEQ ID NO: 55927 - DNA, 1026 bp, Homo sapiens
tgcagtgagccgagatcacactgctgcactccagcctgggcaatagagtgagactctgcctcaaaaaaaaaggacaccaggccttagagctggtccaatatgttggagatgcactagaaaaggctgttctggcccctgaagtctctagccacagcagaaaagagatgctcgatagaaaagggattccagtggctaggttggggctctccctcccagacgctttgtcacccaggctgcagtgcagtggcgcaatcgcagctcactgcagcctcgaattcctgggcttaggcgatcctcccacctcagcctcctgaatagctggagctacaggcacatatcactatgccctgctaactaatttttttagagacagtgtcttgctttgttgcccaggctggtctcaaactcctgggctcaagtgatcttcatgcttcaggctcccaaagtgctggaattacagaatgagcccccatgcctggcctgaagcagcttctatttccattcatcctgcccctcctgttgccccattgcaggggcaaggtcctgagccataggaggaagacaggacaagtgtaaaaccgacagctagggctccggcacacagttattattaagggtaagacttctgccagtgccccgacacctgctggctgaaagctttttcttttataggagaataagaacaggggccagaacagcaagaggctgatacagaaggcagaaggctcacaacagagcactggagtctgctcttcacaccacctgcaaggcaagccctcaagttcctctcatcacagttccctacctacaaatcagaataaaccacctatcccttccctcctggagggacaagaacggatgaccacacaggatatgggggagggtgaagaataggccacaaagtgctccaggcaccctagaagccatggcatggtgattgaagatagccatccctgaccttcatgcccacagagacgtacagtacaaatcagacagagagcccccagctgcccaataccaggcctc

SEQ ID NO: 55928 - DNA, 2487 bp, Homo sapiens
attccaggtgtgatggagtaaagtgtgggattgttgttttgctgggatgcaaataactaaatgctttggtggttaattgctaagagtaaatactactttagccatccaaggccaccttctgcagcaaaaggcttttgtggagaaccttttatgttcccaaccactttttgaatggtgtgccatttaaaaatccaggccagatcctattataaccaactctcaggatttacagccttcagttgtactagaattttgtttttatccaatactcattaaataagtgggccacttaggaagattcaaaatcttggttattacatgaagtttgttatatttcttgtcaacagtattgaaatgtaatatgtatgtgttcatgtatgaaaatttttactccacacaggtgtttcagtagagtggggcaggaaaagagatctcttcgatttctttcaggcctgaggcttttgtgaaatgcgtcagccccctgtgacagtaggttttgatgctagtgatcttcagatctttctctctggaaatgtgcagagagtgtcagtttcccaagttctgaggtaactctcagcccagatgtgaaatgggagcctaccagctggtatagaagggaatgggtaggaggcactgggtgctgactcattcagcactgtcccttttctatactgctgatacatcccatggttctgagaagccttatctcagtctatttggaagagagggaggaagagaaggaagtaacccaaagtactactcatttatcattgtatattgattagttaaagggataattaatttaatgctgaggagagtttgacagattttgaaaatgagtaaaggcaaaaaaaatttttttagcctttattttgcttttgggaattttacagagtcaaagtaggcagaataagaaaatagttcttcaggagggccgacctttaaagaacttcaacatagtttcggaattgtggggaagagaagagtgactgagctgagaagtaataatagaataaagggttgagtaacttagaactgaaaatgatctcttttaaaaagaaattaaatcagacaccacatggtggtgtccttggatctcactgtacagaattagcagtgtataaccatcttctcttttcatcttgttccaattctctcctctttcctttccattctgctttaagctcatgtgtcaggcagactttaccagagtgtcagacattacctaaaacacatacgttagccatgctgctggtatggagaaattccacaccatgattattagcctcctttaagctgaatgggatttaaccattctaggcaacacccctgaagggcatacctaacctcaatagtgttggcttttaaaacgtatgtttgtatggtagagaaactttgtaaaagaagaatccaagagaagtttgtgaggatcctacaaacccaggcccactcactttgctctaattctttctagtatcttgtagatctaatgggtctgggataaaaactttgaaaagtgtcaatattccatgtatgctgctgaaatgaagttaagtttggaaagaagtgatacctctagactgggtttatattaatctgggatataaatgaagaagacatactaatagaactccttgcttttaattggggaaatagggctttaataattttgacctcaactaaaaatgatatgcaatagtctctgtgtgtgtttgaaatacattgtgttctcagagatttctacattctcacgttctagtgatttggggcatgggcttaatagcagatgtacagtgtattcctgcattattgtgattccccttaaagcccagttcttgctgtcttctaccaggggctgctgactccagttacccatggaatgcaggacctgggaggggtagccattagggtctttcaaaactctttggatctaagcatttgtctctccttaagtgccaatcacaattggatatggaaggactgtgatttctgcaatgaacccaaacttttagagtaaaaagccaaatttaaattataagaaagaagggaaaaaagagaaaaactcaagtctattacttgtagagtccaattcttagcaatggaatcgctctaggattctagtttgggctttgtctggatttgcttttctcagttgtgctttgaagtgaataagctttgttacaaattaattttttattagttccaatattagttggagttaacttgaattgattgtatgtagcacagcacttttgcagtaagattggtgtgaaatactaaacactatggattttgtaggtgtcaggttaaatggtcaagggatacctacattaagtcatatattaggtattgatgatcttacttcttttctgttcccctgtacaaaacacttacctaacccagcttgtggttttaggacagccaaagctcactgttgttggttagtcctaatcactacacgggtctcataaatgagacttgtttgaa

SEQ ID NO: 55929 - DNA, 1052 bp, Homo sapiens
agctactttcaggtgcctcattcatatatactcaggtgcttgcatctctcctatacactagttaaaggagagatgtgaccagatttgccctgtcccgtcaactctagagtcctccttggtttttctgctgctttagagtctgggttggaaatagccattctgttctgtcttgttatgtctttgtggtttggctattggaataaagttatatagctctgcagttatcaaaccaggctgattatcattagagtctcctggagaagattgtaaaaatacagattcagcagctccattcctagagattctgaataagtgcatctaggatgggccctataatttttttaagctgcttttacttggatatatagctggattcgggaaatcactgatatagctaacaaactatgtggtacaatataacacttaaaaatatattattgaatttaatttttataataacgttgtaagtatttttaactcctgttttatagataaagaaactaaggctcagagaaggtcaaattgccagtaagtaccagagacaggactgctgaggtccagtcctcctatgctgacttcatattctttcctatattatcattatgccaggtctttccaagtaggtttttctcaggtattcctcatttccacaaaacctgtggaagtgtaaaagtgaattgtttacctgccttgcttctgtcgtatttaggctttgtgtcagcatgactctggagtgttaacccgagaagcattcatggtggataatacagtacgggggaaggtagaaggatacacttgttcttaatcggatttgcttgggttctttgggatctgatggattttgcctcctgtaactgctccttggatgtcatttaatttgcctaggcttgccatctcctcctgtggtacatctgtagtctacaacacagcctgggaaatggtacctcttgctgtcttcttactggttctgactcaggtgaaggtgtttgattattgtggcttagcttggttctgacccattcctgattctctcatattgtttaggcagtttg

SEQ ID NO: 55930 - DNA, 1059 bp, Homo sapiens
aacacggtgaaacctcatctctactaaaaaatacgaaaaattagctgggtgtggtggcaggcgcctgtagtcccagctactcgggaggctgaggcaggagaatgacgtgaacccgggaggcggagcttgcagtgagctgagatctcgccactgcactccagcctgggcgacagagcgagactattattaatagtgtaatcatctgttgaggaaacttttgaaaatgttgttttcatcatataagctcagaaggttaaattgggcattatttttgactggtgggacagtaatttaaaagggttttaaaatgctgaattagattatgaggatacttgtgactaatttttgcattatataattctggcaaagtaaccaataaatagacatgtatcataattatatagagagaagacttgcatacttttgatatttccctttctcctaatttcccaatctattgaggtaacgcttataatccattttttactaggaatctacagataatggattttagtctgcactcatttactgtctatccatgtatgtaactttaggcaaataaccaatttgtatttatttttttctggtgaaaaggcaataaaaactattctgtgcacttcccaagggtattttgtggatcatgtgacgaaataacaaagcataatactttgtaaggtttcaagttccatatgttttaaagatattatttaatatcagagtattacttctgcttttttcttttgccttatatgtattttttatttttaattgacacataacaattgtacatatttatgagatacaatgtgatgtttcaatacattttatatgtgtaatgatcgagtcagggcaattagcatattcatctcaaacatttgtcgtttcttcgtggtgataacattcaaaatcctttcttctagctattttattttgttacattattgttacctatattcactctactgtgcaacggaacactggaacttagttcttacaatgaatttggtggctcacacctgtaatcctagcactttgggaggccgaagtgggaggatcact

SEQ ID NO: 55931 - DNA, 1060 bp, Homo sapiens
gaaggttggatggaagagatggatttgaaagagagattcaataattttttctattcactgtttcagcctgtggttaccagtcagcttggcacaattaacaatttgatccatgtcaagaaatctgattttgaggtgttcgatgctttaaagttagattctatggaaagttctgagacatcttgtagaggtaattttgtattatttactctctcttgctgtgtctttcttgtagttccttcctaaaagttgtttatgtgtgtatatacatatagagggagagagagagcagggggttggggggaggagagagagagacagagatttttctcctgtaaacatttaggtctcttatttgcagcaaacacaaacacacacattgtaacacaagtctcatgatacaatgtttaccttattacatgggatacactctattttccatgttatcttttataatcactaatgggctacagcctatagtttgaaaagctgtttctagtaatatttcaagttttccactgacctttgatgatattacccagcagaggcgatacatgtgtgtagtttgtttggtttgccccatcttaatcctgccagtttgagacctcagttagcagtttcatgattttatgaggtccaaaaaatgtggggaaaaaaatggtttaaaaaaccaacagcctgggcaatatggcaagacccatctctacaaaaaatttttaaaaattagccgagcgtaatggcacatgcctgtggtcccaacaatttgggaggctgaggcgtgaggattgcttgagcccaggaggtcgaggctgctgtgaagcatgtttgagcctcctcactccagcctgggcagcagagtgagatactgcctcaaaaacaagacaaccacccccctgccccctgacaattctgttgtaggtaattgaaattttgtaaatttttggttaaaaaaaaaaaagtctatggtagcggaaaatatctttacacttttatttcctctaatattatttgagccaaggccttcatctctgcttacaattgctatagtatcagagaatatttt

SEQ ID NO: 55932 - DNA, 1815 bp, Homo sapiens
ctcagatttctttaaatagtttttggaaaatttgaaacactttcaaagtagggggaaacagtataatgacatctatatacatgccacccagtttgaacaatgatcatatcttgaatgaacatataacatctataccccagtccactattctcccactagttattttgaagcaaattcccagatattatatcaagtattattttatctgtaacattttaggatgtacctctaaagatgagggttttttctttgttattttaacataatcacggtatatctgggaagctttttttcctttattttaacataatcacagtgttatctagaaagctttttaaaaataggttcccagatcttacatccgaatctgagggttattcttaggcatatgtcaaattcttgtaattctaacgcagccagttagtcaagagtgcattgttctgagaatatgtagttttctcttaagtcaattccttatgtgaaagtcctttcaattctctttctctatttactttggattatcctgctactgatatgctatactgtagttttgaggaatatcaagagaatgtatggagggaagctatgtcaaccattttgaaaagaaagcccaaatgaataagctagtcctttttttaaaaaaaaacccacattattcaatttagtaatatttaggcttaatactatacagtcttatttaccaaagtcacttaaaccagtctaaaataggggtcagcaatctttctgtaaagggccagatagtaaatagtttagactttgtagaccatacagtctctgttatagctacgcaattctgccactgtagcctgtaagcagctatagacaatataggtaagcaaggcaggtatgttggttcacacctctagtctcagcttctctggaagctgaggtgggaagatggcttgagcccaggagttcgaggctgcagtgagctatgattacaccactcactgcattccagcctgggtgacagagcaaggtcctttctcaatcaatcaatcagtaaaataataggtaaacaaatgggcagagctgttttcaaataacacttgataaaagcatctggcttactggctgtctgccaactcttggtccaaaggatagtaatgaaaagaaacaggagttactgtttttacaatcccataaacctcatttgataagagagctacttttgataaaggaaattgtatttttgatctcttgcttcttgaggttctagaatttttattcctactcctgaaataattagtataagcctgggataggggaataagtaagatttcatagccacttctcaagttttaagaaatcagtgatctagtttttgaatttttaatgtttcttctttttacttcttagctgaaatacagtttatgaattacttatgaattttgatatctctgacttccattacaactggtaattgagagctattcatatttgcctataaaaatatatggctgacttaattatcttttacagaaccatactttgttttcatttttttttcctctgaagaaagactcagaagcatatcataattgcctgcctatgagttaaactagtggtagggagttatttttttcttttttttttaagggagagtctaaggctctggaagggtaagtgacacaggtagactcaaaagttaggctatgatttaggcagtgcttgagcataggccatttgaccatttttggtcctagatgagttctttttctataatttgttcaaactctgatttagttgctaattttggggtttatatccttagccaaagcctagcacccttct

SEQ ID NO: 55933 - DNA, 1050 bp, Homo sapiens
gtggaagagatcgttttatttttagagtcagcacaagacctttttagatctgatccctctacctgttcacataggaactcgctctgaggttcaaccatttttttagataagattcagagccccaagactctggttgtaggacctcatgagttctgtacattgcaatcctcccatgaaatgtaattttccagatatgcacatcctgtcacatggatctagtatttatgtttatctacttcttttcttggattcagatttgctccaggtctttcctgtgtaacatatgcaggcgacaaggaggaaagagcctgccttcagcaagacctgaaacaggagtcacgttttcatgtgctactgactacctatgaggtattcattcgtttctctatagcgagaactcctaacctgtgaccttagaagttgtagagtctgctgaaattatatttaagttttgttgagagcacacacttttctgggcagggagtctaccttcatcagattctcaaaagagggctgtaaccaaaagaagtgaaggatcattgtgcttcagattagttcgatcttttcctttcttggtggatcaagggggaaggcttctcaaggaagtggcacttgagctgcctcttggttgatgaacagaagtcaggcaggcaggcaggggaaagggttttgtggactgaggaatcacgtctgttactggaggataggaatggaagacagctccggccttattttaaatccttgtttttcagtctaagacagtgtgtgccactgaccttccacttaatcaggcttttctctttgtttttaagatggcgctacttagaaattattctcagaacttttttttacttagtgaacaaatgagacttagataaatcctatagtttaagagagttcacagaaaactagcttatcaatatcagagtttatcaatgccagcctttatacgtgtcttcctaatttttcagatttgcttgaaagatgcatcatttctaaaatcgtgagtaggttgtactatttaagaacttgggttgaatgtattatgaa

SEQ ID NO: 55934 - DNA, 1108 bp, Homo sapiens
ccattttttgctgttttaaataatacaacttgaaacattcccacatatatctttttctgtattttgaatttttcttaaatagcttctcagtagtatctgtcaaagtatttgcttttatgactgaaacttcttgagaaattgctgatgtgacacagtatgctacaaaatgtgctctggcaacagccactaatgacttccatgtcaacaaattcagtggatatatcttcctggacatctctgtgagatttgactctgctcaccacttacccattttaaagtcacacttcttaagttcctacaacaccactgtctatcttgatttttttcttctgtttgaacatcagctctgtctttatgaccttcaccaagtcacctaacctttctgagctttagtgtctttattagtaaaatgagcacaattgtctgcttgctatactcttttagactaaataacacataaagccctgaggttagtgtctggcacaaagtaggagatcataaatgtttccttttcctttctgtctctggcttcttcctttctgcataggtctttcccattttgttaaaaaaaaaaatcccttggttttactaccttatccagatattgtattatgcacatgtagcctctcaggaaggtaatttggtggcatttgtaatagaaggggcttactgttaagtctttttaataacagtcacagttttgtagtaagacttttgattgtgaaatatgtgtttaaattacacaaaactgaaagcttgggttttctctcacagattcccttggagtgttcttgttgtggatgaagctcacaggttgaaaaaccaaagctccctgctgcataagaccttgtcagaggtaaacttacagtgtagccttagtttttatataaccccttctttttaaatatacattatattttagagtaattttagattcacaacaaaattgaacagaaactacagatgtttcccatgcatatgtccccacacatgtacagctgtcccctgtccccacacttgtacagcttcacccattatcaacataccccaccagagtggcacagttgttgcaactgatgaacctacattgatacatcgctatcaccca

SEQ ID NO: 55935 - DNA, 1024 bp, Homo sapiens
ctactccctcctcagttttgtggagcctgatctcttttccaaggaagaggtgggagattttattcaacgctaccaggatattgagaaagaatctgagtcaggcaagttcctttcctgcaaatcatccccaagaagccttggcacagaaaccatcctcatgcataatggttataggtagaaaagaaggagaattgatgaccagaggacaccttccagggagacagaccgctgatattagggagatgttaagtcacacatgttgttcccagttgtctgctgttcatgcctctcttaattgtttgctatttgattctgcagtagggcttctttagttcatttttggaagaaatagaaagtgcctgctgatttgcagacttttttttccaacttgtaatttctataaaggctttgttaactttataagtcacttcctgagggagaaaagaatgtgggtgctgtagtcccaaactactgttcagcatactacagcactggtatttcttttaatgctgcaccaaaaccagaattctgggatgggaacccttcctcattcatacagccaagagttgtagtcttctgttcttgtacctttgcccctctgtgttgtaggattatccatctatccctgtgatattatcctgggatgatttttcaaaacaggtaggaggtatgccaactaatgagtttgtatgtgttgggtaagtatgagtttgagggggcttctcatagcaaaaatctccagaccatagactgaagatcacctggcgaacctgctctgattactcccatgttttgggttacctgacaaaatataagacttctagtcaaatgcatgacatacttgtattacatgggacacacttgtgttaaaaagttattcattatttatttgaaattcaagtttaactgggcatctgtatttccatttgcatatctggcaatcctacaggtagtataattctaatttagaataatttttgaaattcaagacatctggggaaagaagggattttaagtcaaagag

SEQ ID NO: 55936 - DNA, 1030 bp, Homo sapiens
ctcagctgcaagagactccaccattatcactgtcatcttggaattccaaagacaatataataaaatgacctttcctacccctcccagcaaggacacatatcctacccctcccagtgaggactcataaagggaaaaaaaaattaaatacctttttagcagatctctggttgtgctattaaaatctgactggtttagtgatatcaaagatagaatgttttttctctctctctctctcttcctcctatttgtggcctttcttggaaagaatatagtgtctggttgaaatgccagtcatttccacggaggcagatttgtgttaatgttggcatcaccattttctacatcgtgtctttctctagtactcagtggagtgttgtcttcagtgttgtcaatccatctttttttttaagattaatttaatagtttttttagaagacagacatgcccacccacacataaatcataggttcgatgcctatactttgggaacccacacataatgtgtggttaagtcgtgtcatgagaaaaataagagtcatttctacatacccagcattgttacacagggatgtgcccagcccacattgtagcaacaacctaaaccggagcttgccagcttgctgtggtctgcatttggcacctgtggccaacgcctcctcctctgagcggtatgcacttcatttgcaagtctttgatcacttccgacatactctcccccaccccaagtgtgttactcaccggggagctgcctcttggggaggcagtctgagttggcattggaagagtaatctaagaagaggagtaatccaagtggggagttgaggagtgagtaaaacgaggatctggtcagaggaaagatttaacagaactggagagccagacagcagtgataacaggtcatctttaactctgggggaagaaaactgaagactgttatgacattttaaaggtgcaatgtgtaggtactctgcataaataaaaattctagagtctctagtcctgctgaaagtaaaaccaacacaacatgcag

SEQ ID NO: 55937 - DNA, 1051 bp, Homo sapiens
ttgtttttcatgtttcccactcttggaccttgtgatttcctacaactttattttttacgtcaaagaatcacagatgataaatgagttagttaagtttgcctatcttacctgctatttattaatatttaggtagtagctaaagaagagaagtttcttctagctcagaaacaggaaaaatcagagatctttgaggaagtctggacaatcagagaatagaaggtgaatgcctgacttccaggaatctgcagttgtgaccatctgaaacaaagaaggagtcactgtaatttaactttcattttctaaaaaaggttttaagtgctaaaccctctagaaaagggcttctggttgcaaaggactgactcactcaggtttcctctagaaaagtgacattcatcgtgaagatgctcacagatagagcctgcaatcaagactcggaaaccttttaggtgctgaggcagctctggggacaaccttctctttcatatcagtctgattctctccctctgtgtttgctttcctcaggctcttttgctactcactgctttgatcttctagcttttttctgagtaaccactctcaatctcataggtttttaattacacccctaattgttgcttctttgacttgtcaagagccccatgtccagaatctactctctctactcttcccacttcatggcttttcctcatggtttctttccttacattctttcagctgcaattttccctgataattgcttccttctctcagaattccctaatttagattcccaagaaaggatccagttaacccaactcatctttttcactgccatgctttataggttcttagccagcttaaggttggagctgtccgtgagccagaaggtcacctctagtctaggatgttgtggtaaagggagatgggtaggggtagagcggttgtcacttggtataaaactggactgtcttttagtacgaaccatggaagggccatcttcccttccacgtaactggcaatgaatatatttgacacagctaatataagcccattatggaagtctaggaaatta

SEQ ID NO: 55938 - DNA, 1044 bp, Homo sapiens
aagtgactgatacacattacctgatatgtaaaaggcactcaatcagctgtagcaattattctagaacataaggaggaaggaaatgttgacagaacaatgtgctgggtaaaattccactttttgtatcatttattccttataacaatcctgagggacttgtattattatttctactttataaatgaggagacaataataataattgagtatttgctatgtgccacacactgagctaaactcttccaggcattgtctcattcaaactgcgataggtgctattaataccttcatctcatagttgaggacactgcggtctagagagtataacttgcccaacatcatccaattagtaagtgacaactagagtgtaagtctatctaaagctgggtcagtctgaccgcaaaggatttccaaagtcatataattgctaagtgactgagtcaaggctcaggtcttgttaagggcagtacttcttcagtgcacagccaaaggtacatgctgattgaatgaaggatagtggcaggcacacacctattagggtctctgactctgagtgccatggttagtcaaggataagttttggatagggtactgttatggttcagctgttccctccataacttatgttcaaatttaattgccattatgacagtattaacaggtaagacctttaagaggcggagaggtcataagggcttcatcctcatgaatggattagcactgttatcttgggagtgggttagttatcaagggagtgggctcccgataaaaggatgaatttggcccccattttccctctgccatgcccacatgttcactcaccatgtgatgccttctgctatggagtgaccctcacaagatgtggccccttaatcttggactttccagactctagcaaataaatttcttttctttataaatgacgcagtctgtggtatcctgttacagcagcagaaaatggactaaggtatagacttttaaaagttttaataatttaaatatgtcaaaataaggtctctgagacctgaggaagtgatttaacaa

SEQ ID NO: 55939 - DNA, 1901 bp, Homo sapiens
tccagcctgggcaaaaagagtgaaactctgtctcaaaaaataaaacaaacaaacaaacgaaaagattaacagataataatgcttttaaagattagtttccttgagtgaaagcagagaaatatccactcttactaaccataagactatattggcattttcctagtctgtacttacccagagttctgttgaaggaatcacacaatgaaataccctgttctacgctttctaggtttgggttctagagttgaacagcaatctaacaagggcctataaatccctggtgtgaccatatgggacactagtgtgagttcttgtgcagtacaaaggagtactaaggtactgacagatgggtcatttattcatctactctttgagattttagtctgcagttgggaatttccaattttttttttttttacatacaataccaggctttctggatttggtggtttttttggagacagtcctaatttaaaacattctgccttgtctccataagtatattcatgattagtagtcagtatattctggtggttgtttcaggttgttcagttacattgagtttctacatccgaatcctgtttaaagagggcctagtagacatcttctgcattatggactttgttcacttgctgtgacaaagtgcatactgactggtctttacactgtaaggtagaacctcagctaagctctcttattctgttttggtttggttctttacttagcttctcttttcccaaactctgcagatggacattagactcattcttatttcaaggactggctcaaatgtcacattctgcacggtctttttcaattcctagagccagaggactcttgcatccatgctatattctactttgcttagaatgatcatattagctatatgtgttcactatcacaaatcccttaatagagagtaaaccagagggtaaggatttaggtcctgttcacctctgcatctccaagagtatccagcagagttcctctccttacaagtggttgtgctcagagatgtttattgaactcaactgaattgaattcttggcttcattggatttgctttgagtatggtaacattgatgtctgtgccctagttcccttttggaaaagaaatgctgccttaaaaataaaaagcatcttaagtgattttgggatgaaagacaccatgtaatataagcagtaattgtaattattattaataagcatcattaaaatagtatgaactgataggattacttcctttgcttgcttttgccagcagagttggcaggtttgataaactaactggtcttttccatcttcaatatctatgattctttgaaattttatgtagacaagtgcaaactaatgtacactggaaggaacaattgaaacagctcatactcactgatgggctctgaattactctacttgtaagtgctcaggaaaaagatcttggattcattgtggattgctcaatggagacatctgctcactgtgcaccagcagtcagaagaatgaatgagatataataggctgtattaactttgagaatgggataaagaataatgcagaaaataatatagtgtgcataatttgccattgactatttctgtaattacaataaaacattttaatgatatacactgatgttacgattcaccttaaaatcagaaatcagcattgggtcctttcatttcaaagaaaacaaagcagaaatacaaaggttccagggaagaacaacagacagtctcaaagacatacagggatttatctgtaatgagaaactgaaaagagaaggacattttaattttgggtaaagggaaagatgacattgtataaatttatttaaaattaatgaaaatttcagaaaattgctggagctggcttctgtttatccttagtaatggaggtcagag

SEQ ID NO: 55940 - DNA, 1023 bp, Homo sapiens
cctcagtgaccattgactgactagctaactgaccataccaacaaaaacaaagcttggctttgccactgcacatcctcaggcagggtaccaagcagcaatctactgtctagaagttgagcaagggggagagagacagagacagatctagcaaatgaatttctaatattgctgcaagataagatgatatataccattaaatagttttaaaatgtaaggcagctataaagaagatgactttgtagtaatatgtaattaacctgggtaactcactagcacaaaataacagtgacacaacttgcttgataacattttataatggactagatacattcttatgtgaggaaaaaaatcctcatttacaaccataatatctgagcacaaaaagtctttctggtgattatgttcaaggccagccagatcaagaaaaaatttcccttacagatatatccttgcagctttgagtttattatatgcttcttgtgacaaagtaaagcatcttgtattgagcaccagtagaggaaagaagtcagatctggaggatattcagcttgacaagacatctgtggtaagtgactggtttggaagataagggtagaggcttggtgatcgcagggatatcctccttcctaagataaagcaggcaaacacatttagccttgtgctcaataaatgaatttcacgttgaactaaaatatactgagcaagcagagttggaaagttgtagaatatttaccctaccataggaaatgggatgagaaaaaatatatatacatgtatattttatatatgcatgtctataaaagaaataatcttccataggatcccatgggtgcaaactttctcattaattttccacattggaaatctgtaggcttcttccaattattaattatttagaacctccctgttcctcaagaggttgtgaagcagttgtctaaaacaggaaggatgaaattaacattgtactgagtactcactgtgtgtcagccattatgctaattatttaatatatgtcaccatatt

SEQ ID NO: 55941 - DNA, 1108 bp, Homo sapiens
taaaaacaaggttgaggccgggagcggtggctcactcctataatcccagcactttgggaggaccatgtgggtggatcatctgaggtcaggagttcaagaccagcccgactaacatggtgaaaccccatctccactaaaaatacaaaaaaattaccctggcgtggtggcacatgcctgtaatcccagctactcgggaggctgaggcaggagaatcacttgaacccaggaggcggaggttgcagtgagctgagatcatgccactgcactgcagactgggcaacaggagtgaaactctgtctcaaaaaaaaagaataaggttgaaaggctcacccttgaagatgttttctctagttccttcagttacaaaagggagtggaagcaactcggtgggacagtgattgagaggataggctccggagtgagaccggggttcaatttctgaccctgtcatttaatagaagtgagggtttgttttgttttgttttaaattatttatttatttaggtctcaatttccttatctctaaaatggggagcattgctgtaaaggttaggtcagaaaattcatgtactacatttaacacaatgcctggttcactatatgcagtgaatattgttattttccaggaaggagaagtgacttctttaagtcacacagctggttagttagagataacctgaacttaactaggtttcctaactctcagtcatgtgtttttttcccactgtcactgcattatgccacaaaagagtagcaagacagataaaatgtggagcttagttcagaggtggatattatggtgccttgaagggaaaaaaaaaatcctagtgagggctcattgagggctactatgtgccaagtactatcctgcattatatatatgttacctctttaatcctcacagaatcactatatgacattgttattatccctactctagagacagaaaactgaggcttaggcagactagtttacataaacctaggcttgtctgaccctcaaacccatcactctatcctgtgatgactgtggtaagaatattgaggtcttataaatataactgcaaggcaaaaggcactctggacaaggctgtgtgggggtcagcttt

SEQ ID NO: 55942 - DNA, 1048 bp, Homo sapiens
tttagaatttattgagccctgcacatgctcggctctggagaaaacttggtggcctgtgaactgatagtcttcagttatttatcatctcattttgcttatcaaagacttgcctacagtccctgtggcttttcttttcaccaagggcttgccttggatggagacagactctcatgctcttctcttatgactatggaaggcactcatgtctgagtagagtgtgattttcttctggaatgtgtctttggcaaacaaaaggacgaatgccgtggaatgttctggaggtatcatctaagaccacagtaacctttagtctctattttaagtactctgttccattgtgttcacttgtattttgtgtctcaatttttggcttagaaaatataaccactagagctggaacaaagtgtctctagagttgggcccaactctttttgctttccttagtggaaagataattttgtgttttgtttttctggacctggatcattccattgtaatgatatgttggatcaattgattcctaaggccccttctgtctttgccattctccgagtctaccatccaagctttggagcagtgcttctaaagtttttctaccaatgtgtgtgtgtgtgtgtgtgtgtgtgtgtgtgtgtgtgtgtgtataaatgtcttcatgatatcaagctctgaatgaatgtggctataattgatatgacaaatgaagacattatgtctgtaaagacaaattccaattagttttgatatatgagttaattgattatttccccttttattcagcttaaatgtagaaaaccttcccctctgaaaccttaatacgatttgagttttccctctcaaggaatagctcttcatgggccagcttctatttgccatcacggcatttccaaaagtctgcctttctcctgctggcgaatgactgtgtgactgacttcaattattcccctttccccattaatttagtcagtactgctttcttttacagcaggaaccatgtgatactcatcttattggacttcctcctcccatgtcaagtgtttgcatatac

SEQ ID NO: 55943 - DNA, 1034 bp, Homo sapiens
gtattttgagttttagtggttttgccttccttctccctttttgacctaactgttttcttactgtttcttcttccaaagattgctttggctgcagagcactggggaatgggtggttttccttggaatcagcatgaattggagtatgaacttttctttttccttatctgtataggactgaatgtgggcccagttggcgtcattctgctttgacctaaacattcccatctgattgggtggcagagatcatttttggaaagttcttccgtgtcccgatgtagaagaaatagcaaattggacatattgaaaggtaaagaatatcctgataagtcagttccttttgtgattcaatctgaatatgttggatttttgtttctgtttctatagggcctcttgtaagttaaaactacgtttattcattattctaagaattctcaaggcaaaagtcatcaaactaaatgcaagtcaaaaatataagagcagttacacctttctgtgagcagggacttgtacaataactcatttcatagggccaaggataaaggcaggtggtgagaagttaaacaggtatttatcataccatcgttgtgtgtgaatgcaaggtaaaggtagcaatacacaagccccaagctcattataatacatggatcaaacagcattgattgagtttcttccaggtatcaggtgctgagaggaggaatgacagtgccctcagagagttccgtgtctacacatacagttttgtgttataacagtttgtgattataatgccgggggccatggaggacatacagaggagagttggtaatcaaggagaatttcacagagaagggacatctgtgctgaaataatattttgggtagccattattccagatggtgatagttgaaattcattttgaatgcttgaattttgtcaaaaatctttagcttgatataaaatttaatttgcttaaagttagctattaaaaggtgacagaggtatttttaccccatgagtactaaaatgtacattaatattttgcttggaccaaggtt

SEQ ID NO: 55944 - DNA, 1003 bp, Homo sapiens
ctccacatgttggggaaagattggtttttcctattgtgtactttttctgagaggaagccttttagtagtcggtatgccagaagttaagaatgagctaggaatggaatcctgaggctttttagttccacattctaagtttgatactatgccttttatggagtagtggtcatagcatagaaatgaaatttgttaaacatgacatcgttctaataaactggacttcttagagcagggaaatgggaaagcatcattgaaagagttgaaattggaatcatagaggtgattctgagcttggttagattaatttgtgaatttaacaacttaatggcatgcttctctaggaatccttctaaagattcctaaataatttagccctaagacagtctgcaacttgcttctcccttgccacttcaaaactataaattctgggcaaagagggaggctcagtgtcataattctagtttacaaggactaatggtggaaattgttctgcttggccagtacttagtgttttattgacttagccagctcaattcagtaccgcactttgcacacagtaggcactgaataaaaggaagtcatctggccacattattcagctcttaagttccccacaagtatatgaaaataaatgttcttgctggatgtagagttatggtggagagcagggagaactgtgaatgatcttcactttgtaaattcagagacatatctggaattttgtctcttctcacctttacagtcagctttcaaatctctatactaataaggaatggaaagaagcaaaattatgaggagtttctttctactaaattcccagaattctaaaaagtagaaaacttgatttgcagtttatatttctccagcctctgaaaataaaatgtgcagttgggaaggaggaaaagccacaagagccttgaactggctacagatcagatataatccttcaaaaattgggagttgattctatttgtgtgggggatgacagcttcgtcttaaactg

SEQ ID NO: 55945 - DNA, 1035 bp, Homo sapiens
cagatagtcactatggatctgcggtacctaggggtttcaaagcattgttttgaaaaaagaaagacacaagtttttgagggttttgtattcaaaactacagaaatgtaagggagaatacatagctaaagagaaaactgcctttctcacctgctcacccttgcctggtccatgctgcttgcgggggaggcttgcatgcttggcaggaagtcctagtcaccctccagctggtgtggcccctgagcctttgtccacaatgggagcatcaccctttcaccctgatggaagtggaggcatggtctagctgcttcgctgagttggctagtgctttcaccttgatcctgttgtgagggtgttttatgtctctgtttttgctcccaactttttttgggtggccttttcctgtagtatgccctggagatgcgagattttcctctggcagcaggaggcacgcacccagagaatgctggagctgcaaggggaaaggacccacttccacagcagagaaaaacaaagaggaaaaaggcatacaggcagcgagcgctaagggacgcacccagcaagcagtgggccagtgccactgcccccagcagctgtttctgctgcaacccgagaggaactcggtgagcctgtcccgtttgtgactgcaagctcaggatttcaatcaatgcattccagtaaccctaaagtgaggagctctccatcaggaaacacacagaggtaagggctgggctggggcctcttcctgcagccccttggggatgccataggcacaccatgaacactcattggtgaaacagtatgttgaattagaaataaatgaaacccaaatgggaaaggaagagaaaatagactagtaaatagtaatataacagtaagcaggatacagtgtaatcaaagcttatgttagagttttcctttgttattcttttgtccatcattccctgacctctccccgcacctccctgccaaagcacaaacgaaaggaccatagagaccaaccagtacagtttgcctaagtttgcaaacaaggaaact

SEQ ID NO: 55946 - DNA, 1489 bp, Homo sapiens
gtgttcctgagggaaggcctctgacattcgacagaggccagagagcctaatatcagacaagtggggagagtaggtatcagattcatgagttctcacagtttatgatggaactatttcttctcattttgttactaactgaagaattgtttggaacctcctagttgaggagttcttgcccttaaggatgcaacggtttaggggttatggtaggatgtttcacaggcctatccctgttcgtacacgtttctggcctctatgctgtttgtactttagtttcaagccagtagctctagtttgtctgtgccagtggcccccactggggtagtttttctggtatccccttctcttctccatcagagcaatcctccaaggcttgggtcttgtgttctctagttgccattttgccagacttcagacacaagaggaagccttaatggccctggcagtagtccagatttgttacagctgattttagtgtagcaggaatgagtggctaccagatgtgtagagatttggcaggcaccaaaatggagtgagccaagaagggtatgggaccaacagctgtggttttaggctttttcctcctagtataagaccaaaagtcttaactgtaggccagaacatgaagttagtattcaaggaatggaagtatgattttccaacccaaattagaaatggaaacttgggtgattgtttctcccctccttcctcccctcctccctcaagtgttttggcaggcctgctatgagtgccagcactatgctggggggccatggtcagcaagatagatacagctgttgtcctcaaagatttgaatgcacctagaaagctgattattagacagttacagtaaaatatgataaatgctgaaataagagaagttagagggctgtgagatccatccccagttaagtctaggaggtttcaaaaaggttaccagaagaagggacatttacactaatatatgaaggaggtgtaatagagaggtaaggaagctggggaagactgctttatggttagtcatttgagagagaagagtatttgaaattttataagtagaagaggtttcctcttagcaaggtggtacttccttgaaattctcaaggtgggtttgtgttgtgatgctatatatgctggcagaagaaaggaaattttattctttctgtgacgagtcattttattcttttagaatgtaattctgctgaccacataaagtcccaggattcccagcacacaccacactcgatgaccccatcaaatgctacagcccccaggtcttctaccccctcccatggccaaactactgccacagagcccacacctgctcagaagactccagccaaagtggtgtacgtgttttctactgagatggccaataagtaagttgatggctgtgtcttgctgttgggcagggcttgtctggggacctaaattcttattcccattgcagattgatcttttattatcacctaaagttaacagtacagat

SEQ ID NO: 55947 - DNA, 1024 bp, Homo sapiens
atgacccctagtgaaggctgggcacctgggggtacagagccattttctgatggtatcaacatgccacattctctgcccccgaggggcatggctccccaccccaacatgccagggagccagatgcgcctccctggatttgcaggcatgataaactctgaaatggaagggccgaatgtccccaaccctgcatctagaccaggtctttctggagtcagttggccagatgatgtgccaaaaatcccagatggtcgaaattttcctcctggccagggcattttcagcggtcctggccgaggggaacgcttcccaaacccccaaggattgtctgaagagatgtttcagcagcagctggcagagaaacagctgggtctccccccagggatggccatggaaggcatcaggcccagcatggagatgaacaggatgattccaggctcccagcgccacatggagcctgggaataaccccattttccctcgaataccagttgagggccctctgagtccttctaggggtgactttccaaaaggaattcccccacagatgggccctggtcgggaacttgagtttgggatggttcctagtgggatgaagggagatgtcaatctaaatgtcaacatgggatccaactctcagatgatacctcagaagatgagagaggctggggcgggccctgaggagatgctgaaattacgcccaggtggctcagacatgctgcctgctcagcagaagatggtgccactgccatttggtgagcacccccagcaggagtatggcatgggccccagaccattccttcccatgtctcagggtccaggcagcaacagtggcttgcggaatctcagagaaccaattgggcccgaccagaggactaacagccggctcagtcatatgccaccactacctctcaacccttccagtaaccccaccagcctcaacacagctcctccagttcagcgcggcctggggcggaagcccttggatatatctgtggcaggcagccaggtgcattccccaggcatta

SEQ ID NO: 55948 - DNA, 1769 bp, Homo sapiens
ggcatggctgctgacgtgggcatgggtggatttagccaaggacctggcaacccaggaaacatgatgttttaagctgctaagatgggatgtgccgatccttgtcaaaatgagattccaggtcctgagagctgctttgaggcagttccaggagtacttactattggtcatgcaataggagaacagagacccgagggctgctttgggggaggggggaactcgagaatgtatggatttacctgaaaacaaattattcatttaatcaacaggtgtgttttttttaagatttattttttaaaaattatttttgtggacttgggtatcaatgatggcacctacttttgggaatctgtagctgtgctttgagaattgccatcggtcatgtgttgcaccgttctctgtatgtttacgtcctttggactggcttctcccaggattcttttctgtttttgtttttttgatttgggctttatttttttctgtgtactgtactatattgtaaaagggattttagcagagactttagtctttggggcaagaggagaacaggaatgctgggctgtttactttaggtggagaatccatcttcagacctttggactattttctttcaactgcagtgtatagaaaaaccaaactacgacctcagagcagagtattaatgaaaagcacaaaaaaaggaactaagttcagcgaggggtggggggaggggggagatttttcttttgaaaaataatgactcttaggacatttgtttttcagttcaagtgctcttcagcactgtcttgtctcccaatataccaacccactggcacatttttctcttgttttctctctccgattttgctctgtctcctcagttaagtgtttccttcctttgtgccccccgctggtgaccctctgcttccctctctctttccctttggcagctgcaatacacagtgttattctggggaaataaatctagcaaagcctcgccttccatgccgagcgtcctcttggctctgagagggaaaggtctgtccttgggatgctctctggtcttttttccccctaagtctttctctttcccatcatacccttccctgcccaccttgttttctgttctccttttattaggaattcccaagtgaattttattaatgtgggagtggaacagatgctaaaagctatccaggattttgtttctgtttgttttaaattttgtggttccttccctttcctccccctcccatgcgtaagacgttctgtgtaacctccattaaatttggtacaaaaccactcgccagagctgtggtgtcagaaaaataaaatatattgtttcttacaaaattgaactgccttttttgttcatttggattcctgattgtttagtattgggcataccggttgccatgtgacccagaagcgtagactctttgtattggagttgatcagtaaggtgatggttagggaaaccacataaaagtaccttctcaaagcatattccatgctgttaaggaataactactcatgtaggtttattctgtactgttcctatctcagtcatgaaatcctagttataagcagaagagcaaccctggtcccattgctgaactttacctttagggcaattaatggtctttattaggaatgtttgtgagagccagtttagtggtatgaagtaattaagaaggccaaaggttgtatgtttagttatttgaataagctatgagatgtcccttggtcttgttaaggtagaatattattactatacctgcaaattatgggtt

SEQ ID NO: 55949 - DNA, 1041 bp, Homo sapiens
ggaaccaattgagtgggaaggattgaggacacaaaagaagtcctgccatctttggcaggaagatcacaagaagcgggacaggaactgaagcacaggtagcggtaagctttggggaaagaaagataccagaagtgaaaggagaaaggtgccatgtgtgatgaagcagataaagcaaagagacaaagggacacatcccggaagccagatgtgcagatatggaaggaaaacatgctgatcctcaggtcaaaggtgaaagtttgagtcctgcctctgcctctccctggatatttgactttgatctctttgagctggctgcttcacatttggatgtcataggctttttgtgaaactgttatcagacaacatgtgtgtatgcctagtatgagttatcagagcatttttgagagatgccttaggctgtaatgcaaaaagatatgaaatggctgctctggtaaattagaaagctcacaagatacaccagctgggcagtaagagggttctagctgaagcagaaaatcatgattcttctttcagaagggacacccagggacccctcttgctgccctcctgggcactgaaaggtagcacagaaaagccatagagaaagaagcaccacagtggaaattccatgatgggatggtggtggccacagcaggaaggcattttcaagagctactggagtccccaggcccagccagcccaaggtggggataacagcaacactttaataaggttacactggggtcaccagattctcaagcacttctctcctcctgcttttaaagttcagaatcatctaattagaggaccaaactccatccctgaccacatgaaaagcaaaatgaggcctgactctgactcaaactgttcacagagaatgaaggatgctgtggaatcctagaacttcagattctcatggtaggcagggactggcccgtgtgtgaccctctacaatactttgcctaatgccagtgtaagcttataaaagaaccctctaaggtagcccaattcatccatggtcagctctgattatttcaaagg

SEQ ID NO: 55950 - DNA, 2027 bp, Homo sapiens
gattaaaatggcattcttattacagattaaagccatttggagaatgtgctgagggccaaatgggcttgtgaatattattttgaaataaacttaataccccaaaacttcaagcttccccaacaaggagccctactaaactcatcccatggctgagagtaggaagggcattcatgtaggctggcaggacccaaagagagaagagaggtagggtctaagccacacacgctcagtttcttctttgaaactcaccagggaggagtgagtaggtggcaaggaggaggccaggagaatttctctggcggggaccctcctcatgaagacacggggagtgggaacaagggttcttcccacgatctactgcaaaggacttttataccaggctcagctgatttctagatgtcacctagtttctgaggcaagtgtgtcttacgtaaaggaggcaggccacatcctgaccttcagagtcctgaggcagagaattgtggagagctgtttcctcttgcagaaagctgtatctctatgcggctcatgatgtgaccttcataccgctcttaatgaccctggggatttttgaccacaaatggccaccgtttgctgttgacctgaccatggaactttaccagcacctggaatctaaggagtggtttgtgcagctctattaccacgggaaggtaatacccctgaggtggggttgggtggtggtgaggcaccctcctgcaaaacccacctacctgagttagcaccaagtctccctcctcaggcccagtggagtctctcttggcacagtcagctctctgaatcctatagggcaactcctggctatggcccaggggtcaggcagaacttgacagatggtggcaggatggggcttgagccttatcccagttctgttacagactcctaggaacagggtccccctcctcttctcctgagcgtccctgtcaggatgtcgcctcctggctgtgagacctgttttggagattgttggtggtatctttgggaggtgatgtgtgctgctgttagcacccgtggtgttggctgcttcatcagggctggggtccagggcagaggccagagcacgccccagggatgagcctgttggttctcccagctcggggatgtaactcgactctttcttcccagtcaattcaacactttttgagtgacttttacaagcagagcatagtgcttttattctggaagctcaccgggtagtggggccttcctgtctgtaatatgtatgcacatgtataccacatggatcagagcctctcagatctctgggcttagctggaaatagcagaaggacaggttcctcggcggacctgctgagttatgtttcttctgcaggagcaggtgccgagaggttgccctgatgggctctgcccgctggacatgttcttgaatgccatgtcagtttataccttaagcccagaaaaataccacgcactctgctctcaaactcaggtgatggaagttggaaatgaagagtaactgatttataaaagcaggatgtgttgattttaaaataaagtgcctttatacaatgcctcctgctttgtgtgtttgggaagaggagagagcaaggggtaatgtactttaatataatgtaaggatatttcctttctgtgggtttactaagatttcttcctgaacggaaaaggggtataatattgagaccaaaaggatatttctctattttgtgagttggtttctaaggttagaagcatctttgtgtgacacgggctggggacatcatgaccctgtagaattgtgtcggttttggactttagttcttttctcctatattaatttcacatgtattgagctacctactaagtagtgatcattataaaggtgaaaacactctgccctcaagttgttgcagtccagtgggagaggcagccgagtaaatcagtgatacagtgctgtatgttttatgctgtaataggtatttgaggggctatttgggtatagagaagaaacttcctgctcacatggcaggggatgtggggaacagtcaagga

SEQ ID NO: 55951 - DNA, 1049 bp, Homo sapiens
aaaaattagccgggcgtggtggcgggcacctgtagtcccagctactcaggaggctgagacaggaaaatggcgtgaacccaggaggtggagcttgcagtgagccgagatcgtgccactgcactccagcctgggcgacagagcgggactccgtctcaaaaaaaaccaaaaaaacaacaaaaatgcttttcatttttgagtggatggggagtcatcagaaagggaagaaaccctttctttttttttttttttcctggccttcaggtatctagtaatagctttggaagagctttagagacatagcttcttgacctgttaacagacatagctgttcttgagcctgtcttctcttccccaggagaagatgggctcctgcaggttccatggaagctgatcagctgccagaatcagtaggtaagaagcatttttttctaaaactacatgtggccctttcaggcacacaacctcccaagctgccccatgctgaagagatttgcaaggatgatcgaacagagagctgtggacacatccttgtacatactgcccaaggaagacaggtgaggggctctcactgctggcatgaagtcacgcttggtcagacatccaagtgtatggggaagaggagttcatcaggcccactcacacctgacagctgatgtctcctcgtgtaaggaggctgaaccccattctgcccacctaccagtaggccctaggtcctcgcacttctacagctgggactggtggcctagtgcttctgttccctgttatgcagaaccaggagccaccaccctcatgactttatcacttgccttttccttttgctttaaggtttaaaggatttgggtggggggagctgaagaaagaatattcatttctgtctttagtcatcatgttacaatttgcaaaccattttcacattctcactgtgaggtgagagagatacctttctccctggctttatagataaagaaactgaggctgggagatattgcctacctggtctaggcccagctagcaagtgatggagccagaacttggacccagatccactg

SEQ ID NO: 55952 - DNA, 1237 bp, Homo sapiens
gggctagcgagatgatacatacagccacgagtgggcctttgccatttacaaagtatgatccttctgacaaccccggtctctcaggtggggcaaatgagaaaaccaacaggttaaataaaagatgattgagactgtctttaaccggcaaatccagttgtacaagcccaacaagacacagatttttcttctcttaccaatatgtttctatgtaagatagatcggtttgggctgatgacacttttcaggtatctctaggctgcactaagactatatggtatttattccgtaaagaaaagaaaatgctgttttcagacagacctgggccatgcttgcatcatttttgatgcaatgcaaatgctagagtgagatttggaaaatttcatcctgttatcctaaccctggtacttgctaacttaacgttataagtcatttgaccttatagagccttagtttattcatctataaaattgggataataccagctaaccccattgggttgtggggattaaatgatatcccaaatgataacccaagtgtgaagcacactttgtaaactgttaatcactatagaatataaggctttactttttattttttgtcagaggccggaggcagactgcctctttacagccaggaatctcagaggatttgaaaaaggtgaaggacaggatgggcattgacagtagtgataaagtggacttcttcatcctcctggacaacgtggctgccgagcaggtgagtcctggggttggggagcctgggataatagccttggtgggctggctccggagttagaaccgggtggagagaagtgggtggaggcctcctggtttgaaggcaactgtgataagacctacagatagaatgggtgtggggactgagggatagggagcaatcgaggaagactccttacccaggtaggaacacagacactgaactctagaccagagcttcttgaggcatgttccccagaacacccaatatgcagtttgtgtttgggcaggcaggggcaatgggtagggagggatgagtagggtctaaaaattttggaatccttatttattgcatcacttcttgagagtactatatgtacatcagcatattaaaaaaatctgagatgcccttcataaagaaagctggttaatctttaaatctgttttccttaagcttatttagccataggatctttttttctgtaataaatacataaagaagactaacaatgggaaaggtttct

SEQ ID NO: 55953 - DNA, 1177 bp, Homo sapiens
ggcagctgaccaaggtgggcatgcagcaaatgtttgccttgggagagagactgaggaagaactatgtggaagacattccctttctttcaccaaccttcaacccacaggaggtcttgtgagtcacttgaaaggggatgttgcacttaatttaaggtcttgaacatgaggatacctgtcctgactccccaagatggttcccactgtcacccaaggtagtttgggggacaacttgtcatgctgcatacccttatgtcacaggatctggtgaacaggtcgttcctggaggtcgcattcattgcacttcgagtctctcaggggctgacatcccacagaaaagtgaagcattcttcctagttccatagctctccttatgtactcttgaaagacccctggagcgtatgtggaataaaatagagtgtatataattaaatattccttttatgagtgtcactattttctcatttttttcagtattcgttccactaacatttttcggaatctggagtccacccgttgtttgctggctgggcttttccagtgtcagaaagaaggttcgtatttggggtcccagtcagtccctgtccctgaggggtcttgcttctcacttccgaagcccctatctctttcttggtgcctgttcccttgactttttttctcctgcatgtgtgacttccagtgtgtacctagtccagtgggtctttccctgtctggccttatggtgcccctgccagcctgacctccacagcagcagcagtgtagcagctgctctgatctgcctctggctcctggcttctcccctcaagcttctacacaagctgcacaaggcagtcctaaccatgttttgtgaacaatcgagggggctttttatttaggtgagacattgctggaaaggaaggacactgggacccaacactgctgctactgccctaatcttggtgataatccacagcatgaacactgttccgtctagcctttcctagttgagaaagtccatcgagtttgggttttgatacattcagcccctgaatggttgcagtcagtggttcccaaccttttcatccccaaggactgcattaattattttccctcatggatcccatgtgttgagagcctttggccatcacatgaagctgcattttgtcatttgttattggctcaaatttacatttaattactg

SEQ ID NO: 55954 - DNA, 2840 bp, Homo sapiens
tttgacaatatagatgagctgggaagcataatgtaagaatcttttattgcttagtacctttccaaaactcagctaaaagaagcggtattcaagaagcattacatgaggtccacccattcttcaggatcgatggttcttaaccgtggtgaacattggagtcaactggaaagctttaaaaaatacacatgccagggtctccctccgaaggattctaatttaattggtccggggtatccagataatgtaaaagactctctggtgaagcttgagaattatctggactgaagagcattaaaaaagtggaggccccacttttttgggggataatccaaatgcggttatcccaggttgggactcaggcatcagtaacttttaaaaaatgtcctggtaataccagtatacagacaaggtttaatatgattgctttattttaaaatctacacctgggaggtttttgtttacttttatgtagatttgttcttttacctggaatgtagtatatcaatcccagtacagaattgccttcgctgaaatgtgctttggtaagaggttatctttctgtgttgagagaactaggagaaacaatcccacagaactcattgctgtgactgctgaaaagatgttcattatattactctatcctctttatgaggacccttgggaggaatttgtctgttagcattaggaatggtgtgcttctcctgaacaattggcttgcttttttctttaaactagtctagctgatcaagtttgtttctttatgtaaaagtcaggaagctgggtgccaagtctgtggcccacctatagtaagtaaacagatcttcatggtgtacatattttagtaaccgtgttactgcatccatttctttgtccctacatttgtttgcttttgtctttcttgcctactttgaattggttgtcttactatattttaatttttgctatatctactttattaccccttgaagaggggtatacacaaaataagtaaaattatcaagttagtctttgccactaactgggaagcttaagagcaggaatgagaatgagagtgtgtatgtggggtggacactattatatgaaactgatgtatcatccattcttgaaaatctgaaaactgtactttagacttgatgtgacctggactccagactcctaggagacgccaagggtcctctcttggtgaatgtgcctaacagatttcttagtgaggctgaatggccctgtggagctttgtgtcaggccctgtggtggacactggaactacaaggatggataattcagtcttgcctttaaaggagtttcaatgtgataaagcagagacaacagatatcaattaaggcaatatgctgggagcactgggaacacaaaggaggtgtctccaaatgtccaaaactgaaatcagctttccacctgtttttctgtcttggtcttagttttagtcaaggaatatctccattacaaggctcaaaaatcaaagtagtctcttttttgttcttctgtgtttacctaccaacacagtccccacataaagcttttatttactcacttgccaagtctaactcaaatgtcttacatctacctcctctattgttaactggcttagatgaggccttaggctctcatgtggactattgctaacatctcaaaatgggcttttctgcatctagtcttcccattccaattgtgatgtatgctgccaggtttcagatttattctgtggagcctgtgggctaagaggatgttgagcggctggggctgtgggattccctcctacttcaactagagaaattcgagtttttgcctttatacatacaaatctaaagttaaactttatgtggtattttctgatttaaaaattggaaaaccattcccaggttgaggcaaaccaaaccacttctttgccatacacattctttaccatctctgctttgcgcaagctttctagttatttttggaattctgaatgtcaccctttataagtacaggtatttgcttgtctaaatactattcatttaaaatgctattccctcaatgaaacttctcctgaatccccagccagaagagaaggtctgtcttgcctttgaactgctatggccttcatatggtttcttgcagcacatgtcagcttctattatggtattgctgtcatttacattcacagctggccttttttctttactaacttgaacacccaggaaaggcagggtcaagttttctcaagatgggtatcttccacaggagctggcaaattgttggagctattaattgtacctactgtgtgtgaggccctttgctgggaaacagaagtcaatagatgaccgagtctctgttctcaggaagccaggacagaccagtaaaggagctcgtttaatacactttggtaaaggctactaaagagagccactgaagctactgtgaaagcataaggccatgaccaaggtttctgggaacacttaagctaagtcttaaggaatgaacaaaagtctttctaaatgaatgaggagagaaaattccaggcataagaaacatgatactgaaaggccatgaaatatgagaaaggaaaggaagttgcgtggctagtgagtaagtatgtagaatagggaagaagtggtaagggggctgctagagaggaggtggggccacatgagccatgaaccctcgaagggttttttttatccagaggggttagagggtcagaaagagggagcagtgattaactgtgaaagaaggaagaaggcctctctgtgaacacctggtcctctgatgtgtcagaaggaggttcaggtgttggagaccaggtgccagtgggactgacacatgcctttgggaagaatgga

SEQ ID NO: 55955 - DNA, 1030 bp, Homo sapiens
atgaaaatcaggggtgaaccaactctctttcaatttaggctatgagcaaatattagcctcttaaaacttgtttctggatagtctctgtccagtgttcatttcaagatccaatttgatagaggttgttattgggattttttttttttgagacagaatcttgttctgttgcaaggctggagtgcagtgacgcgatctcggctcactgcaacctccgcctctcgggtttaagcaattctcttgcctcagcctcccgagtagctgagactataggtgcacaccaccaggcccgactaatttttgtatttttactagagacgaggtttcatcatgttggccaggatggtctcgatatcttgatctcatgatccgcctgcttcaagtctcccaaagtgctgggattacaggcgtgagccagcacccggccgttattgggattttttaatcttcttggttctgctattaattatagtcagaagggactgcctggcaaaaattttttgtctttggtacatgtttcctgatttctgactggtttatagattaatatatgtgacaagtcacttcattcagccatctcacaaattctcagaaagtagcatgatttaaaactagatgttttggctgggtgtggtggctcatgcctgtaatcccagcactttgggaggctgaggcaggtggatcaagaggtcaggagttcgagatcagcccggccaaaatggtgaaaccccatctctactaaaaatacaaaaattagcccggtgtggtggtgggcgcctgtaatcccagctactcgggaggctgaggcaggagaattgcttgaacccgggaggcggaggttgcagtgagccaagattgggtcactgcactctaccctgggtgatagagcaagactccatctcaaaaacaaaaaacaaaaaactagtgttttattgggttgttttcttatggcttgaatggctgttggtttaacctgttttgctaaaagattgtgctttggaaataaaaatatagaacttgattggccattttt

SEQ ID NO: 55956 - DNA, 1071 bp, Homo sapiens
actcttaactgagattacagtggataagaggtcgttgcctttggaaacaaactttataactgctttttctcagggtttgctggaggccatttgagatctcctgaagttttttttttgtaacaagtgttgtattctagggttctccttttctatttaaggttactaaacctatagtgggagggatctgaggtcggaacaaatttaaaatgggctagtctgtggcagtaatgttttaaaaatctgtctggttttgtcaggataattatgactaaagcacaaatagtttaaaaaaaaaatgattatctttcctggatgtgactttttatagcagaaaggcctagtgaagaggaacaggcaacctgaaatccccaaactcccaggtattacacctgtggagtgcttttgtatcgttggtcttccaggttgatgttggaggaggtcgaaaagattgtccaaaattgatgttaggtatactcttcataataacagttgctttctagaaaccttcaggattgtgtctttacattgtacaactggaaacccatttttcaaggttggccgcacatgaaattaaacttctaaagcattttccacataaataaatacatttggaaggcacttaattctattaccaggtttctagttagccttactctggctttaccacttgctctctggaaccgggatttcttctttcattttgattctttgatttttttttcagtctcttactttgcctttttatattagatcactaaattttccttatgattttgtatacagcccatctctgatgctccccttcccccaattcttctctatttattcttggtacagaaggactggggaatcacatgtaggaatatatattatattcacgtagaagacaaaaaattatcagtggtaatggagagtaaaactttgaatgtgtaggcctagacctagtatgtaccatatatatatatatatatatcctgaaggcactaggaaaagatttagattcttttagggctttatccctaagggagagtgggtgtgtgatggatatcttctgcctttatggttgaaagg

SEQ ID NO: 55957 - DNA, 1220 bp, Homo sapiens
accacccagttctactcctgcgctcgcgatcctcctgcctggcaaactccatggcccgacagattcactaccactccactgccggaccaggcacgtccgtgggccatccacgcctggaaaacggctggctgggccggaggggcgaggcccgcaggcgaggggggcgggtacaagccacttcttgggagccgcggtacgcgcagccttgtgggagttgtagtttccgcagctctgagtctccaggcgaggtgtcaccacaggactcgttttcccgtgctcctgtgcgcgggtccacttgggacgggtccctgagtaggtgaggaggtgggtaggagcttgcttatagaaaagtggaatcgagtagtccttgctggtggagccgctgccgccagggaactcagggccggctcctgttccttcaagagtgctggaggccaaacttgaaatacaagtttaatgttcctcgtcgggcaaaagataaggatccgatctcccccggcccggtgtgcagcaggagcgaccaaccccgacccgggttaaaactcccagggactcttcgctgctgccacctcttgttctctcccccgttcccactcggggtctccctcagggccgggaggcacagcggtccctgcttgctgaagggctggatgtacgcatccgcaggttcccgcggacttgggggcgcccgctgagccccggcgcccgcagaagacttgtgtttgcctcctgcagcctcaacccggagggcagcgagggcctaccaccatgatcactggtgtgttcagcatgcgcttgtggaccccagtgggcgtcctgacctcgctggcgtactgcctgcaccagcggcgggtggccctggccgagctgcaggaggccgatggccagtgtccggtcgaccgcagcctgctgaagttgaaaatggtgcaggtcgtgtttcgacacggggctcggagtcctctcaagccgctcccgctggaggagcaggtgagaggtcggcccgggctggggctggtggggcgaggaccgtgtgccaggccaggagtctcgccctgacacacatcttcagagctttactcgcgcggagcggggctcgggttgggtccagaagaagggaaaacagcagtagccagtgactccccaggctcttgagcaaaggacctgctggggttaggacagccccggaacttccagttttgccctgatggcgcagccatcag

SEQ ID NO: 55958 - DNA, 1029 bp, Homo sapiens
tgggattctggagattttcttctgcccaatactttaagacctcccgaggaaggttccagaactgatccaggatctgcagagtgttgaagaacccctttaaacattaaccattatgtacgaatctgtcagttttttgtcagtatgcatcaggaattctaagtgctacctatgaccctgtcacttcatcttcttgtcctcaaaattcttcatccacaggaggatgctggtaatagtgactcaagattcagaagtgccacctatattgatctttttctttagctccaggcaagttgctgttgtggccctacttccaatgacttgagaatttcctcaaaataagttttctgccttgtaaccagaaggaggttatcagttcagtttttaaacaaggaaataacttctagtctctgtttggcttttaacagatacgtcagtatgttgtacaggtgatcttctccgtgacgtttgcattttcttgcaccatgtttgagctcatcatctttgaaatcttaggagtattgaatagcaggtgagtaagagtactgaaaactcctcttgaagagttctgtgctacattctttacagtggaaaagctattggatctcataactgaaaaaaaaaaaaacactgtgttaatagttcagtttcagtaactgcaatgatcacaacagatatgggtcacagccacctaatagctggtttgataaagattatgagataccaggaaacaaaagatctgaccgttaactctgaagaactcattggagtgaggctgtgaagctgcagtctaggcttcactcctagaagctttatttttccaggactgctcgctgactgaatcccagtaacagcccttcacattgttctgctgattgaaaatctctacctgaaaagattagaattcctcagagctactttaatgatctctctgaagactgaaactccagttcttacttaacttagttatttttattgattttacagtcatggtcaagtttggttgaatttaaagtgtttcttaaaacactt

SEQ ID NO: 55959 - DNA, 2016 bp, Homo sapiens
gactgggactcgtatctagaatatataaagaattcttacagtttaataatataatacaattaaaaaatgaataaaggatctgaataggcatttctccaaagatgatatacaaatggccagtaagcacatatgaatagatgcccaataccattagccatcaaggaaatgcaaatcaaaaccacaatgagataccacttcacaccaactaaaatggctataaccaaaaaaaaaacagaaaataacaagtgttggcgaggctgaggagaaactggaactctcatacactcctgaggaaaatgtaaaatgatgcagccacattgggaaacagtgggagtgcctaaaagattaaatatagatttatcatatgacccaacaattccactccatttctacctaaagagaaatgaaaacatacgtccacaccaaaatgtatacacacacattcctagcgtctctatttataatagctaaaaacaatccaaatgtcctcaattaatgaatgcagaaacaaaatataatatatccatataatgggatgaatattgttcaaccataaaaggaattattgatagatactacaacatggatgaaccttgcaaacattatggtaagtaaaagaagccagtcacaaaagattacatattggtggtttcctagaaacagaaagtatattggtggtttcctagagctgaggagattggggagaaacagggagtgactgctaatgggtacagggtttctttatggcgtaatgaaaatgttctaaaattgatttaggtgatggttgcacaactcttgagtatacaaaaaccattgaattgtacactttaaatgggtaaattatatctcattaaaactgttataaaaagtgctaacaaaaagttttaataaatgaagtacatcttataaactaataaaagtaattcatgcaaatcaggtgtttatatcaagagtacaaaagaaatatttttgagtataacatatattactgttaacatttattttcctttaattcttacattggaatgagattcctaggggtgggtaaaacaatagtcattctaccagcaatggcatatgttgatacatgttaatggtatatgttgcctatgaatatatcaaaaacataaacattcttattttaatatatgaaattcttaagatgttaagatggtcatacatacctttcaaaaatttgtattttttaatctctacaaatgagtagattttaagagcctagtaggctgattagataggatatattcaatattgagtccaagagcaaaaggaccctttggaagactaaagagaaagaaagttgctgccctctcttcctcccagtgacagtctttgacatttatttcagctcccgttattttcactggaaaatgaacctgtgtgtaattctgctgatcctggttttcatggtgcctttttacattggctattttattgtgagcaatatccgactacgtaagtattttaccctctcagtcagcgtatagattgagatgagtatttgaggggacttaaattgtggatagcttcatttctacattaactttcagtatctaccgctatttgaggatacctcacacacaacatcttaaaaataaatataaaataaatattgaatgaattggcacaaaataaatattgaatgaatgattaggttatttgttctgccacagctttatttttctacctattaataatgtctccgttagttcatcccacaccttaaattcagctaaatttctcttacgatggtaaggatgctttcactaaaaattatgctgttcatcagtcatttgccaagtgaattagcagccaaatattagttagcattatcttatatttttaaatagagcaagctctttaacctatatctgtttttcctaacagttttgtctcctctgtctcagtgcataaacaacgactgcttttttcctgtctcttatggctgacctttatgtatttcttctggaaactaggagatccctttcccattctcag

SEQ ID NO: 55960 - DNA, 1019 bp, Homo sapiens
ccaagttaaaagtgtgcttaaacatacatcctaaatgtcactgagctgagatcatgccactgcactccagcctcggcgacagagctagactctttcataaataaatgacgggttgatgggtgcagcaaaccatcatggcacgtgtatacctatgtaacaaacctgcatgttctacacatgtatcccagaacttaaagtataataaaaaataaaataaaaatatttaaatatatattttatatatatatataaatgtaactggatcaaagctaagaaaaactgtaagagagctgggtgaattccatttccctgagatcccagaggattagctataagaaatgagagcaaaggcattttagtttattatggtcattttactattttctagaaaaaagtagtaggtaacagttgaagtctatgtttgtctccagataccctgtatcatgcccaagagtgggaccccaaaacattttgctagcagtttgtgctttttgtaggaatgtgactgacacggatattctagccctggaacggcgactgctgcaaaccatggatatgatcataagcaaaaagaaaaggtaagatatcaacactgtaatacatttggactcttacaatttctcaacaagaaaatttgactgtgaattggtgctggcagggaattttatcttattcatttttactataaggtaaagtaccagatttagtgttggctggacacagtggctcacacctgtgatcccagcactttgggaggccacgacggggggatcatttgagcccagaagttcgagactagcctgggtaacatagtgagaccccacccctttaaaataacaataaaattaaaaatataaaaaatttttttaaaaagatttagtgttttgtgtgaaagaaaattcaatctcatttcttgaatttagatcattctccttagataaattattagaatttttttgtttaattttttaaattgtaaattgacaaattatggttgtatatatttgtggcatacaaag

SEQ ID NO: 55961 - DNA, 1107 bp, Homo sapiens
tcaacttccttcgttccaactacttaaaatcatttaagtcctctatatcatctttgttatttaaaaagtacttttaaaatgtgtattttcaaggtgggatttcatagaaatctatatcacagtgtataaaagcataggctctgaaatcagactgtgtatgaatttgaatccttgatctacaacttaatggtgtgaccttgaactagttactttatgtctttgtgcctcatttgtaaaatagaggtaataataatgagttaagacttagaaaaacaagttagagcccttagaacaatgacccacatatagctaaggacaactactgaaattattaatagtctctacagtacaatcatttgcttttcatgctttgccttcatttattcattcatagattcattcacttaataattttagaaaacctagtttacgccagacactgtactagatgctagggatagaatgatgaacaagataatcatttcttaccttcatgaagcttattagtctactctctttattaaagttattattacccataagtaaatggtaacaggttttgaattgcatgagtattttcacatttcatatttccttcttcaacacttttctatagtaagacccatagtcaagttaaagaagccttaatgtaagagataacattagacataaaggccaggcgcagtggctcacgcctgtaatcccagcactttgggaggccgagtcgggcagatcacaaggtcaggagatcaagaccatcctggctaatacggtgaaaccccatctctactaaagatacaaaaaagtagccgggcgtggtggtgggcgcctgtagtcccagctactcgggagactgaggcaggagaacggtgtgaacccaggaggcggagcttgcggtaagcccacatcgcgccactgcactccagcctgggtgatggagtgagactccgtctcaaaaaagaaaaaaaaaaagaatgataaagaaggctcaggttcactgactaattatttgtctctatttctgcatgtcagtaaagacagtcagtaaagactaggctattgaaggtagacacgtgtataatttattttatttacatttattgttta

SEQ ID NO: 55962 - DNA, 1107 bp, Homo sapiens; identical to SEQ ID NO: 55961

SEQ ID NO: 55963 - DNA, 1107 bp, Homo sapiens; identical to SEQ ID NO: 55961

SEQ ID NO: 55964 - DNA, 1107 bp, Homo sapiens; identical to SEQ ID NO: 55961

SEQ ID NO: 55965 - DNA, 1010 bp, Homo sapiens
ctcctttttagattacatagataaggaaggttgcatttttcttctgtcagaaattgttaataaggccttagtttatgaaatatctaaattgaggccgggcatggtggctcatgcctataatcccagcactttcggaggccaaggcaggcatatcacctgaggtcaggaattcgagaacagcctggccaacatggtgaaaccccatctctactaaaaatacaaaaattagctgggtgtggtggtgggctgcctgtaatcccagctactcaggaggctgaggcaggagaatcgcttgaacccgagaggcggacgttgcagtgagctaagatcacgccactgcactccagcctggggagagggtgagactccatctctctctctctctctctctctctctctctctctctctctctatctctctctctctctctctatctctctctctctctatatatatatagaatgtgaacatttcttattttgcattctgctttctgtgttacccatgagtacataactgtatatataacttcaacttctaccttcagctcagaagttacttgtcctttttaattatgtgtatacctaaaaaattaagttcacaataaattctaaaatgtatttccatagataaattcatttgctgtacatatagctctaattcttttgtggttttctcataatattttttatgtacagtatttgtctttacctctgactcaggtattaatggatttcaatgtgattacagaaaaggctgatttgacttcctagtttgatgactttcctactgggtttgtgtttgtgcacagaggagctttgtcagcttgttagttaattttgatcaatgtagatgaatgaggattttcattatataaaggatctagtgttacaataaattgatgtcaataatactcagatgacattttaaaatctggattcattcagtgggagataatgaatgaagatagtatgttcagttagcaaagctactaaaaggtattttccta

SEQ ID NO: 55966 - DNA, 1010 bp, Homo sapiens; identical to SEQ ID NO: 55965

SEQ ID NO: 55967 - DNA, 1010 bp, Homo sapiens; identical to SEQ ID NO: 55965

SEQ ID NO: 55968 - DNA, 1010 bp, Homo sapiens; identical to SEQ ID NO: 55965

SEQ ID NO: 55969 - DNA, 1457 bp, Homo sapiens
ttgggaatttttcattattccatttgatatcgtttgttgacttattagctataactcctttttctgttattttagtatttgctgttagagcattcagaaaataaccacaaggaattaccctgggatttcttgattctcttaatctgacttcatctaccaaaatgttacctttttggctcctgataaattaaggcataatgccgtagctttattcccattgactctttacagaaaagaaagatggaggacatagggacttttgtttgcctatatatgagtatccgaaatagatttcctatatatgatttggattaagagtagaattgcatttttaggaacattgacctgtaagatatgttatagtgattaattcattagtttcagtcactttttgaaatagtaagtgattgttaagatgctccaaggtaaaaatctgcatctttgcaggctaccatcaatattgtttttgatcgagttgggaaaacggatcctgtcacaagaggcattgagatcactgtgaattatctgggaatccaatttgatgtaagtgttatatcaagatcctggtttgtcatgtttctgttttatctgctataacttatcattgttaagattctaatttgtatactttaggtacttgcttctgcttttgttcttcccactctgtatattttgacgtattcacatggaaaatttttatattttgatgtattcacatggaaaatttgtaaaaggccaagattctctctcttaacataaagccagaagtaatgactgatacttaatattgtcacggatgctgattatttctacagctgctcctctgcttctctataggcagctaccagtttaccattttctccccaccaaagtattcaaatacttctctctgtgattcttattgagctcttcaaacacacaactcagctttgatgctccagtggaaaattagctactaattagtgttctgtgttagagctgaaatgatttctgctgtaagaaatgatctttatctattaatgtggaccttgggctaaagatggtaactgtcacctatgcacaaaatttttttttaaattgtctttttactgtttcataataccactgtcataaatacacccttgtcctaattgaagttcagtgtctttattcataaaccagagccaatgactctggctgaatagcactttaatagtaagaccaatgtcatattcttagtcccagtgtaggccatttagctgtgctgtcaacctagacgcagactgcgtgctacccccagccatccatcccagccagacgtgcccctaatctcaaaaggacttggatgaaatgaaaatgaacaagagcaaattgagccccaatccttgagaaacagctcaatgtacatgtttcttgatgctagatcaatagtgtatcctctttgagtgtgaaggaacatgatatcttttcttcaagtg

SEQ ID NO: 55970 - DNA, 1106 bp, Homo sapiens
gatttcgagatacgtcccatcaatacctaatttattgagtttttagcatgaagggctgttgaattttgtcaaaggccttttctgcatctattgagataaccatgtggtttttgtctttggttctgtttatatgctggattatgtttattgatttgcatatgttgaaccagccttgcatcccagggatgaagcccacttgatcatggcagataagctttttgatgtgccgctggattcagtttgccagtattttattgaggatttttgcatcgatgttcatcagggtctaaaattctctttttttgttgtgtctctgccaggttttggtatcaggatgataccctaactcattttatgaggccagcatcatcctgataccaaagcctgaattcaactattttctaatcaacgtaggaagacttcacggaggtggaaagtgagtcctctctggtaggaaaggtagggatttaaaaatccaggagcttttgaatgaaagagaagtggctgggacaggaagggatctgcaggcatctagcacagttttagaaagagcgtgggagcctactaacaattacaaccgcttggagtgggctggagtgatctgacttaatgttttatagtgatgttaagtcatatgtatcacatagtttctgaagtttgatagcaataggaatcctttcatatgttatgtaattaaattacccccagggggaaagtataactttttcagcagtctattttaagtctcttctttatagtcttaatcatatgaattgttctatacaggattgtggcatggaagagacacttttaatcaaatgttaaccatatttcttactgttcgtgacacaggaatctaacagtactgcataaatttatctccctctttcttgacagttcttttatgccatctctagcagtaagtcctccaatgtcattgtcctgctattagcacagataatggtaagtttaattagttacctttatgttgacagctgtaaaatatcagaaatgtgcttgatacttttaagaattttaataatttcctttgtcctgttcctcactacattcagagtcacttctggattaattcatttgacttacag

SEQ ID NO: 55971 - DNA, 1106 bp, Homo sapiens; identical to SEQ ID NO: 55970

SEQ ID NO: 55972 - DNA, 1106 bp, Homo sapiens; identical to SEQ ID NO: 55970

SEQ ID NO: 55973 - DNA, 1106 bp, Homo sapiens; identical to SEQ ID NO: 55970

SEQ ID NO: 55974 - DNA, 1027 bp, Homo sapiens
ggcaccagagaagcaaatggcaccttgaacttaagcctactacagactgttagaggccagtggtttcaaaatttagatataagaggggggaaaaatggaaccagggcctgacattttataaacaaacaaaatgctatggtagcatttttcaccttcatagcatactccttccccctcaggtgatactatgaccatgagtagcatcagccagaacatgagagggagaactaactcaagacaatactcagcagagagcatcccgtgtggatatgaggctggtgtagaggcggagaggagccaagaaactaaaggtgaaaaatacactggaactctggggcaagagatgtctatggtagctgagccaaacacgtaggatttccgttttaaggttcacatggaaaaggttatagctttgccttgagattgactcattaaaatcagagactgtaacacttttgccttacgttcattttatcaagcatagcttggtatttattatgcttgtgtgatctaacatgagttagcatcccacacctcctcttctgatcctgccccattaaaataaccaagaggttatctgttcttttccgggaaaggggtggtatgcacctgaaatagattttaccaaaagagagatttcagttatgtcattttttcttgatttcctgtgaacttagtattataccctactttcaattcggtagtgatgtttcctttttttttctatctgcccctcacgctgtggggtgaaaccgtgaataacttaactgggggaataagtcacttgtgaaagggaaatgttgaaaaatttttagaacactcagacatgcaatttaagaaaattctgaattttattactaaggtcttattctgtactttattgtgttttgggtttctagaggcaaatgaaggttaaagcataaaaagtgaatccaaaacaaaagcactatcaagcatactcaaaaggcatttgttaatggtatttattctagcaaccacaacattgttacaaaagcacaattttaat

SEQ ID NO: 55975 - DNA, 1909 bp, Homo sapiens
ccttgtcattgccttcttaaagtgaagttcttgaaaccggacacaatattgattgaacaaatagaacatttagatgtgtgaggcattattctacatgctctgaatattccaattcaaccctcatagccacccttcactgtagctactacccctctcttacaactaaggaaactgaagcacagagagaggtggtaactatattaccaggaattccaagtatggtctgaccaagtaagtacagtaagatggtcatctctagaagccaagtgtcagttaatttttaaattaccatatttggatgggacaaccacttggactatcaagtttctggtctttttctgtagtcctcaaatcaggtctcaccatgtggtattcatacaatttacttttaggttagtatagtacatctgaaatttattcttatttctttagttttcattctttctatcctaactaaatattttgagtattaattacaccatccagcaaatgaattatctagtgccactttaagtatgttaatatattttccatatctcctttcaactttaagcacataaacggttaggaacaagtagcatgccattagagacttctattcaagttgatattcaggttgatatcaagtattttctaggtatgattgttcaagtagctaaaaaaaaagccattaatctaattaattgtttaatcctgcttacaagattatcttgaaaaaatgtgctggggagtatggtataatgaattacaggtccaagaatttgggttcagataccaccttcagtctttactaagctgcgtgactttagcaaagtgcttagtctctctaagcttcggtttcctaatctatgaggagggcctaagatatcaccacccatcatattcccccctctgtaccgcttattttagattctactatcattgtatatcacagaggacatttatcttgttcatctttacaatcaacacttagcaagacagatggtacttagaaggccccccaggtatctgttaaactagacaacctcagttcttgtgttaaaagtaaaaaaaaaaaaaaaaaaaacaacaacaaaaaaaccttaaaacatgcagtagtgggtgttatgataaagagctgttaagagaaaataaagttagtttgattcaggttggtcttggtctatctgtgtttcttttttatttgctaagggcttacaagttgtttaataatcctttctaggcttttatgtgcagttgatagcacttaactgacctaaagcttaaaatctaattgtttcctattttgggaacaattttatttccaggcttatattctccatagattttctcagatcaccaagagtaagcctgcagttatattcacaaattctttcaaaatcttaagaccaaggacttaaaactcatttatcaatcatttggcattctcttatcactaccaatttgagttgagcttcagtttagccttaatgatgattgttatgcctcttccagtttgaggaacaaagtcctaactcagtgcaaaagttgaggtcatgagtgaatgggcccagccttaatgcatgaatatatggccttgtattacttaccagtctgtacatgttgtccgtctctttgtctaccaccaacagtgaagtctgatctccaccctttctaatcatttctaccacactgtcatgatccagggtttccacagactcgccgttgacagcaactaccagatcattgttcttcaagccagcctcctctgctggacttccagaatctatgtccttgatgatttgacctaccctcccccaaccccaaaaaataaaattatcagtaagtcccctaaaaaaataaaacagattttctgctggagcccaaagccctgatgaaatagataaaaaaggcatgctgagtacaacta

SEQ ID NO: 55976 - DNA, 2048 bp, Homo sapiens
tggtagactccttgactaaagaattcctgtctgcttcatatgatattctttctccaaggcactgaggatgtttttacaaaacacaaaccaaattaatatttgataaattaatgtaaacagagagtgaaaagaaaataacaacttatgggcgaatagcagtttatacggcctgaactcatgttcttttatgtatttaccttccctgaaagaacctagtgttcttcctattgagttgcaaggaaggaggactcctggttctgagtcccaaatcctcacccacacctcggcctcaggtccagcggtgtgctatactggctcacaccggctcacaaaagccaattctgtgcaacacttcattgtgttcagtgacatcgtgttagtaagttgaaattggacatgggaggagtatttacatcacaaaatactaccaatttggtaccaaaaacaaacgctaccaatttggatttccccctacccccgccccagagagctaacttaccaggataccgttgcccagatcccaaattctgccttatcataatgctgtggaaacttttgatgcccaacatcagaccctcatgtgacatagacgctgacccagctgtgccttctatgctatgccgctcatgcatctggctgggagttgggaacctaatggaactctggagtcagaatgggatgaggaatttgctggttactgccaagtttcctgctcttgtaccttacctttctgttctgagcctgccctcagatagaaaccatagccattgcttcctttcttcatctccacaattcggggctggtggggtaacagtttcaaactggctgtttctcttttgaattgtatcttctgctcaacatgacgcttgtcagtttctttgtccaccagcaggaacatgacacggcttcctgacttcttcacctgtaacaacacacacagatgaggaatgacatcaacccccaagaacaatgctggggaataagaaagtttctgtataaaggcacacagtctctaggttcaacaaaagataggggatgaaaggcctgagtttaagctgttacactatgccctaccagctaactgatatgtatttatcgccttttttttttttttgagatggagtgtcactctttcgcccaggctggagtgcagtggcactatctcagctcactgcaagctctgcctcccgggttcacgccattctcctgcctcagcctcccgagtacctgggactacaggcgcccgccaccgcacctggctaatttttttttttttttgtatttttagtagagacggtgtttcaccgtgttagccaggatggtctcgatctcctgacctcgtgatccacccgcctcggcctcccaaagtgctgggattacaggcgtgagccaccgcgcccggcccctatctccacttctatagttgttttcccttatttaagtatgacctacccacataggtgctaactgagcccaagtaggagctggaattcagaaaacccataaaggtacctagataaaagctagaaagggagtttggaaaagaaaagaaagtaagggtccacgtcaaaaaatcattctacaaagagaaggttggtcaatttttaaggttccatatgacctcaaaggaaaatctcggttatctcccacttcctattaaagcatttcagtattaacggctcaacagtgaacttattgtaaattcagagggcgcagtggcacacgcccataatcccagcactttgggaggccaaggcgggcagatcacttgagctcaggagttcaagaccagcctggccaacatagtgagaccctatctctacaaaacacacacacacacacacacacacacacacacacacacataaaaattagccaggtgcggtggtgcacacctgtagtcccagctactcaggaagctgaggtagaagaatcatctgagcccaggaggccgagactgcaatgagccgagattgtgccactacactccagcctgggtaacagagtgagaccctgtctcaatcaaacagttcagagggggctcccaa

SEQ ID NO: 55977 - DNA, 1276 bp, Homo sapiens
ccaagtagctgggattacaggcgcctgccaccatgcctggctaatttttgtatttttagtagagacgagggtttcaccatgttggccaggttggatctcttcacagcctgctgagcaataaatgagatagcctagagcagtggttttcaatttcaggtagttttgtttcccagggaacatttggcaaagtctgtagacaattttttatcttttttttggagacagagtctgactttgttgcccaggttggagtgcagtggcgtgatcacggctcactgcggcttccacctcctgggctcaagcaatcctcccacctcagcctcccaactagctgtaccaccacacccggctaattttttaattttttttagagacagagtctcactgtgttgcctaggctggtgtcaaactcctggcctcaagcagtcctgcttcggcctcccaaagtactgggatggtaggtgtgagccaccacacccagcctgtagacatttttgatttttgtaactaggggctagaggagggttgctactgtcatgcagtgggtggaggccagagatgctgctgaacatgctgcagtgcacaggatagacccctcaaaacaaagaattatattgggcccaaaaaggtaagagggctgaggttgagaaaccctgggatagatagagggatagtcagtgtcatcttgtgctaattgtgtttaaggttttgttttggtgtaggtttgatttttaattttgggatcccagtgaattttcagtaagaaaattgagaccgtataattttaggcaaacctctgatgggagagagggtttagaacaggaactagggctcagttagtggctgcaattccattatagcagtatctattggagttactttctgtctttggaattactgagaccagaggaattggattacccctcgcaagttacatactgtaagggcaacttataaaagaaaactatccacatttttttgtcagttgggaattaattgagatagaaacactgcatgtaatttagtaagacagctggaaatcccagtttgaaaacaaaatgaaaagcagacaacaagcctaacttttagttttactttctgtgtttctcttatacctctcagaagtttcataagctccagaaattttgtgtttaaccttttagtttcttcaaattcttggttgagagggtatattggagttattaatctttgttctaaaattcttcgggtgacttctcgctgagtcatctgaccgtctcagtttacctaagtatat

SEQ ID NO: 55978 - DNA, 1276 bp, Homo sapiens; identical to SEQ ID NO: 55977

SEQ ID NO: 55979 - DNA, 1117 bp, Homo sapiens
cctcccgtgtccttaattttttttttttcttagcaagtttccctctgataactctcccctcaattttcttgcattcttttatacctggtctttttcctacgatgacctccccccacacttcttccactgtgtcttctcaccttcctctgtgttcttttccacttttcaccccccaccgcccccgccacctcccttgtcagtgaagcgaaatagcggattgctgaggattgtcactcttcggttttttctagggaaggaagcacagaaagggggttggaaggtatctgtggggcgaaaagggggattttgctcttcagtggtttccagggtccttgtgaaagtgaagacagcagcgtactaatgacttgcagacggtctgcactcctatcactgttgaaggaaatggctttaggaagaaggcaggacgtactgtttcaacttcgtttattttggttgccatgctgccagtgtctttaatatcattgttccgccccccgccctgtccctttcttcacctaagaaaaagagccgggacagaatgttggggatgcttcctctgacgtgaaattggttttcacgagtttctgccagagtgttagccccttgagaggcagtgctgtggttgggaagaaaacacttttgtaggtcaggcgcggtggcttaggtctgtaatcccagtgctttgggaggacgaggcaggaggattgcttgaggccaggagtttgagaccagcctgggcaacagagtgagacccctctctacaaaaacaaacaacatttatgcagcatactagccagcaccagcatcacaaacccagaagctgttttgggttgggttgtagctactacgaggagctcccccagggtgaatgtcaatcctgtccttggccaactgtctttacggttgttcctttccttacaagtgtccaggttcagtcttgtgatagagtggcaacataatgtatgtttctatttatggtgtctcagatacagtgtaggagaaaaccttctgaagtgagtctgtatatcttatttcttagaaacacaaatggagtccagtgaataagtgcttaaagggtgttttatagtcttctctcactcaaaagttttgtttaagg

SEQ ID NO: 55980 - DNA, 1117 bp, Homo sapiens; identical to SEQ ID NO: 55979

SEQ ID NO: 55981 - DNA, 2641 bp, Homo sapiens
gctcatagaagggcatgcttgaattcggggaaaaaaaaaatctctgttaaaatgggatgcaaaacactttatacattgcttttacaaaagttagactaatttaaaggaaagtcttcaaaaacaatccgtgatcgataaaattacagaaaaaaatcaggaaagggggaaataataagggaagaaagattagcagaacaatcttccgccccagtaaagaggattgaattttaaccaatgagatcacaagtttgaaaatttccttttcaggcccaatcaagaggagactatgtctataaatatgactgcctagaccctctcctatcaatgagacagcatggcccgtactaagcagactgcccgcaagtcgaccggcggcaaggccccgaggaagcagctggctaccaaagcggcccgcaagagcgcgccggccacgggcggggtgaagaagccgcaccgctaccggcccggcaccgtggctctgcgggagatccggcgctaccagaagtctacggagctgctgatccgcaagctgcccttccagcggctggtacgcgagatcgcgcaggactttaagacggacctgcgcttccagagctcggccgtgatggcgctgcaggaggccagcgaggcctacctggtggggctgttcgaagacacgaacctgtgcgccatccatgccaagcgcgtgaccatcatgcccaaggacatccagttggcccgccgcatccgcggggagcgggcctaaggcatatttttaagtggtcgatctaaaggctcttttcagagccactgccgttttcatcaagagcagctgtaccggctctccatctgatgtgcgtctgccttgcgcagcggtcaggggccaggggcactcgtggtgggtgacgttacagaacccaaagcccagccgtgagttggccggcagtagagaaagccgcagaggcatggtccttgtggttccggccgagcgttttcacgctggtttaaggctagaggtccggctcccaattctgtgggtaaagttttgcatgggggcaagagactatggggagtttctagatgtggaagatcctgagtgtaagggtggggcgagtcccttaaaaattataaacccgtttcctggtttatttaggaactataagcttaattaaagctcagcatcttcctcattgcatactacaggcggtgtccaagccagaatagtaatttaagcgggcgggagtaaatatctggcgatttttaaaaatgggtgaggtagtatttcaaggaagagaaaaaaatttccacaaagtatagaataaaaatgcaaaaacgaggcaagagagttaacttgtctagctggcgttaagatttcttccgtatgcaagtctaatggaaagtgaaaaccaagaaaaaaccccaagccgtagaaactatcgcttcacctagcttaaaactggttagtgtgaaatggaccattctgataggataacaagacttttgttacagtgaccattaaggaagcaagactagaatctattatttacatagactccaccccctctgacgacaccgttgtaagttaaccaatgaaagcgcagcactttgcgagtcttcatttgcatacgggctctataagtagcgcataaccagcccgttttgcggtagttcggattacttctttaagtctcttttctcttttttcgcgcaaaaatgccggatccagcgaaatccgctcctgctcccaagaagggctccaaaaaggctgttacgaaagtgcagaagaaggacggcaagaagcgcaagcgcagccgcaaggagagctactccgtttacgtgtacaaggtgctgaagcaggtccaccccgacaccggcatctcgtccaaggccatgggcatcatgaactccttcgtcaacgacatcttcgagcgcatcgcgggagaggcgtcccgcctggcgcactacaacaagcgctccaccatcacatcccgcgagatccagacggccgtgcgcctgctgctgcccggcgagctggccaagcacgccgtgtccgagggcaccaaggcggtcaccaagtacaccagctcgaagtaagagtgtgcaagggacgcaatagatcaaccacctaaccccaaaggctcttttcagagccacttcagtaatcgagaaagcagctgtaaacacttgtcagagcgtttgatagcttttggtcaggtagggagtgttaccatggtcacggatgcattcgggtttaggactaaggagtttcctgtagtcctgtaatgagttggccctcagtcatccccgtccagtcttactgagttgcttgttatctgtgctacgagattcgaaaggtttgactcgttctgggatatttgggagggatggagggaaggaggcggggggtggttctacaccccttcggcctttaacctgtatctttaaagtcgttttcctttttgtttctgaaagtaatgaacgagatgagatttcccatacagatgagaaaccctcggtccgacctcttactatttcttagtgttttaatctgttttccttaccatatacctacaggcgtctgtcacaaactttgtctaatatagccatgtgctttcgtcccttagcctttttgcaagtcctgacttagccatcctcccctaac

SEQ ID NO: 55982 - DNA, 1586 bp, Homo sapiens
ggagcccttcttgggagccggcgcgaactttgcaggctcaggcatggccagacccaagaccgacaccgacccccgagaacgcaagcagagcggtaggctcggggtctaccggaaacgactgtgtacttacagaggctgtgcgcatgacgctgcgttatggttcgcgagttttccgcggcgcgcaatgcgagggagacgagattatgtaaatgagtggattctggctgagctatcctattggctatcgggacaaaatttgcttgagccaatcaaagtgctccgtggacaatcgccgttctgtctataaaaaggtgaagcagcggcgttttcggcgactttcccgatcgccaggcaggagtttctctcggtgactactatcgctgtcatgtctggtcgtggcaagcaaggaggcaaggcccgcgccaaggccaagtcgcgctcgtcccgcgctggccttcagttcccggtagggcgagtgcatcgcttgctgcgcaaaggcaactacgcggagcgagtgggggccggcgcgcccgtctacatggctgcggtcctcgagtatctgaccgccgagatcctggagctggcgggcaacgcggctcgggacaacaagaagacgcgcatcatccctcgtcacctccagctggccatccgcaacgacgaggaactgaacaagctgctgggcaaagtcaccatcgcccagggcggcgtcttgcctaacatccaggccgtactgctccctaagaagacggagagtcaccacaaggcaaagggcaagtgaggctgacgtccggcccaagtgggcccagcccggcccgcgtctcgaaggggcacctgtgaactcaaaaggctcttttcagagccacccacgttttcaaataaaagagttgttaatgctggccactctcagtccagcgttcctcagtagtgaatagcgaacctggagctgacgggacgggacgggacgggacgggacggggcggggcggggcggggtgtgtgtgtgtgcgcgccgtcttccatctggagcacgtaactgccttggctcttcgatgagtgggtccccagtcctaggacttcccagggcaggtgcaggcaccaaacgtcctgggcgccgccacggtccgctccacacagtcacaaacaccagcgccgcgggcagtacccaacgcgctgaagtgttgcgcgcggagcgcgcgcttccctagtggtttccgcaggctatggccggacacttagacctagtctggcaccagcgggacgtgctcctcgtccccacccccgatggggagggccctgagcgggtagtgctcgctagtgtggcggagctgggtcttggcttcactgagctgacttaagtcttagtttctgttttgttttccaaagcgccctggcggcggagagtaagggcctcggaggcggaatcttgcgtcctgggggcgggcacctctcccacccaaaaggcacccgacaggcgaaaaacgatccgccaagtagcaactgggggcggggggcaaatggaagaatgaggttccacgcgggagctgtagggcgcagcaagaaagggggggtattgcgggcagtgtgttc

SEQ ID NO: 55983 - DNA, 1113 bp, Homo sapiens
acagtgcctctcagtaaaacaaaaccagtattttgtttgaaagcctgctctctttaaagatcctggcatgcaaataaggggctttaatgtggctctcagcgattggtagatacttacaaaatccgtcatttcctttcagtgcaggacgcaaaccaagaggcggctttctgcttttctattggctgttagatacggctccgcttttagccaatcaaacgacttcccttcacccctcccggtagctcttataaattacatcaaattggttattctttccacattcttctccttgtaaaagaagctgtaactgcaattttagccgtaatgtcaggacgcggaaagcagggaggcaaggcccgcgctaaggccaagtcgcgctcgtcccgcgctggtctccagttcccggtggggcgagtgcaccgcttgctgcgcaaaggcaactacgcggagcgggtcggggcaggcgccccggtgtacctggcggcggtcctcgagtacctgaccgcggaaattctggagctggcgggcaacgcggctcgggacaacaagaagacgcgcatcatccctcgccatctgcaactagccgtgaggaatgacgaagagctcaacaagttactcgggggtgtcaccattgcccagggcggcgtcttgcccaatatccaggctgtcctgttgcccaagaaaacggagagtcacaagcctggcaagaacaagtaattaagaggcttgacaccatactcattcaccccaaaggctcttttaagagccaccaaagtgtcaaatgaagggctgatcacgaaatagcgcattagctctttttttgaaaacttgggtggctctaaaaagagcctttggtcttggtttgtttgtctgcatttatttgcttttggctttgtggctttcggttttctttggtaacagaacggcctggatgttaggcaaaacgccgccctgggcgatggtgactttgcccagcagcttgttcagttcctcgtcgttgcggatggccagctggaggtgacgagggatgatgcgcgtcttcttgttgtcccgagccgcgttgcccgccagctccaggatctcggcggtcaggtactcgaggaccgccgccat

SEQ ID NO: 55984 - DNA, 1089 bp, Homo sapiens
cgtggggttagggcggatgcggggatcgcggggcgggtgttgacattgtgctctcaccaggcggatcgccccgaccctcactcctggcgtctgagtctctggcgtagcccatgctgagtgggcggctggtcctgggtctggtctccatggctggccgcgtttgtttgtgccagggcagcgcgggatccggggccatcggtccggtggaggccgccattcgcacgaagttggaggaggccctgagccccgaggtgctagagcttcgcaacgagagcggtggccacgcggtcccgcctggcagtgagactcacttccgcgtggctgtggtgagctctcgtttcgagggactgagccccctacaacgacaccggctggtccacgcagcgctggccgaggagctgggaggtccggtccatgcgctggccatccaggcacggacccccgcccagtggagagagaactctcagctggacactagccccccatgcctgggtgggaacaagaaaactctaggaaccccctgaaccccaagagagggaggaccaggatccgaatgggctgggtgagcacgaattaccgaggccttccctttgatacagtccaggatttgtaagggatgaagacccctgggccccattctgttggggtccatacatactctccgaagatagcaacttgcttcaggtcaaagtgaacccgagaaaagagaagaatcactcactactgctcttgccctggactattcaggaagggcagcccggatgttccatgttaaatcgtgacagaattgcaccagacctgatgagttggaaacaatcctatacattaaaagaaattacactatgaggctgtgttcttaatggactgctgaatcagtgccacaggtgttcttgggagaagaaagatacttgtagactagtcgggaagggctttatgagggaagtgatctagttggatctttaaaggaaagcacaaaattaaccagaaaggagaggataggtgctgcaggcagggagaagaacctgagcaaagacatagacgctggactgagaagtgagttaatggacaagacaggggatataggcaggg

SEQ ID NO: 55985 - DNA, 1023 bp, Homo sapiens
cctcctcaagaagcagaggcctcctctggagtgagaggctccacccactacagcacaggcgggaatagcacagctgccctcccatgctccctacctgtcccctcacagggaggggagcaggggagggaaagaaaccaggcatctggtcaaaccagcagatcaaaaagcacaaagagctggggcagaggcaggaagcaggggccctcctggcagctcctctgagtggggagaggttgggcagtgagtgagggacccctaatgcagggactagaagcctcagtttccccattttacccttccacacaatagcctctgtaggttaggctgccccatcccaccctactctgtgtggctgctttctttggtgccctcccctcaccccactgtagctgtgacgtgttgtagtttttagatgtttgtaaaatgtttaaaaaaatgttaaaaggaaaaaagtgaaaataacaaaaaagaaaatcaaaattcaccttcgtcatgctgcgtccagtgccccaaccctgtggtcactctccccattttgtaacactgtaccaggtggtgactgtttaactctttggtgtctgtgctcaaaagactgccttctccagtgcccagtgtatgagtgtgtgccctgtgcccttgtccctcactccccacatgctggacgtagccctcttcctcgcacccctgggagggacccatccatctcccttgctctcctggggaaccctaaacccaactctgttgatgtgaaaaatgcagtgaaaaatattgacgaaaaataaaacggaaacaaatcctcaaaatacaaaatggctatacctgcttctgtgactctccacctacatccaattctcctaacagccttggagggtaaaatggtgagatggactgaaggtcagaataacatggtgtaccagatttacttcctaaattggcctctctaccttgatctttcccctacagatggagggccctctaagtctcccagatttgaaaactttgggagtaatgtttcataagaat

SEQ ID NO: 55986 - DNA, 1622 bp, Homo sapiens
gcacaggctttgaggttatgggttttgaatctcagctccaccacctgcctctggcctctggcaaattacctctatgagcctggttgtttcctctgcaaaatggaggtgataatagtacctgtgtcatagggttgatgtgctagatcaatgcatgtaaagcatcaattgccttggcccatggctggcattgaataaatgatggttactgatattattaataaacaattataagggaggttgaggaggagtgaaaagccttccttttggataccttggttggataccttcggaacaagtctcatcctgggctatctgaaagccagctgatgggacagggtgggctgtgggtgggtttcactgtggccaggctcatgttgctctctcctctcctggctccagctggctccagcgtgatgtcctgtgtctcctgcttcttcctgtcttttgggaacagtgagtcggccatgatcgctctgctctgcctttttggcggggtcagcattgcatcctggaatgcgctggacgtgttgactgttgaactctacccctcagacaagaggtagttggaatgtgttggaggcagggcagtggattcaggggaggggtggggtgaggaaggagggctgaatgggaagagcatccttaggggtgagaggatatacatttccattttctcctctaaaatctggtagctttggccgggcacggtgactcatgcctgtaatcccagtgctttgggaggccgaggcaggcagatcacctgaggtcaggagtttgagaccagcctggccaacatggtgaaaccctgtctgtactaaaaatacaaaaagttagctgggtgcctgtaatcgcagctactcaggaggctaaggcaggagaattgcttgaacccgggaggtggagctttcagtgagccgagatcgcaccactgcactccagcctgggcaacagagcaagactccgtctcaaaaaaaaaaaaaaaggaaaaaaaaatctggtagcttttgtatctactcctcaaagtcttaactgttaacctcaatttttggtctcctttccctttgtctctcaatttatttacattcctggtgtacatcctttacctctctgatctctccaaccttctctctccctcttggacactgcctgcatcttcctggacttcacttccctgccctccactcttcctttgcctccctcctgtaccttgcgccgtgctgcactgggggactcctgagcaggaccacagcttttggcttcctgaatgccctgtgtaagctggcagctgtgctggggatcagcatcttcacatccttcgtgggaatcaccaaggctgcacccatcctctttgcctcagctgcccttgcccttggcagctctctggccctgaagctgcctgagacccgggggcaggtgctgcagtgaaggggtctctagggctttgggattggcaggcacactgtgagaccaacaactccttccttcccctccctgccctgccatcctgacctccagagccctcactccccactccccgtgtttggtgtcttagctgtgtgtgcgtgtgcgtgtgcatgtgtgtaaaccccgtgggcagggactacagggaaggctccttcatc

SEQ ID NO: 55987 - DNA, 1071 bp, Homo sapiens
cctcgtctgcgcctttccttctgtgtttgccattggggctctgaccacgcagcctgagagcccccgtttcttcctagaggtgatggggctgagctgcatggggtggggtggggtgcgggctgtggagtgtggacggcagcaggggcttctgtgttcaaacaccaactggagtttgatttgatcctgtttgactgcctgccttcctcacagagtccactctccaggggactttatcttgcattctttgccttggaatgtgtccctgaggggttcttgggtggagaaaccaggggacctcttcacccatggatgacttaagattttgcagggaagggccttggccctgtcctgcatttacagctcaagagacattcccaccccctataccttcccctcctaaccccagcaggattaggtctttgactacatgcttgcccatcatttcccttacctttggtttttacattcctctgtactatggaattcccaagacctgtgcttgcctttttcccctggacaacactccccacccccaacccgcagctcttgcccaagtctgattgtcttgctatacctcagcttggggctctttcagagtggtgagtgcatgcccataggtcagggcttggtggtggggttgagggctgggaaccatttagtgtcctgtgactacagaagccaggtgggagggagggggtctataactctgggtcaggtaggggctgacttggatgtggggattgtgtctttggctctagaatggaaagcatgatgaggcctggatggtgctgaagcaggtccatgataccaacatgcgagccaaaggacatcctgagcgagtgttctcagtaagccacagccctcccgactcagacctccacgccctgcagccccagcccctacctggcccctctctgagtaccccccacctcagaccacactctaccgtaaggagattttcagggtatcatatccacctcctgcctcccattttgctaatgcaggggaaactgaggcgcctggccgatgttgggaaacacagagtgtgtgactgcccaccccttctcttga

SEQ ID NO: 55988 - DNA, 1703 bp, Homo sapiens
cctccctcatctgcacttatcatgttcttacagcttcctgtaggcacaccccttgtcccgtgcccttactaacttttcttttactctttgcaggtcacccaggtcctatgcctccgcatggtatgcgtggacctcctccactgatgcccccccatggatacactggccctccacgacccccaccctatggctaccagcgggggcctctccctccacccagacccactccccggccaccagttccccctcgaggcccacttcgaggccctctccctcagtaaattcacattttccttcctcctgttacattttcccaatatcttttctattccttggaccaatcagagatgctgtagctccttggggcaaaggtactaatccctttcagcacccccactccattcccctttttaatgtaactttttccacaggaggtatttcttttttatgttggtcctgagtattttgcaaatgcacagagaaaataaaactaaactccttgtttatttgtggtgttttccttgacaacagtaacttttctctttttcttttaagaagagatgtcagtatcatgaaaagaatggtaaggtaggagtaggagcaagggtgcttactccacattttaaaggcttattctgtaatgtgctgttgcagttgctgagctttgctgtgcactagagtaattgtttccttacgtagagcttatcttctagtttggaagatagggacccaatatatatagcataggatcgtcattttttttgtttcttttttttatttggagacacggtcttgctctgttgcctaggctggggtgcagtggcacgatcatggctcactgcagccccaacctcccaggctcaggtgattctcccaccacagcctcccaagtagctgggaccacaggtgtgtgccaccacacccagctaatttttgtattttttgtagaggtgagatttcggcatattgcccagactggttttgaactcctgggctcaagcgatcacccctgcctcagcctcccaaagtgctgggattacagacgtgagccacctcacccagccggactattgttttaaagtgaacagatgtatctggagatagtctggcaaaaatgaagtaacatgcactatgcaattcattgcagcactgttataatggcagtagattggaaactcacatctccatcagtaaagggacggttgaataaactgataaattcatgcagcagagtactgtgcagctgtaaaaaggaatgtaaaaaaagctttaaaaaggatctccaagtgaagatctctacgtactgctgtggagagatctccaagtgaagaaaataatgtgtgtagtgtgctaccttctctaagggtagcatatatatatatatatgtattaacgtttttaaaaatgggtaaaccagctactcaggaggctgaggcaggagaatcacttgaacctgggaggcggaggctgcagtgagccgagatcacgccattgcactccagcctgggcgacagagcgagactctgtctcaaaaaaaaaaaaaaaaaaaaaggataaaccaaatactaatggaaattgataacactggggagggagtggatattgagggaagctggattctctgagtatactgtgttaatgtgtttttcatttggaacaatatagatgtcttacataattacaaaacaaaatgagtaaatgga

SEQ ID NO: 55989 - DNA, 1075 bp, Homo sapiens
gcctgccaccatgcctggctaatttttgtatttttagtagagacgaggtttcaccatgttccccgtgttagactaggctggtctcaaactcctcagatgatccacccaccaaggcctcctaaagcgctgggattacaggcacaagccgtcgtgcccggccagtgagactgttttctactcacctcccacctctcccacctctcccacagactcactggtttcctgtcttcttgaccccaatttattctttaaacagctttattgagacataatgtacataccataaaatttacccttcactgaagtatacaattcagtgagttttattatatttacaatgttgtacaaccatcaccacagtttaattttagaaaccatcctggccatttacaattacttttcattcctgttcttaacccagcaggctatcaacctgaatcctgaatcctgagttctaatctcttgcccttctgatctttctaccctctatcagattcatctgtagctgaggataaatggctttcagccctggaaggaacacgatggctggactatgtcaggtactccctcgcttcttctagccatcatttataattcaaccttcctcaaccttctgttaacttggggtcctaaatggcctttctttagttcttctcctcggtttcccaagaagactgccattttctgctctttagaaggaggaggggtaggatttggagtcggccttattccatcccatgacccatcaaaatcactccattcccctaggcttatcattcttcctccctcttcctcacctgctcctccagggcttgtcttcgaaaggccagtgacatttcagtattagtgacatccagggttcgttctgtaatacttcaaggtgagttccttggttaagcccattccattccttgcctcttttctttacccacctgaccagattgcattcagggagggagacccataaggcttcttcctctcctgttcctgggaactacctgcgagctctactctcatccttcagtgctacctctgcctccccatcacaacttgtggtccctgacactaggatggt

SEQ ID NO: 55990 - DNA, 1048 bp, Homo sapiens
gcagtatttaaaaaaattaatgcaaaaaatttatgttggataaaatagcgaaatcttacaggatctgacaggactgagattaggaggagggaagtgaggctgaattgaataagtatggggatgaatccttcttatttaaatttttgatacattgtccatcatagactttttacattaattgtgattttttaaaaatgttgcattaaaatagtatttatcttggttactgggttttttggcactccttaaattttgtgcccaaggtgagtgctttgctcacctcaccctagttacgtccctgtttctgtgatttgaacactagcgagaacaccactgtgtgcgcctccacccccatcacacaccaaacaacaggtggctcagacaccctgaatttgcacagctcacctagctttcctaatttaggccttcatatcatagaatggtggcctggaccaataggaatgaaaacagaccaggggttttcccagagaataaagccggaaaagttttgattctccactggactgctgtgtttggatttgatctgttgttagattctagttaacacttttgtttttaaaaactaaggacaaatgaacaaaaaaccttgtatcatgtttgtttttatttataagttagccaatcccaattccgtttgctttattttcaaataaaaaaagatggaaattttgaggggtggtctaggggtgaatatggtaaaatggggctttaggccttatagctttttattaagaaataaattattttttttatttgggagggtaactatttattgaggcattgaaaaacctctccattctaaggatgagagaccctgagacaatggatattttttataggagatagtgaagtttgttttgcttcattctttcggggagggttttggtgggatggggggaggtgaaggaataatgcctgggaaattaatatagattcagcttggtttgtggtattttgggaagatgagggaatagaagaggcaagcccatgtcgttactgggttggggagaaggaaagaaggggcata

SEQ ID NO: 55991 - DNA, 1814 bp, Homo sapiens
cggggccttcccccaactcagaccaaatgcaaacaaccgaactgcagcttctatggacaccctgagacaaacaacttctgttcctgttgttacagggaagaactgaggaggagggagcgggaaccggatggggagctcctggtgcacaggttctgaacgggtggaacactgaagggcaaggaggctaaacaaagttaagctcaactaattggctcatcaagaacacagtccccatgttgagggggaaaatgcagtaatgtttgtgggagcctggctggaaacttttaagtgtgtgcacacaggagtgctgccaggctggcaagagcaggtcggggctggatggcacctcaggggctgtactattcctctgcagagcttgacttgatgaggtttgaggtacaaggggaaaagatggcgattctgtcttataacctcctgggtcccatccagggacctaagagaaagtagcaggggaaggtttggtgtgtgggggtgggaggtgggcagaagtcttggggaggaatgggcaaaggaggttctcagtcaataaaaccaaagttctttaggttgggaaaaagcacatggtggagtgagaagtgtggaggggaagtgggaaattggacacatttgctattgatttgaattaagctagaaattaaggttggataaattcttccccttgaaggatctggaaagacaaggcagtaatgtgtcctcatgggtgcctgttaggaggtgggggtagtttaaatccgtttgtttagatgggaaagggaggaacttaagagggaaatccttttcctcttaaggtttatttccttccaagcagtcatatgtcatctgttacagtttgagaagagattgctgattaccccctgtcttttcctcatctaagtctttaattgtatttgtttaaagggaagagtgtggtgagaacagccgtcatgtgtgttgcattttctccaggtgaattggggcagagctgatctattttttaaccacagcaataaccatacgttggggtttgagtgcaccttgggaggggtgggaggacagacattttagccagaggctgtttcaaacaaaaccaaaaacctaagtagagcattacaggcctctgtggctgctgcgtttctgtagaaagcaacttattttattgacttttttttttaaggaaaagaaataaaaagaccccagcaagcaaaaacatttaaaaaatgatttttttccctcctacttaagtggttctttctccctttgctctacttttggagaatgaacttaacatcccggcttcttttgttaagccatagctgaccttaatctgtggttagtttattaaaataattaaaaatactttctaagaagagatatttttgatattaggactgatgttgaaacatataggggcaatttataaaaaggtagttagagaaatatattttagtgaactataaccacagagcacagatgactcccaatgagctgatctgtctttaggtttctccctttccctgacccttccctgttctctaggggctgggagtggggatgcggacacagtagggggagctccttcgcattttgcacaaagcacaagtctgaacagcctatgctctggccagagccatttctaagagctttaaaccggaagacctatcctgggccaattttcctttttctttatatttttttccgggaaaaaaagtcaactatgcaattgtatacactcccgggtgcatgtgaagaaggggaataagtgtacttatgtgtccagagtattaactggggctgtttttctgtgtttggatttc

SEQ ID NO: 55992 - DNA, 1024 bp, Homo sapiens
ttccaggctcctctggcccagcctgagtcccccaccgcctcagctggagatgagccccggtccactcctgagtctggagactcagacaaggagtcagttggcagcagttccaccagcaacgagggcggccggcggaaggagaagtcaaagcgagatcgggagaaggacaagaagagagcagattctgtggctaacaaactgggcagctttggcaaaaccttgggcagcaagctcaagaagaacatggggggcctgatgcacagcaagggttcaaagcctggaggggtggggacagggttgggaggaagcagcggcactgagacactggagaagaagaagaaaaactcactgaagagctggaagggtggcaaggaggaggcagctggggatgggcctgtgtctgagaagcccccagctgagtctgttggtaacggagggagcaagtatagccaggaggtgatgcagagcctgagcattctgaggactgccatgcaaggggaggggaagtttatttttgttggaaccctgaagatgggtcaccgtcaccagtatcaggaggaaatgatccagcgctacctttctgatgctgaggagagattcctggcagaacagaagcagaaggaggcagagaggaagatcatgaatggaggaatagggggtggccctcctccagccaaaaagccagagccagatgctagggaagagcagccgaccggtcccccagcagagtccagggcaatggcattttccactggctaccctggggactttactatccctcggccgtctgggggcggagtccactgccaggaaccccggaggcagttggcagggggtccatgtgtcgggggcctaccaccatatgccaccttccccagacagtgccctcctgggcgaccctacccccaccaggacagcatcccttctctggagccaggcagccactctaaggatggacttcacaggggtgccttgttaccacccccctaccgagtggctgattcctatagcaatggctacagag

SEQ ID NO: 55993 - DNA, 1027 bp, Homo sapiens
agctactcgagaggctgaggcaggagaagcatttgaacccgggaggtgaagtttgcagtgagccgagattgtgccattgcactccagcctgggtgactctgtctcaaaaaaaaaaaaaaaaaaaaaaaaaaaaggaaagaaagaaaaagaaaagaaattaagaaatctgggctggagatagatggtatataccatacagatggtagtggatgagattatggcagtagaagagatcacccagagggaaccaaggtgaaaatcattgacacaccactagtattttgggggcagacagaatttagaggaatagaaagtaattttatggacgctaatggcaaagaaaatttaaagaggaaaataacccatgtgaaggctaagatgggaaccagggtccactgaatgtggcaattagaaggtcattgttctttgccaaaatcaggtaggtgaaatgttatgtggcaggtgggtgagcaggatggagggcagaaatgggacagattgcagtaggtcaaaaagaatggatgataaagaagtttaatagtcatagactattagttcatggatcttgactgtaaaagagataagagatttgactttgtagtacaatttgtaaaccaagtgctaagggattagggagtaagtaacagtgaataaggtggaataggtattgcctcttagaacccagcctctaattgcccaatgtcccctgcctgtccttcacacagtcagggctggtatacacagaagatgaatggcagaaggagtggaatgaactgatcaagcttgcctcaagtgaaccccgaatgcatctaggtaccaatggagccaactgtggtgggtaagtatggctaagtaggggaggaggaaacctgcatagagtcctcactgggcttccacagcccagtgtctagagagctctgtgctaagaggatattagaaggaaagaggggaactatgctaagggcacaaaagtgtgtaacaacatgatatgtttaggaactacaggtagttcggtattgaactggaa

SEQ ID NO: 55994 - DNA, 1050 bp, Homo sapiens
ttgctaaatgaatgggtccctatcacactgggaaatatggaagtggaggaagacagtcagagggaggggaagatcaggcaaattccaaacaagggcagaaagaggaatgaataatttggtgctaatgtgagtgcctacaaaaatactgtctctatttctccaattgtatttggcttcagaaaaagggttctgaaattcagtagtcagttagacttagtttttctctgactgtaaaccctgttgagaggtaactatcaccacatcagtgtagagttctccaagtgggctgtgtatgttctaaggtgactccatttctcattgcagaaaaacgcctgtctaggggcatctcccacgccagctccagcattgtttccctggcccggtcccatgtctcctccaatggtgggggtggggggagcaatgagcaccccctggaaatgcccatctgtgccttccagcttccagatctcactgtatacaatgaagacttccgcagcttcatagagagagacctcattgagcagtccatgctggttgccttggaacaggcaggtcagtgagtgcttcctctcccacactcttccctctactctccacctacaggcagccttgtggaggggctggacttgatcgctagcttccagtttaagtgtgttatctgattgcaaagtcaggagtcagtgggataaacttgtgctgtcaaagaatggatacagattagatactttactctgggaatttcctggttgatggaagagaaaccagatacacatgtgaaaaggcctaggaatcaatacctcgaaatcaatacatgaaaaaaatacaactaattataattggccctggaacacccttgtgaacagaaatgaccaatgctgtagatgatgcacagtagtgaacctatccccccaaatgtatttacgtttgtaattgtgtttatcttaaattattgttaaaattaattcttatcatagggtgaggcagctgggaattttggaaaagctaatcaggcattaaaatgcttgtgtgggataagaactggagttagat

SEQ ID NO: 55995 - DNA, 1020 bp, Homo sapiens
aaaccccgtctctgctaaaataaaaaaaaaaattagctgggtgtggtggcgtgtgcctgtaatcctagctactcagaaggctgaggcaggagaatcccttgaacctgggaggcagaggttgcagtgagccgagactgcagcactgcactccagcctgagcgacagagcgagactctgtctcaaagaacaaaaacaaacaaaactaaaaaatatttgaaaaataacatcactataagataactttagacaactcagtttattttgtgtatcatatctggcaaatgttgtattaagaacagcccaacatgcttttgaaattttgccccctttggatcatcattaaatcattacataattgaagccatacaaatgaactgtaatactacattgagcaaattataatcacagtggaatatctgcttgggaattacaagtgtcatgtattcaaaacaaatgaaatgatgtggggtactatctacattattgttctctatagactgttaagaattgactgtccctataaatttctgataaatatgggtattgagagtagttgtagtaagcaatataaattaatgttattgatgtaggaagaaagttcccaaatgtgtaagatttgttgttgattgtcttttttttttttttttttgaaacggggtcttgctctgttgtcaggcaggagtgcagtggcacaatcttggctcactgcagcctccgcctcccaggttcaagcaattctcccacctcagcctcccgagtagctgggattataggggcacaccaccatgcccggctaatttttgtatttttagtagagacagtgtttcaccacgttggtcaggctgctcttgaacacctgacctcaggtgatccacctgccttggcctcccaaaggattttcttttctataatggatttcttttataatctttctagaatgaaaataccctttagaaaaggtatttcccaagaccctgagaattaccagagaggttatttgactaactctagtctagtgaa

SEQ ID NO: 55996 - DNA, 1041 bp, Homo sapiens
cggcctcccaaagtgctgagattaaaggcgtgagccaccgcacctggcctaatactgtattttgagtaattttagctatcagtttactcctctgctagcatcaaaacactagtcaactctgaaattatccagtgtatagtaattgttcattcactcaacaaatatttattgagggccagtgtgcctagcactgtgccaagtgatacgtgcaggggatacattagtgaaggagacatacaagtttcctgctttcaagaaacatatattagaggagatggctagacagcaactaattaaaataatttgagagtattcaagtgccagtaaggaaatacacaaaggtgccatgttagagactattgcaggtggggagttctttagggtggtagcctgttgcttccttctttagtttgggtaagcaaactcatggtagaaaagcagtactcaggaaaagtacaggaaaagcatttttcagagtggtattacaggttcctggttaatgtagatgttgagatgttaatgaagagttaggaaataaaatgttactcttcataattttaaagtgctgtattttaaaattcaactgaaatgaatgagctaggatagtttccccatttggttaggaagctgctgacatgggactgtgattatcctgttccagtgtaatttgagccttatgtatttatttattcctcaggtggaggcctgaattttgatctatgttctacctacatccagctggctgaaagtacttgaggatcacatgaccctggacatggatgctgttctgtcagattttgtccgttccacaggagcagagccagggctagcgcgagatctcctagaaggtgaggagttgtaggggagaatgagaaaagagaaagtaaaatgtggtatttatcattaggatgatttggaccatttaaggtgatcaggaagatactttgtgtaggttaggccctatagttaattctaatgatatactttgtgtataacccgtcataattagaaattttaaaatccctttttcaccttgaactt

SEQ ID NO: 55997 - DNA, 1011 bp, Homo sapiens
atgtattagtaattctttctgataattatgatgttgaaactcaggtaaatttaaaattgacaatatctagaatgatagtcaaagatcatagatcatgaggctatagtgaactgaagaagtttattttttaaaccttgaaagtatcttatgagtcatctaatacaagtctagattatagaagagacaactgaaaccctgtaagtaatttgaccaaagtcacctagttaatacatataggtgtatgtaggtaaactcatgtagtgtgagggaggtaagagttgtgacagcatggttgatgtccctttggaaaggagagtttttaaaacttagaaatagaatggtgataagaagtgccgtagaatttctgatctgctaagcttcaaattggttggtttgttggtagctgatgtggaaattggcttagtcattgaatcatttattcatcaggcatttgactacctaccatattatagatgctacactagatgttggagttacaaaaatgaagaaatcgtgtccctgcgctcatggatctcttgtactattagaacaggacaagagagaaaaatttctattttgccatctttctctgtctcaaaaaaaaaaaaaaaatccagtgttagcaagttagtgacctgctggttttataacccacaaatcttttttgtttatttgccttgccactttttgccttcaacaattatgctttgacctttcccaaaaggcaggggattggtgggtatggtagggcaagtgtacctggcaacttaatgaatgagtcttctatagaaagctgtaaacttggcagaatttgatcagagattgttctttactctgttattgcttccctctgacttttaacctcagaggaatgttggattggtgccaggctgtcaggttagggacatagtttctgccaaagtctgaaagaagagatctttttcagttgaacttatttgacagtcatctgtcctgtgtggagaaagacgtgtttggagtagatgtgtttcc

SEQ ID NO: 55998 - DNA, 1040 bp, Homo sapiens
actgcaagctccgcctcccgggttcacgtcattctcctgcctcagcctcccgggtagctgggactacaggcgtccgccaccacgcccggctaattttttgtatttgtagtagagacagggtttcaccgtgttagccaggatggtctcgatctcctgaccttgcgatccacctgcctcggcctcccaaagtgctgggattacagtcgtgagccactgtgcctggccgagtaagagtgtttttagaagtgcttaactaatattaacttgttagtttttattcttgactgcgtcattacttcaagatggtctggaagtggaagtaggggtgagaggcaaagatagcagaagcgaattttgaacaacataatttattcagcctgttaagtttatacaatgaggtcagcacaaatatttatgaatgaatataggtacaagcaagtactgatataagacaggattttgtaaaataaggccactgtttggctcataacaacatcatgatgctgatctacaacaaatgtttatgtaaagaaatgctttgtctaacaattttgcatgaaaattccatcatccttgggaagtagattttattgtcctggagaacagaatcaaaaccggtatgtgaaagttatagttggggtgtgaggctggtgatagcttttgttttagtttagaaaagcattttctaacagttaaagctgtccagtaataaagtagacattatagcaaagtaatgaggtccctgtcagaccttgtatccaagtggagactatgtgatttgtcagagatgtaatagaaggattcttgcatgggggcaggtatttggattacgtaattgctaaagtccctttcagttggaagatgatgccaggtgagagctgtctttacaccattcagttaacaaatagttgaaaacctcctctgttttatttgaaaggttgaaagccactgcttttcttcttctccccctccccctcctcctcctcttcctcctcctcttcctcctcctcctcctccctgagacagagccaaaaactgtg

SEQ ID NO: 55999 - DNA, 1050 bp, Homo sapiens
gggaatgaatgagctatgtagctgtgtacatctaggaagggacagacacttttcttttgctgttatttttgagagaccatctggtggaaggtacaactaagggaccccctttagggtattttcttgaaggcttgagttgaaagacactggattggaaatgatgggctgggcactgtgtgtatgtgtcaagactctgttttggaaatggtcgtgggactgaagggtttgtttgggaggggtagaggaagcttttaaaggaaagatacagggagggggctatgttgggcaccagtggagtgagagtgtatggaaatgaattgggcagaaagaaggcaactgacaattgttgaggatttattgtatatcaataagctgccctaaggcttcacgtatgttatttaatcctaacaggagggctgaaatgcatacatttcccccattttatacatgaagaatctgaggcacaaaatggttatattacttacctatgattacacagcccttaaatagtagctctgggattggaaccaagatctgtctgaatccagagccagttctttcttctgatgtggagttgagaggagttgaagcagtgagggtggacttccacatggtggactgcccgtgttttcttagtcctcctccctggacaaaatgtggcattgtatgtgagcgtatgttctctggagtcagctgggctgggttgataaaaatcctgggtctgccacttttacctgtgttgccttgggcatattacctaacctctgtgagctttagtatcttcatctgtgatgtggagtaacaataccaagttctcagagttgtttggaagtttaaatgaaataatatctaaagctttaaaacatattactttctttctcttcttactttgagactcatcttgttacttctggattgtaacatttagtgttatatagatccctttagagtaggattggtctggattcaggactagatccacagataaaagaaaaaagaaaaaatatagtaaaattggtcatattttctaagaaggttatattttgtttc

SEQ ID NO: 56000 - DNA, 2256 bp, Homo sapiens
acctgaaagggagagtaaatactataaatcaattgagtatttttgctaataggagattttttacagcgttgaatagccttagatcttttgtatttgcttttaaaatacatagtcaggcatatttaagatgtgactcgttcctaccccttttcttgttttcttcttttgccagacttttatctatgtgataacagatacttgaggattgaaaatacaattttctgaatcagctaacacttgttatgcacctaccgtaagggactggcactgttatttaatttcgtctgccaagactaaatattctcggattttttgactaggaactcagctgcttcctggaactcagctccttgctgtcacagttttaagcatttttaaatgttttctgctaggtaatgctcacaagaaatccttgtgcctgttattaagcttctaactccagaataagcaccagtcatcctaggtatggcccatgatgatagtaataaacatcttctaatgcttggcttcttccatgcttatcctatcttattcgtggccacagctcgtctgtcataacttctgacctggctggagaataaagggaagaaaactttactctttagtagcaagatcctagcctgagttatactaaacattttatataacacctcatttatactcatagcaatgccataaaatagatactgttatgcaaccttacagattaattcattcaaagtatgtattagtgtgatttaggcactgtttaaggtcctgaggatgctatagtgaatgtcagatgaagtatctgctaagcaatagagacgttaaataatttacccaaggtcacaaatcaagaaagtaacaggtaggatttagatatagctctaacggattccaaaaggaatgtctgcaaccattgttacattatgccactgtttacatatattggatgttctctgtgaatatataaaggcataaaaataggtggaaccccagtttttttttgttgttgttgttaaaaatggtcttgatgaatccaagaaagaaatgtgtcttggtgctgaaaagcatacttgcacaataatgcttttcctctcttccccttgcctctcccttctccctctccactcacttgtacctgggtataaactggacagtgtgacctgctttggcatttgaatgagtttgtgctttgagaactaggagaatgttgtttgcttgtttctttttggcttcctgaaagttcgtgcctgcttgcaggttctttcttgtagcacaatggtgagtaatgtgttgttaacattgtaatgtggtcatgcgagttggaattttttttgttttccctcagttctctctgatgagtatgcaggtagggactcttgagtcaaacttgcctgctcaattcattcaaatagaaaaagctttctgtattcagaggactagaaaagagttttgaggttggaaacaataccaagatccaatgtcttttgcccagctgaaattcagttttgttagcattctaggtttattctttagcttgtgctatctaagagaggacttgttttagattacggccactattaccgtgtgccatacctgggatgtgtggtctttactctggagttagcatcttcagaacaggtgcaaggatttattttgagcattatctcgtagaaagcataaaaaaaatgctgaagacttagagcgagtagctgagttccagtaggaattgagttccagttaagttctaaggattaattaggtgggatcaaggttgccagtgttttttttttgttttgttttgtttttttgaggtggaggtttgctttgtcacccaggctggagtgcagtggcacgatcttggctcactgcaacccctgcctcccaggttcaagcgattcccctggctcagccttcctagtagttgggattacaggcacgcactaccatgcctggctaatttttgtatttttagtagagacagggtttccccatgttggccaggctagtctctaactcctgacctcaagtgatccacctgctcagccttccaaagtgctgggattacaggcatgagccactgcgcccggccaaggttgccagtattagaactgtctggtattggaaagctaatcaatttagtattggggatccaggagtatctgggcatagttgatgaggttagcgagatgatttatgtggatgtatctaacccacaagtaatgcatggtacttggattaggtgcacaataaacgttaaatcttcaaaag

SEQ ID NO: 56001 - DNA, 1012 bp, Homo sapiens
aggctggtctcgaactcctgaccccaagtgatctgcctgcctcagtctcccaaagtgttggattacaggcgtgagccaccatgcccagctcccacttgccctgttttgttttgttttgtttttaaacttacccattcttaaagtcccagtgtaaactatctcttccacaaaaacgttcctgattttcttttttctccagcaggatataatctttcccacaactggcttagaattctttataagccttttatattaactaatcaaagttgtatccaggctacactctacagatacctacttagagaatattatagatagaatgcagctttgaaagtgccagtgctgtgttctaaaatagttctttgaaaagtcagggtcattttaaatgagttagtctactagtgccttttgaatcattaacagctaacatcaaaagaaaaggaagagcgaattcctctgaggctttagtgttaattaatattgatatttacatgaaggtagtcgcatgtgaagaattaagacacgacagtgggaaaatacaatgatgctaactaacaaaaatgtagtttgtttatttatttattagggacagggtctcactatgttgcccaggctggtcttgaactcctgggctcaagccatcctcctacctcagccttgtgagtagctgggactataggtgtgtgccaccatgcctagctccaacaaaaatatattttagaaacttatctcctcttatgtgttccattgtgagcatctgcttttgcctcccttgaactggtagctcacctggctaagtatgaaaccatcaatttcctgaaaatttctatcagttctaagggacaggattctctgacatgaacaatacttggtccctgttgtttactgacatgaatagagactttccataccccttcttagaactctgaaaatagaatttgagagttagacttaagagtttctgtgtcctagcttctttgcttgcctaaaataaattcctggctatttggca

SEQ ID NO: 56002 - DNA, 1044 bp, Homo sapiens
aagcttaaaggaatgaaggccagacttcttcaggtaacttttacttaatcattatggctggaggatgggatggagggcaggctgaagaggtaggcaacgctggatcatacagagttttatcttttttttttttttttttgagacagagtcttgctctgtcacccaggctggagtgcagtggcacaatctcagctcactgcaagctccgcctcccgggttcacgccattctcctgcctcagcctcccgagttgctgggactacaggcgcccgccaccatgcccggctaattttttgtatttttagtggaggcggggtttcaccatgttagccaggatggtcttgatctcctgacctcgcgatccgcccgcctcggcctcccaaagtgctgggattacaggcgagagccaccacgcccggcctggagctttatcttatactgcagtatatcaggagccatttaatacgtttcacatcctagaaagattatgtcagtggtgtgtagggtggattggagatggagaaagcagaattcctttcaataacttcattatactgaacacatttattgagagtgatcatatttacagattcatggaatcagacaactggcggggctgcgatgctttcttagttttcctcattcattttcaaatagaatacctgaggtttactcaggatcacagaagtggttctgtgatagcttagtctagaattcagtcttcagcatgtactaggtgattaataaaggtgaattcacctctctcttctctcccaagtcccatttcagtgtttgtgtcattctgccacattgcattgtactagcagatagaaggacttaacatcattccattctaccgtctttttttaaccagtccaaagtgaatagaggtattttcctaggtctgactgagaaagatgttccctgagagtaccattgggaagaggggcagttcggtgccctggactgggctgaatgaggtgttaggatttttcagctgtagtgattcagatgtagaagaatgtcaaggtatttgttttgttgc

SEQ ID NO: 56003 - DNA, 1710 bp, Homo sapiens
gtgctatggaggattaggaaaaatgacaactttgtgtccttgaagagtttacagtccagttgggagtaagaagaataaaaaggaatgaatacttgctgagcctcttaatatgccacacaaaattttaaaatgtgaaactatattgttagttgcatagtgcagacctcataccgtaggtatttggggagaggagtactcaggtagttatgtcacagaggaattataactcatttcagatcttaataaaaaaataggccaggcacagtggctcacgcctgtaatcccagctactcaggaggctgaggcaggagaatcacttgaacccaggagatggaggttgcaaacagccgagatagcaccactgcactccagcctgggtgacagagcaagactctgtctccaaaataaataaaaaaataaatgaataagtgttattgtattaggtacaagggatgaagatgaagaggataacaaaacatttcatattggagctgaaagggatcaagcgaaagcctggaaacaggactatacctgagatgttcttggggcggtgaggagactaacctgagtggcagtgagcagtagtgaaatgaaggtgggtaggttggtttggagctatgtttatagagggtgttaaaaagctaggcttataagtttatatatatatataaaatttatttatttatttatttatgtatttatttatttatttttttgagacagggtcttgctctgttgtccagctcaggctggagtgcagtgacacaatcttggctgactgcaacctccgcctcctgggttcaagtgattctcgtgcctcagcctcctgagtagctgggattacaggcgtgcaccagcatgcccagctaatttttgtatttttagtagagacaggatttcaccatgttggccaggctggtctcaaactcctgacctcaagtgatccgcccaccttagcttcccaaagtgctgggatgacaggcatgagccaccgtgcccggtcaactttatattttaaatggtagaagatttttgaatagaatagcagtatgatgatactaatacacaggttggctgggagggaatggagattgacactgggggtgtgtgaagtgatgaggcccgagttagagttgtggagggtaggctaaggagaggaaagagtgaaaaagagactgtgaaggaaaaatggaaattaatgaggggtggatgtgggagatgaagaagggtgatgagtcaactacaactgtgacacgttgtgcctgggtgtctgagacattgagtgaaataaagaagttaggaagctttcctcattttggggaaatatgatgagtataatttgcgatgtgttggatttaaagtggcaatgaaatgtccaaatgaaggctgtcctgggtgtgagctggagtaaagatgggggtaggtttggaaatgcagttttgcaattcatggcctagatgtggtagctgtagccaagagaattaataagctctctgaggactaaagtttagggaaagagcagaagggcaaagaaaatggtactgataaacctaaacacgtctaaacctaaacatgtctcctatcttgtaaacaccatcctaggcactgagatggaggtaagggagacaaggaacccacgaggagcgtatgggtctagtgggaggagacagatatgtaaatatatagatagaatgaagtgtgatagatgct

SEQ ID NO: 56004 - DNA, 2736 bp, Homo sapiens
atgttgctcctctgcaggctgaatacccccgaccgttctaatttccactattgacccagcttgcctcagagcacctccctgacaaagtggccagttactatgtacttagagattgcaaatcaatgcaaatattagctcatactaggaataattaagaaggtaaatatgctgaaaacatatattccaaaaccaaaatagattttttcgattttaccctcatttttgattatcaccacctttctgccaataattatccgttaacatgaataatttagaattgaacagatatctgctttggacattacactttcaagatagaaggaaagatggaaggaagatagtgccaaactaattttttattgtcattgccttatttgacttattccttgcttttaatactgaagactccctcggaaaaaaatgtaaaactttgccaaagcaagagctggctatctactgacttgtataaggcccggtgactggtaatgaatgctaatcattaggtggcctttagtggccttatgttgccaacaacttggaaaatttcccaaagctttatttgtttaatctttcttttgagacccctatttaaaaaacgacttaatttggagacgaaaatctaatttttaaaaaccacatacacctttcccagaatctgttgatgatcaataattgttttgatctgtgtgagttgattggtgccaatattagtgatgatatctgggtaaattctatttatatctgcatctagcaactccctaagttgaactgcatactttattccagggcatggggatcaaaggggttgaagaagcctaggaatgagtggagagctgcctggtagtccaccactattcctagttctcaggaggctttatttgcaattttgagattcaatgtatgtaaccaaaataagtattctgattgttatgagggcactaagtgccacttgtcaaagttttggagctcctgagtatcttaagcatgctaaaagacactggccattatagtgtgggtgtatgtgtgtatgagtagcactctccttaccctaaacactcatcccaccaaagggaaaatccttaaacagcgctttgaaatgtgacctcagcagtatctttcctatgggaacttaggagctgtggaatagcagactgtggaatcttttttgtagcctctgataaattcaggtaattaaaaatttgtgtaactggaagatagatacagggcagtttttctcatgaatgcctgaattcagttgactttttaatataatagaagagagttgtttgtttgtttttaaataagacatccttgctgagtaatgattgaacacttctctggataaagcagtctccatgctccagtgacaggctttagggaggtataaaagatgtaaagacatgtgtctttgctcttggggttgagggtggatgggaaaggtggtgtataaatatgggaaggcagactattatgagctttaacatttaggaaacaacatatagacaaaagcaaatttaacgtgctgataagtatgtaagggctgagaagacttaaagtaacaaagtaagaatcagtgaaataaattggggagatttctgagtcagtaaattttgaaatggacttgggaggctatggatgagtcataaagaggtatgggctattgagttagatgggtcttcgttcagaccttgcggctattttttaccatgtgaccttggacaagttaacttcttttccttatctgtaaaatgtgagcattcaagtaaatgaaatagttactgtgttgggaataaaagaaaagaaaggatcttccaaacagaaagtatagaatgtacagtgtgcaatgatgatatgaatgactaagttgtgagtggggggaatatatgagagtgactgtagagaatgtgggttgggcaagtcatgagtagagcaggcaagagggtggaggggactcagaagccagactctgttgggtgttgatagaagggtcaatagaatcattgtaggtccttgaacaaaggacggatttaatgagaaatattgagccctttggttcaggaactcagggacaaggaatcaggcaggcatccgtacattgtgactcttattttctgtaccatcctaacctgaagggatacagccaggaggcataagattccttgtagaagtttttgtgtttacacaccttactatgctgagcctgcttgttcctgtctcgtagtgcaccaacctgtggggaagtctcaagactatggccggattctcctcaagagcttatagtaaggacagcattatgtttcaagtgcatttaactctcagttgtctctgctaatgtagggagcactgttgtaggtaattcagaacttaacaaagacatttcctggttattttcaactgtgttttttttaggattataccttatccctttatttcctctaagaaatagttttagataagaaaaattactaaactgttatttgtagtgacccactatgagtttaattctttgctaggtgctatggaggtttaggaaaaatgacaactttgctcccagactgaagtacagtggcgcaatctcagcttactgcaagctctgcctcccaggttcatgccattgtcctgcctcagcctcccgagtagctgggactacaggcgcccaccaccacgcccggttaattttttgtatttttagtagagacggggtttcaccgtgttagccaggatggtcttgatctc

SEQ ID NO: 56005 - DNA, 1033 bp, Homo sapiens
ctttctcctttctgaatctgtttcacccgaagccatctcccctcggcactcctttctcgccctgactgctccttgcttcgtcccgatctttcctcctccctttcacctgcgtcctgcgttcctaccccgcgctctccagctcccggcctcccttcctgagctgtgctggccagtttggacggtccccccttgtcagctagactttcgggagggatggtggagttttaaggtgattaagatgcagtgtattatccccacagtaggataaagttcatttaaaatctcaatataatactaaaatgaaaagcaaataagcttattcttcctattgatagccaaactaaggtgcatacagtaatggaggaaaggcgagaaaaaggtgtgtgtgtgtgtttgtgtgtgtgtgtgagagagggagagagacggaggttgacggattctagggcagtcttaagaactttagaaaaaagaaaagttgccatgagccgatggaaactttagaagctgatgatgagtaagccgggggctgcgtgatctcactcttctcataattactaggttaacggtgtggctccggtcgggatggaatgggatttgtttactgggccggcgtatttttagcttgtcggctcacaaggaccagcgctcagagtctctttctccccgctcgtggtagtctttcttgtctaacctaggtggcttctctgggcacaataaagatgtaaaaatttgaaattagaaactgactggtggaattttatggaagaagttccccacaaacttttcaggcagcttttcacgaatgcaaagcctagaattagcaggacgttgacttttattttccttatctttttatacgtactacgtaacgctttgcttagaaattcacatgctgctaatttttcagtctttggcctctagtactgtatatttaggagatttttgaggaggctggatccctttgtctttcagaatctatttcaaaggtggaaaaggacagagtagagaaagaggtggcggtaagactggctcc

SEQ ID NO: 56006 - DNA, 1029 bp, Homo sapiens
ctccgatggagtcttcctctatcgcccaggctggagtgcagtggcctgatctgggctcactgcaagctctgcctcctgggttcatgctattctcctgtctcagcctcccgagtagctgggactacaggcgtccgccaccacgcccagctaattttttttttgtatttttagtagagacggggtttcaccgtgttagccaggatggtctcgatctcctgacctcatgatccacctgcctcagcctcccaaagtgctgggattacaggtgtgagccaccgcgcctggccagtccttttaaaatatatatatatatatatatataaaattatgaatttgtggattaaatatatttttgctacccattccaatttgaaggtcacttattcattaggctttaactatcaggcccttttacatatattgcagcagaaattatctcctttgagtcaaccccaactcatgtgtttcagatttcagtaatgtgatcagcaagagtgacgtgaagtcattggctgaagctgatgaacaggaagttgtggctgaggttcaggtaaacatattggtcctgtaacacatctcgtatgttggccctttttaaatatttgagtctaaaaataaaaaataaggaaaggtctgtctcaaaagaagttttattatgaatacttgaatatgtttatcacataaatgaggaatattgttttcagaggcagcaaataaactagttttgaatttttcagaaggatgtgataggtgataaatgaataaaaagaatacctgttttaaattatattctctctcatgacaacacattggacagcaaagttcttttttatctgagtagaacattgtatctcctattagcagtattttatttttactaattgataagtatgcatagaggtctccagaaatataatgtgtataaccttacaacctttatttgttagatttattattattgctactgttttgtaattattttaattctcccacgttgactgttgttacccaattattaattgaacaatt

SEQ ID NO: 56007 - DNA, 3256 bp, Homo sapiens
ggtctccaactcctgaccttaagtgatccgcctggctcggcctcccaaggtattggaattactggcgtgagccaccttacctggccaattttcttctgccattaacgtttttttttttttttttttttggagacaaagttttgctcggttgcccaggctggagtgcagtggcgcaatcttggctcactggaacctctgccttccaggttcatggaattcttccttagcctctggagtagctgggattacaggcacccgccaccatgcctggctaattttttgtatttttagtagagatggggtttcaccttgttggccaggcctcaagtgatccatccacctcagcctcccaaagtgctgggattacaggtgtgagccaccgtgctaggccttgccattaacttttcactaagattcaaaaatgtaaccaatcctcatttgttaaaattaagcactttgcatttttctttccactctttaagaagaaggaggtcttcgaggggagaagaggaaacgagatgctgaagacgatggagaggaagaagatgactagatcattctaagaccagattctctaatgtttctgggtgtgcaatagagtgatcacatctttgtttcttcatgtacgatagctatccctacagaagataatgtgtaactttttataggaaaagtgtggttttactatttttgccttatcattccaaataagaactagtctgttaatgatcatattgtatgtagagaaaaattttcattgactcccattgtggaattccctagcaatttatttagacttaattttttaaattcaagcttactgtattagtcatttttagcccataattaaaacatgatcacttttacacaggtgtagtatggtgcatttcattccttatttataaattaactgaaattacagtttgctataatataaaatgacaatagtctcttgagtggtaagttggttatttttttagaggtgatccaggaatctttagtttgaaggcagttaccttttttttttttttttttttttgactaagagtgtttggttgcttttttgtcacaagtaacttggaaaatagaagcagaatagtaaaggttctattcagcaacatagttcatggattttgtggaggttctattcagtaatatggttcatggatttagtggtgactgataagattttatttttgaaggaaaaattgcttatactaagtccagagacatgcaggtgagcccttttgtcaggctgcaaatcatgacatgccgatggttgtttattttgtttttaggtgtgcattctttttcttcttagcaattcctttatgatcaccttcccttcttgtttcactccctcccgctctctcaaaaggaacttgggaaacttgtgaaacccaggaaaacctttagtcttatacctcaactacctttcagtcctgtctgggttttaaataagtgaagtagaagaaattgagtattttctgacataagaatatattatcaatacagttttatgcagtaagctctccttaccataaatgtttcttggttgacaacatctaagacaatattagtgggatgaagaaagaaaagcaggggtgcttttggaagcagtgttagtgttcctcaaaagtcggaacaattgcctgttgatatattaataagacattaaagtcaaattttaatgttggcctctcaaatgatttggataccactctgcaaagtatttctaacctttaattcccagttttaaaacagatataataatagcatttaattggaatatactaggcagctggaaaagtatttgaaactaaattgacattaaaattaagatttgttttcaagtggatgtccattaaaagtagaaaaatatttgggataagtgagtgtgtgtttccttacatggctactaaataaaatataatgagtatacaagtatatctcctcttttgctatggaggctccatgttcaaggcaatggctttttaaatcttggctatctaaaattttttccctttgttttgaatatttgtaagtttttaagaagttagtgtcagcaaattaattgaagttatgcttctatactgggacatatttaaatactgagtatagtactgctgctactgcttctacaatgtaaaatgtatgacttggtgttttaaagtaaaaattatgatgttacttgtggagaaactaaaaatgttgtacaactgaccgaaagaaaacccttggggataagtttagtgaggggattggaatccccaaaaagataacatttttcttctgcttttaaaaactgaaattccctgttctagttcctaacaattctcattacatactatgccagattacaaaatacttatttttaaaatgaaatctatatattgactttcttatcaatcatcttactgtgcaatcaaaattagagtactttggtttgaaaacaacacttagagcctccagataacttttaagacttatttagctttgtgggtggtattttcatgcaaataagtaagggtgggttttatattttgtagaagttttcggtcctattttaatgctctttgtatggcagtatgtatatattgtgttaagttcctcaagaatctccttaaaaactttgaagttaatacttttgtgcaactgtgttttgaataaagccatgacagtgttaaaaacaaacaaaaaaatttgcagtactcctgattattcttttattgtttttgactgttccctgtttttttctgtgactgctgtaacttaaagtttttgaaactgaattgcttcaaataaattgaagatttgttataatgattagtttcagtgtatagcattcactttttcaacaataccattagcggctttgaaggtctttttaaaaactaacagcttgaaagttaactgatttaaatacttggatgtgatataaggcattacaatttatttatttattttttgagatggaatcttgctctatcgccatgctggagtgcaatggcgccatctcgactcactgcaacctctgcctcccgggttcaagcgattcccctgtcttagcctcctgagtagctgggactacaggcatgcaccaccatgcctggctaattttttgtattttagtagagacagggtttcaccatgttggccaggatggtctcgatctcctgacctcatgatctgcctgcctcagcctcccaaagtactgggattacaggcatgagccactgctcccagctggcattac

SEQ ID NO: 56008 - DNA, 1149 bp, Homo sapiens
ttggtagaatgatttactttcctttgggtatatacccagtaatgggattgctgggtcgaatggtagttgtattttagttctttgagaaatttccaaactgcttttcatagtggctgaactaatttacattcccaccaacagtgtacaagcattcccttttctctgcagcctctccaacatctcacaagcaaagttttgaagtgttcacaaagtaaaacaaactttagtgcatgcaatattttcatgagaatctagatatatattggataccagtatttagaagccatacttctcgcatttggtttgtaggaataactaggaatgttgtgaaacagaaatcttaaaaaaaaaaaagtatcgctgtgagttactttccacctattggcttacaagtttgaagtgattgggcaagggtaaaaagcatcaacatcctaggaagaaacatttacccagtcatttactcatctttaaatgattttttaaagatggcgatgaagatgatgaagaggaagaggaaaatgaagctggtccaccggaaggatatgaggaagaggaggaggaagaggaagaggaggatgaggatgaggatgaagatgaagatgaagcaggttcagagttgggagagggagaagaggaagtgggcctctcatacttaatgaaagaagaaattcaggtgaatacacacttcttacctgcactgaaaattaatttctaggcataggagtaagtactatataaagtgtgttttgtagcaatctgagagttgtttctaagttgtgggtgtgcatatgtctatccacctgtcttttttttcattgtcctccaccccaaactatatccagataatcataaacacctattgattttacctcccagataactttcaaatctgttacagcctcaatggcatggtatggtggaaacattttacaaatgtctgtgaacctcaatttctgcatttataaaacagattaggccgggcatggtggctcacacctgtaatcccagtacttttggaggctgaggcaagtggatcatgaggtcaggagttcgagaccagcctgaccaacatgagtggggaaaccccgtatctactaaaaatacaaaaattagctgggcatgatggcacacacctgtagtcccagctaa

SEQ ID NO: 56009 - DNA, 1069 bp, Homo sapiens
gtctctaataaaaatacaaaattagctgcgtgtggaggcgcatgcctgtaatcccagcgactcgggaggctgaggcaggagaatcgcttgaacccgggaggcggaggtgtggtgagctgagatcatgccattgcactccagcctgggcaacaagagcaaaaagtccgtctcaacaaaacagaacaaaacaaaaacacaaaaattagcggggcatggtggtgcgcacctgtagtcccagctactcgggaggctgaggcaagagaatcgcttgaacccgggaggcggaggttgcagtgagcagagatcgtggcgctgaattccagctggcaacagagctagactccgtctcaaaaaaaaaaaaaaaaaaaaagaaaaaagaaataacatggtattttaaatcttgaatgtaagttttaactttacttttccagcaaaatcttaaaaatttgaaaagtcttgacctgtttaactgtgagatcacaaacctggaagattatagagaaagtatttttgaactactgcagcaaatcacatacttagatggatttgatcaggaggataatgaagcgccggactctgaagaggaggatgatgagggtaatcgttcttaatactcataagtgtgtcataattatagcctctgctgtagctgtgcaaattagattgggcctggaaatttaggtgtgaaaaaaaaaatccacaacaagatattagtaagacaagaaaaaattaaaaacccatagctctagccagtatttcttctttcagatttcccatagtttcagggaatttaatgactattataacatgaagctctgtgaaattttatatctgtagaaagttgtacacccagtaaaagtggcaacctcttaaatagtatttttttaaaaaagcaaccacttataatagccagaaagtagaaacaacccaagtgtctatcaactgatgaacggaatttttttttttttttttatgttgagagggagttttgctcttattgcccaggctagagtgcagtggcacaatctcggctcactgcaacctctgccttctggtttcaagcagttct

SEQ ID NO: 56010 - DNA, 1050 bp, Homo sapiens
gatagtttcttgaagccagagagaatgacagttttttttcttcaaattgatatactttaaaaatctttgatatgccaggctcagtggttcatgcctgtaatcccagcactttgggaggccgaggcgggtggatcacctgaggtcaggagttcgagaccagcctggctaacatggtgaaaccccatctgtaccaaaaatacaaaagttagctgggtgtggtggtgggcacctgtaatcccagctacttgggaggctgaggcaggagaatttgcttgaacccaggaggcggaggttgcagtgagtggagatcgcaccactgcactccagcctgggcgacagagtgagactacatttcaaaaaaaaaaaaaaagtttgatatgatacctttaccattctttgtttttttcctttgttgaatgtatagttggagcttagtgataatataatttctggaggcttggaagtcctggcagagaaatgtccaaatcttacctacctcaatctgagtggaaacaaaataaaagatctcagtacagtagaagctctggtaagtggaacagttttgtctctggacttgctttttttggttaaattttctgagatttgtttgtgtctattaatttctatttaactcttaaaacttaagaattttttgtatgttgtgatctaggcagttactgcttttgtttcttttagactaaaatattcagatgaatttttaaatcaatgagaaatttattttatcatcaacttcaggagttgactatctggttttaacatttccagtatttttttttaaccttctttcattctttttctttgcttcttgattattttttgagttttttattatttgtccccttctttcctggtttgagggaaggaaaagaaaaactgacatgctgaaaattattgctctgattttgaaaaaagattggaggctgggcacagtggtttatgtctgtaatcccagcacttggagaggcagaggtgggaggatcgcttgagtccaggagtttgagaccaacctgggcaacatagtgagaccct

SEQ ID NO: 56011 - DNA, 1733 bp, Homo sapiens
tgcccttcgcccggcggaatctgggtcagcggcgggttctccgaccgcgggcgagtttggggactcgtcgcagtgaccggaggtggagaggggacgggaggcgtaatccgcttcttcccccgccgtgtaacgatatgtggcacgtcgtgtggccgcaactctgaatttgatccctggagacggtttcacaaaactcaacataagggacgtagtagtttcgtgctttaaagatgggttcgccgaaactaaatgatgcgctctcactgctgtcgccttaaagagacggggttgggaggggccatgtgaggcggggtcgcggtcaacttttcgggggtcgggtaggaggcgtttccgcctccttttcgcggttgccttctcggcctcacctacccagggcgaaggcgcgaggacaacgcgggttgggaggcgacccgttttttccttggggagtccccgccccgtgtggggtttcccgtcagtcggagcggcaggtcgcgagagcagggctggtggccagcggggagcctcgcagaggaaagcatcagtcttgctgaaataagcctagaattggaacgtaagggagttgtctgtagctgaatcgaccgatcgatagaaggatataactggggtggtgtctgtgcagatcggcatagaggatgagcagggtctgtctgggctttcgcgtccggcgtgtggagtggcaactaagattttttttttttttttttaagtgcctgttttctgaaattggcaggggccagggagaggaaacagttgcttgctatcagggtcatcccggagataacttgaagtttctagagcttattcttagaggcttcaggaaaaaaataaaaaaaaccaaaatcaaactttaaaagctgtctctcacaagcacacgtttagaatactttttggtggcttgggttggaaaattgaatcccgcccccgcctcccccgccaggattctttcacttagtgattgtagtaatttctttgccagttttggggtgtgcaagacgttgccttttttcaacttcttccgctgtgttgtaataacggtctcttatatttgtatagacagtttacaaagcactttacccgtttgttatttactttcctccttacgtacttgtaaggtggattgtgttgttctagaatccaaattagcagacagtctcagggcagtgaaatgatttacagaagtggaggaactggttttctgacaccaaatctagtagcccccactcctcagctaaacggggagtctgaagacagaaccaattcacagtccttcggcaaaccaactgtgactctaggcaagccattcttcatctctgggccatagtttcctcttctccaaaacggagctcaagatgctctttctggccacagaaataattatgtcaaaatcatattcaaatagagaaggtggcattccttgttgccaaattttagccctcggatacctcaaacaggttttcacattgggtatagagaaccaggatcttcaacctttcccttaaagattaagtccattcaggcccacaccaggaagtttgttactacaactcttacctaatagggaattcagccccactccttgaggaatggggaaaagtgcacagaaatgctattataccagagtggtagggagaagtaacattttgttaagaatgtattgttctgggtgataccgtttggcctggatgtgagaaccaataacaccctctggg

SEQ ID NO: 56012 - DNA, 1277 bp, Homo sapiens
aattctcagtatcgcaagttgggcacggaaggatgctttctccctctttaacactaacaacagaataaaaaaccaaaaactaaaaaccaaatccaacagacaacgaaactgtccgagtgcctagggaaagcgcgccaactacataaagaaaagtagggggggtactgggattcaaaatcatttctccgggacgtacaccctcctggacctatcaaaattaactgcgcgcttgatcgtagccaataggtacggaatttctggtccagggcctccctgaagactgatagacctttacctagcccaatgaagtaatgtgacgctgaagaatcaaccaacacgtttgggaggtgggtggagtgtaggccagggggttggcggtgccgtgtcatggaggctcagtctctgagcagccattgaaggggaaggaactgcgggtgtgtgtgtgtatgtgtgtgtgtatgtgtgtgcgcgcgtgcgtgcgtgtgtgtgcgcgcgctagtgtgtggacaaggaggtgggggcagctgagttagagtcccaactcttggactccatttgctattctcttctttctcccccacacctatctggtggtggtagtgggcgtttatatttgcgttccttttcattcatttctaaatctcttaaaaattttgggttgggggtattggggaaggcaggaaagggaaaaggagagtagtagctgaagagcaagaggaggacatggagatgaagaagaagattaacctggagttaaggaacagatccccggaggaggtgagatgactcagcccccaccgcttccccatcagtccagtattctgaggatcggatttctggtggtcctgggtgggtgtgcggggatggagtaataagttagcccccatccccccgggttagggttggggaaatgtttaattttaagttttaaatcattaaaatcttctacttaaaatggcgaagggttgaagtttctaggggcgtttttgtgtgtgcatgggggcttagctcctttcggctttcatcgagtcgggcgtcctgacctcgtgggggcgggaagcgggctggtgggggcgctccgccgcttcgctcccggcactcctcctcctgggggccggcggcgtgggcgcgaccccccagtcccactcagcccctgccgcagccataggcgcctgagaagttagtccaacttttctgcagtgcggccaactcatctttttagggggtgggcttccccggcctcgaggccctgggcgtccgacgtcgcgacgggcgcg

SEQ ID NO: 56013 - DNA, 1048 bp, Homo sapiens
gcaattttttaaagcaaaggaataatctccccttctcccctcagtagcaccccccaacacacacacactctaaactcctttctcctccccgctttctagtccctatccttccaaccctctgcccacaccctcaccccacccaccccaatcttctaagtgttagattgacttggcacaggttacagaaaagaaagggttgggccaatcgcacatttggatccaggttaattttagtctctgggctttacctcttttccttcctcctccccttttactcggcaggcaccaacacagcctggctggtgattttaaataggccccccgacctttccacagaggtgtccggtttcagggcttcctttgcaaagtgctggagcagagggaggagagactgcagagagggaggtggagcagtacagaatgccagagggaggggagtgtggaggccagggttctgccccaggctgcgctggctgtaacccaaactattctgccttgcaggtcaacactggacgtatgagggtgagcagatctcaaggcctcccgacaaccctttcacactgggacctcctcacctggcaggaagacacactgtgcgggtgggaggagacttcctttaccttctcaccctagctcctcccttctggatctcctcctgccttgagtttcacatatatggctcctagatcctgctctaatcatcaaatcctacacctcctgatttggcagaaaagctagttaagtcctcagtaaatcgtgtaggagtgagggagctggggtggaaaggaagctgggtgggaactctgagcttagctgccaggtctccttctggctccgtctatcctaatccatcctacccctaacctgcatctgaaattgggacagagctggaggtcaggggtgaggaagaggctggcaggatagtttctgaccctgggggaggtggaactcagttcctatgaactactgattaatgacttaaccaaactcaagttcatgataaacggtcagtgtgagagcaagaagtgaatgatgagaagtcaggata

SEQ ID NO: 56014 - DNA, 1085 bp, Homo sapiens
ctgtctctgtccttctacaggaggtgttccgctttgcctactacaagctgcttaagtaagaagatggagtggtctggaggggagaggggcaaaggactgcactatgggaagtggggcagcccctgggtgctggtttggaagaggaggcactaagggaggacattagagggaaaggagcatccctgccctccctcatgtttcccctaccccaccccaccccaggaaggcagatgaggggttagcatcgctgagtgaggacggaagatcacccatctccatccgccagatggcctatggtgagccaagggagagggactggaggagggagttggacagccccctcctctagggaagtctctaaatatccacatgttctaagtggcttcttactttccttcatccgtcacttccaaagaaagttggtctggagggagagtagatgtgaaagaattgtaaccgggaatggggaggggtcagtggtgaacaggcaatagtgtgatctctgacattgatgagatcctcccttcccccagtttctggtctctccttcggtatcatcagtggtgtcttctctgttatcaatattttggctgatgcacttgggccaggtgtggttgggatccatggagactcaccctattacttcctgacttcaggtaagatccaccttctatctagcctttaccccccatccatccttgtccctgatctgatttattggccttccctgagagacttctttggctcaacatctcaggagcctgggagaagatcagggatgtatctcctccccatctccctccctgcagcctttctgacagcagccattatcctgctccataccttttggggagttgtgttctttgatgcctgtgagaggagacggtactgggctttgggcctggtggttgggagtcacctactgacatcgggactggtgagttggagacaggggcctgagttagggagaaaagcatttaatggtgagtgggatgtgggggaaagggtatcctcacttcttaacatttttaacttacctgggaggaggaggaaaggtgagtctttcaaggtctctcacctcagca

SEQ ID NO: 56015 - DNA, 1077 bp, Homo sapiens
ttcctgtcagatcatctgaaaccttttcttgatgattctactctccgatttgtggacaaactgtttgaggctgtggaggaaggccgaagctctaggcattccaagtctagcagtgacaggagcagaaaacgagagctaaaggtaggttacaatttactgtctaatgagctcaggactgttttgaatggtaacagagttgctgagcttaccagttcacacgttgatatcctctatttagagcagcaaatgttcaagagaggtacttagacattagagtaggagagatgaattagtgtcatcaccatctgaactacctctaagttcatgggttgaaatatccaaagaaataattggcagctttgtctttttttagataacaggagttttgattctcatgtttctccatatttcctttttttccttcttactgttacttataaactgattgctctaagattttatctttgatttatttgaggcctaataagttgttttagaatgtgactccactggtacctgagctgtacacctcattgttgcctctttgtagaagtttctctgcaatgcacttgtagatagaataccaaaaaataactattatttattatattcttgagagcttaccatttgctctatggcatattgctggtcctctgctgccatgagtgaaacacttggaggagttgtcagtacccccttaactactacactttttattctgtagttgccgactgatcctggcctctttcagtattagcagtatcaagtagcctatttttctactcatttcccagtatctctctttaggagaaaaaaaaaagttctgtgactcctatcaaaccttccaaagttcttctgataccttggctatcccattacttttcctgagggaaaagagtgaataagtaatgtctgcttggtcccctggccaggctatggaactaaagaaaaaaagcagagagatttgtgccctttgtgtttggagcattgtagggtggtcagagaaggagagatagtccttgccttaaaacaatttgtaatttgtcaggcagtgtggcatgtgcctgtaatcctagc

SEQ ID NO: 56016 - DNA, 1008 bp, Homo sapiens
taattttaaattttttgttgagatgcagtctccttgtgttggccagactggtctttaactcctggtctcaagtgatccctctgccttggcctcccaaaatgctgtggttccaggcttgagccaccacgcctggctttattttgttttttgcttgccttaatgttccatacaggatttatttctttgcgggctatttttcaggaaggtggagttaaaagaccaaacgaaacctacaccactgatcctggatgagcaagggcgcactgtagatgcaacaggcaaggagattgagctgacacaccgcatgcctactctgaaagccaatattcgtgctgtgaagagggaacaattcaagcaacaactaaaggaaaagccatcagaagacatggaatccaataccttttttgacccccgagtctccattgccccttcccagcgccagagacgcacttttaaattccatgacaagggcaaatttgagaagattgctcagcgattacggacaaaggtatctggcttagagtataacacagaatttggaaaaagttaagaagctgacaagaaaacattgttaaatctctgtgttctaggaaattagataaataggtcatttaaagcagcagtcctcaacctttttggcaccagggacttgtttcatggaagataatttttcccctggagtaaggatggtttcgtgatggttcaagcacatagcatttattgtgtactttattattattatttttttcgagatggagtgtcgctcttgttgcccaggctggagtgcaatggggcgatctcggcttgctgcaacctttgcctcccaggttcaagtgattctcctgcctcagcctcccgagtagctgggatcacaggcatgtgccaccacgcctggctaattttgtatttttggtggagacggggtttctccatgttggtcaggctggtctcgaactcctgacctcaggtgatctgcccactttgtcctcccaaagtgctgggattaca

SEQ ID NO: 56017 - DNA, 1002 bp, Homo sapiens
ccagctactcgggaggctgagtcaggagaatggcgtgaacccgggaggtggagcttacactgcactgcactgcagcctgggtgacagagtgagactccgtctcaaaaaaaaaaaaaaaaaatttgggattctggccgggcacagtggctcatgcctgtaatcccatcactttgggaggccgaggcgggcagatcacctgaggtcgggagtttgagaccaggctgagcaacgtggagaaaccccatctctactaaaaatacaaaattagctgagggtggtggcacatgcctgtaatcccagctactgaggaggcttaggcaggagaatcgcttaaacctggaaggtagaggttgctgttagccaagaccatgccattgcactccagcctgggcaagaagaacgaaactccgtctcaaaaaaaaaaaaaaaattgagattctacacattctgttttctatgactccaatttatctttctgtcttggattatcttgtttttaggctcaactggagaagctacaggcagagatttcacaagcagctcgaaaaacaggcatccatacttcgactaggcttgccctcattgctcctaagaaggagctaaaggaaggagatattcctgaaattgagtggtgggactcttacataatccccaatggctttgatctgtgagtttgttttagtacctttttaaaaaaacagtttttaatcagctgagtttaagactcaagttaataccttttagtaaagctatggttttagtgggaaggatggtactcattcattaattaaaatttttaaatccaagagagataagtaactgtacacaaggtcctgtatttttttttttttttttttttgagagggagtctcgctctgtcacccaggctggagtgcagtggcacgagctcagctcactgcaacctccacctcccgggttcaagagattctccttgaattctccttgaatctcagcccctcaagtagctgggactacaggtgt

SEQ ID NO: 56018 - DNA, 2117 bp, Homo sapiens
agttgggtctcacttggttgtccaggctggtctcgaactcttgggctcacgccatcctcccaccttggcctatcaaagtgctagaattacaggcataagccactgtgtccagcctaaagtttcttttaatgatattgatatttacctaggtttctttaatatttttattgctgtccgggcctggtggctcatgcctggccaacatggtgaaaccccatctctactaaaaatacaaacattagccaggcatggtggcgtgtgcctgtaatcctagctactcgggaggctgaggcaggagaattacttgaacccaggaggcagaggctacagtgagctgagatcgtgccattgcactccaacctgggtgacagagtgagagagagaaaaaaaaaaaatatatatatatatatatgtattcttactgctttggtatactaatatctctgcctgacagttgacaatgacacaccagttactctgggagtatatcttaccaagaaggaacagaaaaaacttcggagacaaacaaggagggaagcacagaaggaactacaagaaaaagtcaggctgggcctgatgcctcctccagaacccaaaggtgcatttctcagtggcctcttctgttaaaaagagtggcaagtttatgtctttaatcctggaggaactttaacatctctgtgtttgagtgatttctgtttctaagaattattcttggggtcctttttctccaagttttctaccatcttttcatattaagataggtcaacacattcattatagaggccatttatggcttatttttaagcatactgatcatacaacactctggttttcctggaagaatacaggtcttgaaattcatggagatagtagttgcagtatttgcgtagactttttatgtacataattcttaatgttttaatttttacaatgaaagtacaggataaaaaacttgaccctgtagttacattctcgttcagcagtattttgactgagcactattatttataagctctttcactagatgctgtgatcagtgtgaaaaatatgaaaggaattaagttccacgtccttcataaattttcagataatgtaaatgcataccaatcttcaacttaattgtgtgaacttctgcaaatgctgaagtgattggatgggattttcaagataggagttattggaggaagtgagtttagagcagagatttgaaataggtaaataatatgaattggtatggaagaaataacaagttactccagctggagaagtgacttcaaagactgattgttgtcctctcttcactgcagtgagaatttctaatttgatgcgagtattaggaacagaagctgttcaagaccccacgaaggtagaagcccacgtcagagctcagatggcaaaaagacagaagtaagtgccatgggattgggtggaaacctcgggcaagtacctttcccaaactcttctggggggtccatatttggagggaggggagagttctccgttgctctctctttccctcagccctgcctctgatcttcaatgcctttctcacttgtggatgtccttcctgtcacgacagagcgcatgaagaggccaacgctgcccgaaaactcacagcagaacagagaaaggtcaagaaaattaaaaagcttaaagaagacatttcacagggggtacacatatctgtatataggtaggtgtccatactgggccaaacttccccttagaattactaaaacattttccaagtgcttgaggcagaatcattgtggcctaaaagcatacctaacaccagttcctactctcttttaatgaccctagtgtggatcaagagctagtaaatcttgtaaaatagcgagagttaatgacttatgtttatggttacccagttcttccctctcaagtcttctttttttttttaccagaatattagttctgaacaagtcaatatacttgttcaggccaagatgtgaactaaagattgtatgtcctttgagaactataaaatatcatcctatttcttttttttttcatctttttttttttaaatggtctgagtttgcttccaacatccatggaagcattacaaattttctttcctccgtagtcatatcctt

SEQ ID NO: 56019 - DNA, 1039 bp, Homo sapiens
ttggatgatagtaaatacctctccctgactcttagagtaaactttggttagtaatgtaatggttaatgtaaagtgctagactttgaagaaatgtaagagtgtggaaatatttctagactcatcaactctaccttttaagcattcatctatttgtttactccagaggcctttgtttatagagaggaaaccattttggattcatctttttacttgccactccattcaggcagctgctgatgctaaaatggaagacataactaaactttcccttctccagagttcgaaatttgagcaacccagccaagaagttcaagattgaagccaatgctgggcaactgtacctgacaggggtggtggtactgcacaaggatgtcaacgtggtagtagtggaagggggtgagtctgaaaaacttgagggagactgtccccagacaaccctaggcttagagtgattagcattgtggggagaaaggagaaaaagatcgtattttagtgccatacctgatataatatgctaggtctctgcttctgtgttttttggagtagaaggccctaagatgtggttcctgagattgcttcaactaccacattaatgtctgagctcagaggttctttctaccccatcatcttccacagttctggcaaaattattcttctctgtttccaggccccaaggcccagaagaaatttaagcgtcttatgctgcatcggataaagtgggatgaacagacatctaacacaaagggagatggtgaatgggggttagaggggattaagggggagagctatgggaggtggggatggtgcatctgtccgttcatcttatttcctccctgtgacactcttgataacactagatagtgttcaggaattttagaaagacccgtttagactttgagcctcctagacattcatacaatatttactacatgattatatgcatgaatggtaaagctatttttttgcctatcatttaaggcttttctaccagctggtttctgtgtctgtcctggatctgagtaccggttacatgaattta

SEQ ID NO: 56020 - DNA, 1189 bp, Homo sapiens
actttgggaggctgaggcgggaggatcacgaggtcaggagatcgagaccatcctggctaacacggtgaaaccccgtctctactagaaatacaaaaaatcagctgggcgtggtagcgggcgcctgtagtcccagctactccagaggctgaggcaggagaatggtgtgaacccgggaggcggagcttgcagtgagccgagatcgtgccactgcactccagcctgggcgacagagcgagactctgtctcagaaaaacacaaatatccaaggaaatggaggtcacaatttttttttaaccataaaatcacgttcagctgggcacatgtctcacaaatgttactaggtcttcttataaaagaatattatctgatttaaataagaaattgaagtgtttttattatatatctcttttctagggtacagccaaagaccggagctttggagagatgaagtttaaacagtgtcctacagagaacatggctcgtgagcatttcaaaaagcatggggctgaacactactgggaccttgcgctgagtgaatctgtgttagagtccactgattgagactactgcaagcccttgcctctcctcccttgcctttgtctcttcagtcctctcacttattctatttcccaaccccctcccacttgtttgtgtgatctcagaactgtgccaagcagacactgggacaaagggagaatatcttgctcccctcctgagtcagcctggtgttgccctttattccccttatgtgcatatgattaaagagttatttttaaacttggtgtgatatttttcacacattcgtaagtattagagtttgggtctacaggtgatcttttttccggacttttagcaattgctgtggaaaaaaacattttttgtcattgacatttatttatatatataaatggatgaatggatggatggatagatggatgtgtatttttgaagtctagtggaaatgtttgatctcatcctggagctagaatgataaatactgttttcctggagcagaatgaagcagggagatgtgtaaagtggtaagggaggaaggagggacaaatgagtatccatcccttaaccaagagaatcaccaggttagacagattacctcaggacttggctaagtagtctttccaggaaatcagttcctctaagggatgcatatgtgggaatgtgtgttgtgggt

SEQ ID NO: 56021 - DNA, 1648 bp, Homo sapiens
gcgttttgaaaggctttgcaggtcctgttttctgcgtaatttttccgtgattactgactggtttaaacacgaccccttgaacaatattgataaaacctccgagacccgcagcccctccttgcagcgtgtaggagctgccagcgtgcccagcagctggtgttcccgtccgtacctccagaagagcccagcgcgtgcaccatccccaccccctagcttccctccccacctacggctttcacgcactcgcagtgattgttttgcccgctcccgccgccgccgccgccgccgccgccagaggagcagcagcgcttgtgcaaaccgggaagatggcggccggcggcggcggaggcagcagtaaggcctcctcctcgtcggcctcttcggcaggggctctggagtcctcgttggatcgaaaattccagtcggtaaccaacaccatggagtccattcaaggcttgtcgtcttggtgtatagagaacaaaaaacaccacagtactatcgtctatcattggatgaagtggctccggagatgtgagtgttgggggtgactagggaagggaagactggggaaatggaaggaagtgtggcctgaaacgcttggggttttcccacggagccgcagcatttggttggggttgttcacattaaaggtttgaccccagtggtcccaaacccagactccattcctagccaggattgtcctgaattgcaggagactcatttcttgggttttttagccattgaattgttgtgaccttgggccgttgggcccagatccatggagatttacgtatattgtttttaatatttcagagccttgtaaggtgtattgatttttccgaaccttcgcggaaattgtagcgtctgtttatttcttacaggccttgacgtgttaatgatttctggctttcctgatggtaggcgagctgtggttttaagcagtagtaaatccagtgatgtttaatgaggagtgccttgtctggatgaatgtatctaaaacttgtgatgtgtagtaaggagagccttacctggatgaatgttaagaagcagcatgagctctacatagatctgaggcaccaccgggttttccctgtacctgtgtttgctgcaataaaatacaggtttcttggatactgaccagaaacaactgcgatacagtagtcagtatcatcgttaataccttcaaatataaagcgtgtccagttcctctttttttttgagacggagttttgctcttgtcgcccaggctggagtgcagtggcgcgatctcggctcactgcaacctccacctcccgggttcaagcgattctcctgtctcagcctcgcgagtagtcgggattacaggcgcccgccaccatgtccggctaattatttgtatttttagtagagacggggtttcatcattgtggcctggctggtctcgaactcccgacctcaggtgatccacctgcctcggcctcccaaagtgcagggattacagacgtgagccccccgtgcccggccccgttactttttaattacctgaaatacctttttacacaattgagttgatctcatgggtaatgtgcacaggaaatgtgctttttgaatatgtagtacctttttctccagttatgttttttttgtctttatcctggagatttttcca

SEQ ID NO: 56022 - DNA, 1047 bp, Homo sapiens
tttctttgcttcctgcctgcggcatttcaccagtgagacccatcatccagttattctgccttattccacttctgccattgctcctgtagtgttttgatttgtttaccttttagagaacagatagataaaacttgcaaaattataggccccatgcttcgaactatttgtgtttaaagttttgggagggatgttttgtggttctttgaataataatgcagagaaattagtagataccggacagaattacctgtgtttaccaataaccgatcaaagagttattttcttgcccagaggtaaaattataacgtgcaaaaacatcaaatatgataacagtcatcattgaagactcacatgttaagtatctgctatgtgcccagtcatctcattgtaccttaaaatcgtctgagaagtagattttttaatcactgatttacaaacgaggaaactaagactcggaaattaagttgcttaaggttactcagtaaaatggtggggttagggtttgacttcatcattaactttgtaaaataatgtttaacgttcttggtataccagtgatatattgcaaacagttctaatgtgagtgagagaacctcttctccaccctattttaaaacatttttactgacctatgcaagcattttacatttcctcaccttgggctctggggctttaactgtatggttacatcatttgcaagaataagttggtccctgtcccgtctctgctgtgtgggatcacaagcgacaattacagttttttttctagtcagcaataatgagataaaatgaagccagaattttttacctcagctgttgttgctattgtgcctgagcttatttcctttattgatatcttaagagtgaaaaaatgaatgctccaggagggcagtgtgtcagttgaagtgcattgtgtatagtttatatagttaagtgcttttggctaaatatgatgttgtttttctagtggaatggaatttaactttctaaaatgattaagggtaattttagtcgttttgtatttacatttaatgaacttcactggtct

SEQ ID NO: 56023 - DNA, 1075 bp, Homo sapiens
ttcagtgtgtaatgagacttttgttcatataaaaggaaataatttagagaaataggctatctaaggatatgttccagagatatttttattttatccttctttacttttttttttttgagatggagtctcgctctgtcgtccagactggagtgcagtggcgcgatctcagctcactgcaacctccacctccagggttcaagcaattctcctgcctcagcctcccaagtagctgggattacaggcacgcaccaccacgtccagctaatttttgtatttttagtagagacagggttttaccatgttggccagggtggtctcgaactcctgacctcagaccatcattttctaaggtgatctttctgtagcataaacaaatgtcattcctctgctttaaaaccctgcagtgatatcccattgcaacaagttgaaggtctgaatttcttttacattgatctgtaagtcctgtaccatctgctctgcctacctcgggcttcttcacatcctgcctccttctcattgtttagatcaaatctcaactattacctcctcagaaagacctactttgatcaccttatttcttgtttttttttttttttttttaatacggagtcttaatagatttttttaaattacatgtatctgttttttatttattttaaattaatttaatttaatttaatttttttgagatggaatttcgctttgtcgtccagtctggagtgcggtggcgtgatctcagctcactgcaacctcttcctcccaggtcaaagtgattctcttgcctcagcctcctgagtagctgggattacaggcgtgcaccactaagcccagctaatttttttttttttttttttttgagacagagtttcactcttttcacccatgctggagtataatggcacgatctcagctcactgcaacctccgcctcccaggttcaagtgattctcctgcctcagcctcccaagtagctggaattacaggcatgcgccaccatgcctggctaatttttgtatttttagtagacgcagggtttcaccatgttggccaggctggtcttgaactctggacctcag

SEQ ID NO: 56024 - DNA, 1182 bp, Homo sapiens
tggtaattattttaagtttaagttaaaataatcttaaagtttaagatttctttagtcctggatattatagaaaaaaggttttgaaataaacatcagaagaaatttggaaaataattttattgataactttattttcagatttctagtttggagtagaagtcaaggtttttatagtctgtattactttttctttgttttcagggatccatctgtctctaagtctgtagaacgaatctttaaaatctgggaagatagaaatgtatacccagaagaaatgattgtggcattgagagaagctttgagtaagtgtctttttctctcctaaaagaaaatttttgagtcagtctttacaattacataattttatagatctggtcatgttgtataatagtgaaaaattaagttttgaatctagccctatttgtttaaagttaaatatttatgaaaaatctagatctgtttgaattaaaatgtaagtagaattggttttagggatggggtcggattttgttttttagtgactacaaaagtcaagcatgttaagtggtaatagccatctggttattttcctgcatttgcgttgagtgtttcaaatggttcattgtttgtgttaataaatactgccctgtgcccttactgttggagaatttttgcacagggtgtcagttcttactaagctgtttggtagtaagcatatatcagcagtctttagactgtcttttgatttagatttacagtaagtggtgtactgttttgttaaaaggaattatgtattatatgcatgtaattaagttattgaacagaagtttgtgataatctgctaccatgaccgtcattttactagaaatttgctttaaaaatggcatcttctaagaagctgttaaattcttcattttaatttgttaattggtatttttaagcctcctcccctattcttttcagaattggtaatttcgctgatgataaaaatcgtgtttatttgacagcttcttagatcgggtaggaatttctattttttcataaaaatgaaagaaaaggaaagaaagaaacaacacacagtctcggattgccttttttcatgctgcaactttggcactgaagtggacagacagaacagcttcccataatgccagattgcaaaaactgaaatgttttccaggtaccactttcaaaactcagaag

SEQ ID NO: 56025 - DNA, 1095 bp, Homo sapiens
tctgaagaggagactaggcattaagaagcatttctgtgggaaccatgaaatctccagatttgggggatatactctaccaaattagacatggacctcagatcctggccagaagctcattctgtaatgggagctcctgttatatttatcgtatttacccagcatgagatcaagggaatggaatactgcatgtgataggctgctgtgggcaaactgaggaatattgagagagacttgaaggtgtggagggaacaaagtaaaagacagtgagaattgggaggtgaaacgagatacttgggatggttttgctccagcgagcatatgatatccatcatgattaagggagtcctcagacatcttcttggtcataagttgcatgcttaggaacaacaggagtcgtcatttcagccaaagttccaccacagtattaatatacctagaagtttccttgcctatttttgctatgaattgagtcagcagaaaaagaaattcaaaggataaatttataggaatagagttatttgtcaccaattttcttcagccagtgctcaggattaattggatgtcctgttcctgaacactcttaatttgaggtatttagatcctgttacacccagactaggaaaaaaaggtacttgatgtatctcggtgtctccaaatcaataattctaggactttatgacctgaagggtctgttggaggtaagtaggttaggtctgtctaaatagcgtatttttacattgaccacatttaggaatgtttaaatttcctagtccattatttattttaggaattatgacttaaatgtgcatgtttgccatatgttcagagtatatctttaactatagagctaaaatttttcctgttagtcaactttttgtgtctgtattcttaatgaccttttgtttaattccaacagcatctacaaatccaaaagctgctctcaagtctaagatagttgctgaatttcgagtaagttacagaatttgtttaatatagcaaagtattattcaccccttttgtattatagtttcctgtatagtccaataagatttatctgtattcaattacacatgtcatgttttaaacatgcatgaa

SEQ ID NO: 56026 - DNA, 1020 bp, Homo sapiens
tcctcataatttcttcttctattttttttgagacgggtctcactcttgttggccaggctggggtgcagtggcgtgatcacagctcattgaagcctgagatcacactcagataatttctgtacttttttgctagacacatggtttcaccatggtgcccaggctggtctcaaagtcctgggctcaagcaatcctcctgcctcagcctcccaaagtgctgggattacaggtgtgtaccacagcacctatcccaaaagtaatttcatctgcgataaggagataaaaatgcatatcctaacagagttagataatgcatgttaacaatctctgaaatatagtaacaagcattcagtataagacagctttaattattacttacattagccaccacttttacttctttgtattgtgcttcatagaaaattccagcattttccagtgcttctgttaatgagggtccgtttttcacctgcttatctaatccattcacaaattcttccagcttggagcttgcctcttcaaattctttggagaacttcttcccacctgttttatctaaaatgacatgggaaatattcatttcaggataaaataaaaaataaaaaaatttagtcttttgacttttgaagaaaacctctctttgtgaacatactcttgctgccttactgtgcagtactctaatactcttagtttctttctttttttttttttttgagacggagtctcactctgtcgcccaggctagagtgcagtggcgcgatctcagctgactgcaagctccgcttcccgggttcacgccactctcctgcctcagcctcccgagtggctgggactacaggcgcctgccaccacgcccagctaattttttgtatttttagcggagatggggtttcactgtgttagccaggatggtctcgagctcctgacctcgtgatccgcctgcctgggcctcccaaagtgctgggattacagttgtgagccaccgtgcccggcctcacaattttatcttaaacaagtttctcc

SEQ ID NO: 56027 - DNA, 1303 bp, Homo sapiens
gttaatggaaaagaaaaacacaggacaatttatgaaaaatatcatttccaaaagacagaacacaaatgtgtaccaaataataacatgcttcttgaattgtacagatttaatacacaaatactaagaaaatgcaaaggaatcattgaaaagtaagatacaagataaattctggaaattgcttgcttttttttttttttttgagacgggagtctcgctttgttgcccaggctggaatgcagtggcacaatctcggctcattgcaacctctgcctcctgggttcaagcgattctcgtgtctcagcctctgtagtagctgggattatagacgcctgccaccacacctagctaattttttgtattttttgtggaggcaggatttcaccatgttgaccaggctggtctcgaaatcctgacctcacatgagccattgtccccagctggaaattgcttttaagcagatattaaaggtgggaattatcataaattatgaagagtatgactttttcaaaaaagcatgaagtgagtcgttgttttctctaaagtagtgccttttcccccaagtccggaaatattaggacatgttatttcatataggaagcaaagtctggaaagtagtaggatgtaatatctcttttctttgttgaaacagtcgaggacaggaaggaaaaacctgcagagaagtcagctgtatccacttctgtacctacaaagccaacagaaaatatctcaaaggcctcttcatgtaccccagtgcctgtgaccatgacagcaactccacctcttccaaagcctgtgaatacttctctttccccttccccagcattggctttgccaaacctggctaatgtggatctggcaaagatcagttccatccttagcagtttaacatcagtcatgaaaaatactggtaagtaagcccagtaaggaggataaaaagttaatttccatctttttaaattgaatcattaatctgtttttgggggggttgttgttgttgttgttgttgttgtttagacagagtttcgctctgtctcccaggcaggagtgcagtggtgcaatcttggctcactgcaacctctgcctcccgggttcaagtgttctgctgcttcagcctcccaagtagctgggattacaggcacctgctaccacgcccggctaatttttgtatttttagtagagatggggtttcaccatgttggccaggctggtcttgaacttctgacctcaggtgatacacccacctcggcctcccaaagtgctgggattataggcgtgagtcaccgtgcccagtctgttgttgatt

SEQ ID NO: 56028 - DNA, 1053 bp, Homo sapiens
cccttccagagagagccagtggggccatcatctgccccacctgtccctcctaaggatcatggtggtatcttctctcgagatgcacccactcatctaccctctgtggatctttcgaaccccttcacaaaggaggcagccctggcccatgctgccccaccccctcctcctggagagcacagtggaattcctttccctaccccacctcctcctccccctcctggggaacatagcagcagtggtgggagtggtgtccccttttctactccaccccctcctccaccccctgttgaccactctggagttgtacccttcccagccccaccactggcagagcacggagtggcaggggctgtggcagtatttcccaaggaccatagttccctccttcaagggaccctggctgagcattttggggtactcccaggacccagggaccacgggggccccacccaacgggacctcaacggccctggccttagccgtgtacgagagagcctcaccctaccctcccattctctggaacacctgggcccaccccatggaggaggaggtgggggaggcagcaacagcagcagtggcccccccttgggtccctcacacagagacaccatcagccggagtggtataatcttacggagtccccggccagactttcggcctagggaaccttttctcagcagagacccatttcacagtttaaagagacccaggccaccttttgctaggggccctccgttctttgcaccaaaacgcccattcttccctcccaggtactgatggaaaccaagggaaaggcattttgaacagtctagagaacattggaagtaggagtttggtttattgttgttgtttttatttgttttctctttctcgattttttttttattataacaaagggcctctcttccaaagtaagaaatcacatacgcttacgttttactattcaattcaatcctccctcccattgcacttatctaccttccccaagttgtttgtattaaaaaaaaaaaaaaaaaaaaaaagtaaagaaacacaaccaaagccatttcattt

SEQ ID NO: 56029 - DNA, 2076 bp, Homo sapiens
taattttaccatggtgcctccctaatgtaagtgatatttattggtggttttcaacaaaggttaactattaaagaaagaaatatttgtctttatcttccttttccccttgcctcagtcgtgttattcacccctattcttgatattttaaaggaggagattcagtagcattttcctttatattatacacatgtgtctatcccatttcaaggctcaagtcttacccccacctctcgctcccaataggaaataaagaccatttctgcccttagttgttttacatgcaagataagtgctttccttctccctggactgaaagacttgtttgtatttctacatctagtacttgggaaatagacaatcactgtactttgagtgtttatatctttatatctagggacactgaaaagtaaatgttgctttactacaatttttttttaatttagtgtcttaccccaaggcatactcaactgataatctccagctagatgagtaaaacagtatgtgtttagttttccagagaattctggcaagtttcatattttcttccaagttagtatagaactaactataggaagtatggggttgctttttcctccagtagaatattaaagatgggggagggtgggcaatgtagtgacagaaaatgattctctcagaatgaacttttcagagaaagagcagcataaaccaggtgcacatcatgatttgggagtttttgcgtaatttattctgttatttatttgggctcgccatgtgttctggggttaggatgctgcaggtcattcatcttcttaatgcctgtctggtcttaagccaactgttctttctttcctcgaccctctctgccctgtagctctccccacaaaaatgcatgataccatgaccttacgtgtgggatggggtatgtagtgtagcaaagaaaagaaagtatagttatattgagtcctaagacatttgttagggaaaagcataagagaaaatggggtgggaggtggggaaatgatatttgactttcaaaattgaaataggttttttttttgcagaaattaaatgggatgtttttcattctagaataaaagaatgtgaattctctttgctgctcttgtttaagctaaaagtagtgtttacttgataaggctctctgaccatttaatttttatcagaaaatgtggggatgtcaggaaagtggcttcctgaacgttggggcgggataattgtcctcaaaagtatgatggttaatacatgaaaggaagactttgttggacagtttcgaaggtgggcttttaaggagttgggtttttgtggggtacttttttgttttttaagccacaaaatcctcaatatgtttgttttaggatggaagtgaggatttgtatgagactgtcagctattaattttaaggaaatcttaaaatttacatttacatcagtaaatgaagatgacagtgtgtatatatgtgataaatagtgaaacagaaaagacagttctggtattcataacgtgaaagaaaggggttttattctttctgtgtctgtgatttaaaactccgtgaccatgctctgacttttgtatttcaacctgagtttaaacaaataaacaagatattttttaaagaaagcataacatagtgtgtcttagcaaggacatgattcatatggaagcagaatgtgagaagttgtaaggtccttggtactcactgtaaaatcacagacagagaattggtaggggttgtgaatacactagtaccacttaaagttcagtgatacagttcagaaatagggtccttaagtattttgaaagagtttactcttcagtcagcttagatgagagctctctccctgctcccctctaccctctcaaaagttgagagtaaatagaatttggtttgattccagggaggggaaaataagcagagaataggacttttatactttccaataccaggaataaaatgtttgtgatatatatgggtccagcaaacctatcgagataatgtgaatacgataaacttcctaatggcaggatattcactctcaatcctgaagttaccggttcctgcagaattgagcttcagct

SEQ ID NO: 56030 - DNA, 1092 bp, Homo sapiens
ccttgacttgcccacctgatttctatatctacccctaaagaagcaacagctttgagacttcctcataaggttttctgggcatgttattcataatttcctctgcctaatttttttttttaatgtaagccaatcttgtgtagcagggatgagttattccttcatgtatgtagacgtagcaatgcaaacacaatcagaatgggttttggggtattggggcgtttctcatacttgtttatgagtaactgtatggacaagtccggtcagctgctgttcacaattgctaagtaataactcactgaggctgcataggcaaggctacgagagggtcatcagtaagagagatattggcccttaagtaaacatcctgttctgtcttccccatgtagaaggaaatagaagcactctaaagcaaagaagcaagtgcagtgtaaaactatcagttacttttaattaattgctggggaaagaaaggagaagcctttgcttagttacaagtttgaggggaagaggataagaaggccaacatctatgtaaaagttgatcattgcagttacagtcaaccctcctcggtatccatgaaggataccaggttccaggacccccatggataccaaaatccacagatgctcaagtcccctacatacaatggcatagtatttgcatataacctacacacatcatccagtaaattttaaatcatctctagattactaatacctaatacaatgtgagtgctatgtacatagttgtatacagtatgttttgaaatttgtgttacttttaatttttttattaccttttcctgaatacttttgtggttggtcgaatccatagatgcagaacccccagacagagccaactgtacatttccttttttaaatgttacgtttttctatcctttgttcacacctagggaagaatcaaaaattgagaatacagatatgggtggaggggctagtgaattcttcagtgccaactgaggaaacacaaatacagactaggcgtggtggctcacgcttgtaatcccagcacttagggaggctaaggcgggcagatcgcttgagatcaggagttcaagaccaacctggacaa

SEQ ID NO: 56031 - DNA, 1051 bp, Homo sapiens
tctcccacactcttgtctctttctctttgtatttcagggtgtctaccagaagatggacccaagatccatggaggctcctgtgactcagatcaactgccctgcccgggaaacctggtctctccggaaaccttgattaaactgctttttctgacacctcttcctctacaacccttgattctatcaccattgaaacttcagaaccaactctaaccatccccacctccaggtgaggggactaatgagaattactgacagcctgatggctacccccaagtcagtttcccttcatactttactacaaatctgaccatgttcccatatttactgagtaaatttgatgaaatttacctagtcctgtgtcctagatgtatcagggagagggaagagaaaggataaaggaagttgagagctgggataggaattagaggcaaagggcttatgtagggagcagagagctaaaattctagtcaggcacctctttctgaggtgatgggggagtatactgggagcaaactcttctagagaaagcatggtgtggtaaaagaaaaccaagcttggattcagaaatcaccatcagcacttgctgtttgaccttaaattcctcatctgtcagattaaaaggtctcggccgggcatggtggctcacgcctgtaatcccagcactttgggaggctgaggcaggcggatcacctgatgctgggagttcgggaccagcctgaccaacatggagaaaccctgtctctactaaaaatacaaaattagctgggcctggggtggcacatgcctgtaatcccagctactcgggaggctgaggcaggagaagcgcttgaacctggggaggcggaggttgcggtaagccgagatcacgccactgcactccagcctgggcaacaagagtgaaactccatctcaaaaaaaaaaaaaaaagattaaaaggtctataaagtccctattaagcaccatgagtataaagggactcaaactgacctctgcagattcttgattccagcttttttgtttttgttttgttttgagatgaagtctcgctctt

SEQ ID NO: 56032 - DNA, 1050 bp, Homo sapiens
agcaactttctccccactgtggattgtaaccctgtctgttttaaatcattaatttactttttaataattgatacataataattgaacatatgaatgggtatatgtgatattttgatatatgcatacaatatgtaatgatcaaatcagggtgttcaggatatctgttaccccaaacatttatcatttctttgtgttgggactatttcaaatcttctagctattttgaaatatacaataaattattattaactgtattcacccaactctgctatggaacattagagcatattccttctgtctaactctatttttgtacccattagccaacctcttcatctcccctcccccatcctttccagcctctggtaactatcactctattctctaccactgtgagatcaactttttaaactctcatataggaatcagaacatgtgatattttcctttttgtgccttgtaaccctgtctttttcttcatccccaccttccactgctgaagttcaacactggcagatactgcagtggctgctcaagtgaatggagaaccttatgatctggagcggcccttggagacagattctgacctcagatttctgacattcgattccccagaggggaaagcagtaagtttctttcttatcaggaatacagtgactactaaaccaagagatattgaagcaggaaattctaacattttattcttttgccgcagtttctccatttgcagttgggagggagacctaccacagactgtcttgactatttctggttaggaaacttatggtgaaagtttttaacttagcttcgatctattaagcaaacatttgtgctagtgagagggagagagatgatatgttgaaaaaacgaaaggataaatatgtaaattcagccccctcaactcttgagcacgtacattataagtcatctgtagtgtatattcaattctaacatggcttatacagctgagcaaacaacctggtcacctccccaccttgtcttcttcatgtcagctcaggtagcacagaccttgcctattaggatccagaaa

SEQ ID NO: 56033 - DNA, 1187 bp, Homo sapiens
agtgcagtggcgcgatcttggttcactgcaacttccacctcccgggttcaagtgattctcctgcctcagcctcctgagtagctgggattacagacacacgccaccatgcctggctagttttgtatgttttagcagagacagggtttcaccatgttggccagactggcctcgaactcctgacctcagatgatccgcctgccttgacctcctgaagtgttggggttacaggcatgagctgctgtgcccagcctttttttttaagcttgttactttttagtggtcacccccaaaatctaggatccccattttgtggtagttattcctagaagaaccataccggctttcctaccagcttttgtgaggaagagctcagagatctaggggttaagggagaagtttatgaacttgtgaaccccttttttgtgaacccaggtgttctggcactccagcacccatgtcctgggggcagcagctgaacaattcctaggtgctgttctctgcagaggtccaagtacagaatatggcttttaccatgatttcttcctgggaaaggagaggtgagtaatgaaaggaaggaggagaatgattctgggatggtttctgaggctcttttcaggggccttgggcatgctccatttggatgaggaagctggaggagaagggtttctctaggtctcaactatgacattagtatctccttctgtgctagtccatgtccctcttctaactttgcttgaaatttaccttcttggctggtgcacatgtagtcccagctacttgggaggctgaggtggaaggatcacttgagcctgggaggttgaggctgtggtgagccatgatcttaaccactgcacccaacttgtgtgacacagcaagacactttctcaaaaaaaaaacaaaaagaaaaagaagaaacaacttactttgttacttgttagctttcataaattcaagttttacttaatcgccctcattactattgttctaactttgtctatccagatttcctgcattcaacttttaacttcatgcatagagctttttctccagctgtaatatctgttacctgatatcctatttatattttctctgagtttgtctgtctttgcctataactctagatttctcttgaaggacaggaccttacccgctagccaacaggtgtgtcacccaggtgattgatgcac

SEQ ID NO: 56034 - DNA, 1099 bp, Homo sapiens
atgagcaggagaatcggaaggtgatactttctgtcggcaccccccttttttttttttgagaccaagtctctcggtcgcccaggctggagtgcagtggcgcgatcttggctcactgcaagcttcgcctcctggattcaagcaattctcctgcttcagcctcccgagtagctgggataataggtgtgcaccaccatgcccagctactttttgtatttttagtagagacagggtttcaccatgttggccagggtgatctcaagtgatcttcccttctcagcctcccaaagtgctgggattacaggcatgagccactgagcctggccctgtactctcataagctgagcggggaatacaggagaaagaaactttgtccccacattctaaaaacccgtttgatggcacacactggacagcctgctagggcccagaagccaattcagatgccctaatatgatgtcagtattaaggggggtggaggggtggagcaggagggtgtgagcaagctggatgggtcatacagggaagggttgtagagagagggggcgtggtccaggaggaagatgaacaccatttgacaggcacagggaaaatacctttagtaaagggcatgctttttatgaaaataccgttctgcatggtggctcacgcctataatcccagcactttgggaagccgaggtgggtggaccacctgaggtcgggagttcaagaccggcctgaccaacatggagaaaccccgtctctactaaaaatacaaaattaactgggcgtggtggcacatgcctgtaatcccagctacttgtgaggctgaggcaggagaatcacttgaacctgggaggtggaggttgtggcgatccaagatcgtgccattgcactctagcctgggcaacaagagcaaaactccgtctcaaaaaaaaaaaaaagaaaagaaaatactgttctggacaagaagagttactagatggaatgggatgagttacaagggagcaaggggaaatgcagatgtgtagagcaaaaagctctgaacttagactgggcatggtggctcatgcctataatcccagcactttgggaggccaaggtgggtggatcacttgaga

SEQ ID NO: 56035 - DNA, 1066 bp, Homo sapiens
tgttaaaggagagagcaggcagaggcttttggatttcatgtggccaggaatgggatatggtatagaagactgacttttctagcagctgtataggatattgataaatggaggaatagactgacatttgaccagagcttatggttattcctctaagcagtcattgattagaatgggaaggaactaagtaaaggggtaatgagaatggggagaaaaagagatggcaaggtaaggttaggcctgaccaggttgtatgtaggaattaagagtcaggcaatttcaacactttaatctagaagaatggtgtctagaggatggaggtgttcatcctactggtgggattgttgtcaagaggcatacctgtgacacttaacactgagagtatcatttgagtcttgaaaaaggtgggggccttcagtcctcatctttcctttgatcccctatgtcctcacacagaactcatcatccttatggaggtcttcaggggccccagagacactgcagagagtgtcagggatttccttccccacaacagaattgctgagggtctgggaagcatggagggaggaagcagaattgcgggaccaccggcgcattgggaaggtacaggaattgggaagatagggagggatggtgataagggttggagagagatgacagaacctgattatgaaattgggagcagattcagtcacacagactgagcagctccgtcagttgttctgagttccaaagccacctccttgcccttgaggtgacccaatattgctattcctgaccccaggaacaggagctcttcttcttccatgaactgagccctgggagctgcttcttcctgccacgagggacaagggtgtataatgcactagtggcgtttatcagggtaaggggacccaggtctagaggaaagaagaccagggaggggctgagggactagaagaagctaaggtgtttgtgttaaaagatgggggttggggccgggcacagtggctcacatctataatcctagcactttcggaggctgagccgtgcagatcacctgaggtcaggagttcgagaccagcctggc

SEQ ID NO: 56036 - DNA, 1030 bp, Homo sapiens
ccgagatcgcgccactgcactccagcctgggtgacacagcgagactccatctcaaaaaaaaaaaaaaaaagaaagcaccttggaaagagtattgggacaccgatttgagcctacagtcttccccctagctaaccatgtaaatttgggaaactcattttacctctttaggtctcagtctccttaaagttgctatctaaggctcctccttcagctcagtgaccatcacagaacagggaaatggtaaacgatgtctgttattgtgttactgagaaatccacttttgaacctcagggctcagactgtgatgagtgggattgacaggactcagtgggaggatgtgctgaggctggagagggttatagcagatggtgcagagaaagtaggcaagcagattgggtggaggagcagtcttcgggggctagtcctccctatggccctgacccctctgcaccccaacctcagcctgatgttcgcccaccggcccagatcctggcgggaactgcccctgcgactagctgactttggggctctacaccgggccgaagcctctggtggtctggggggactgacccgactgcggtgcttccagcaggatgacgctcacatcttctgtacaacagatcaggtggcctttccctggctccaccaaagcttttctaaaccacctttctttctccctatgaacctgcaaacccctgatctttatttgccccctgtatgtactataattcagctacattctacccccagcttgcttccgcttcctctctgtttttgccctttgttttcctcaaactgccagcatccctgatctctagcgggctcacagctcactgacccttatttcctgcccctagctggaagcagagatccaaagctgtcttgatttcctccgttccgtctatgccgttcttggcttctccttccgcctggcactgtccacccggccatctggcttcctgggggacccttgcctttgggaccaggccgaacaggtgagtaggaggtagagaaatagaggcagataaac

SEQ ID NO: 56037 - DNA, 1053 bp, Homo sapiens
tcactctggctctggccagaagtgtgcttgtatggagcagacttgagaaggaaagaggctggcatatgaagggggacaggatctggagcataactatccggtttggggccagaacagaaatccaggtcagaggtctcaccatttccccccgcagctttctgccagcactcccaacagtctttccacagaaccgagcactgctcggtgaatgaggactggacgctccagggcacccgcctgccttgaaaggaaaaaggggggggtggatggaatggtggaagtatcacgaattgtgtacccaagatcaccttccagtttttaagaaatattcagctctggcaggagagggtgtggagggtttagtttttagggccaaaggcagaaggacttattccatgcactgtcaagggaaaagaggatagggcaaggttttataccccttatactggaggtcaaatctcaggggcagttggaagtcaagctgaattgtcccacactgatgtggccggcccagggcatcgtggaggtgcacgtcaatctacaggaaacagatgggaaggcacgagataagccagaagcactatccagaaccactatcctccattacctgtgccatcccaccctttaacctaccctcatcccgggctactaccttcatcatgtcacctagctctatcatacgctacccctccagttcactctactcaactcactctggcagtagttctcagcagctctctccatctaataatggtgttataatattacctgatgtccacaccctggcctctcaattccttgagctcctcatctcagagatcttcaccaccacccatctatggctacaccctttatcctgtcatctcccccaatggctgtacctctgaaactgtccatcagacaccctactctgattactgtctcttggtcagccagctctgagaattattccttttttttttttttttttgagacagagtctcactctgtcaccctgacaggagtgcagtggcacgatttcagctcactgcagcctccgcctcccgggttcaa

SEQ ID NO: 56038 - DNA, 1083 bp, Homo sapiens
gggtgtctgatggacagtttcagaggtacagccattgggggagatgacaggataaagggtgtagccatagatgggtggtggtgaagatctctgagatgaggagctcaaggaattgagaggccagggtgtggacatcaggtaatattataacaccattattagatggagagagctgctgagaactactgccagagtgagttgagtagagtgaactggaggggtagcgtatgatagagctaggtgacatgatgaaggtagtagcccgggatgagggtaggttaaagggtgggatggcacaggtaatggaggatagtggttctggatagtgcttctggcttatctcgtgccttcccatctgtttcctgtagattgacgtgcacctccacgatgccctgggccggccacatcagtgtgggacaattcagcttgacttccaactgcccctgagatttgacctccagtataaggggtataaaaccttgccctatcctcttttcccttgacagtgcatggaataagtccttctgcctttggccctaaaaactaaaccctccacaccctctcctgccagagctgaatatttcttaaaaactggaaggtgatcttgggtacacaattcgtgatacttccaccattccatccacccccccctttttcctttcaaggcaggcgggtgccctggagcgtccagtcctcattcaccgagcagtgctcggttctgtggaaagactgttgggagtgctggcagaaagctgcggggggaaatggtgagacctctgacctggatttctgttctggccccaaaccggatagttatgctccagatcctgtcccccttcatatgccagcctctttccttctcaagtctgctccatacaagcacacttctggccagagccagagtgactaatttgccatcacctgttctttccctaccaggccactgtggctgtccccgttccaggtggtggtcatccctgtggggagtgagcaagaggaatacgccaaagaggtaaggagttgaggtaagggagggggcagaagcaggtccagtagagagtctggtgccctgcagtgggcagg

SEQ ID NO: 56039 - DNA, 1022 bp, Homo sapiens
cagcctcccgagtagtttggattataggtgggcaccaccacgcctggctaattcagtaaagatggggtttcaccatgttggtcgggctgatctcgaactcctaacctcaagtgatccgcccgcctcggccttccaaaatgctgggattacagcgtgagccagtgcgtccggcctagacattcttaaaaggcaaattggaacacatcctccgcttgaaaacgccagtgccccctgggccagggcaccaagatccacttaaaaccctgcgggtgaggcattagtgatgagctcctgcttatcattccagccatatcagagaggaaggccaccaaagagtcaggtcctttcagccttgacccttgtgcgcactctgcccgctcacaccctctacttctttactggagaaactctgacctcaacgcccctcctgtgcacctgtgctgcccccagccccactcccacctcgggacgttcctgtcatgctcagagcacgctgggggccctgtaccacaacacttgtcacacctgctaggctcagggacagtgaacaacctcagggcaggggctgtgtgtgttctggatgtgtatccccaagtctagcagagtgtgcatagataggggttcaataaatggatattggccaggcacagtggctcacgcctgtaatcccagcactttgggagcctggccaacatggtgaaaacccgtctctactaaaaatacaaaaattagctgggtgtgctggtgcacgcctgtaatcccagctactcgggaggctgaggcaggagaatcgcttgaacccaggagggttgcaagttgcagtgagccaagatcgtgccactgcacttcagcctgggcgatagagcgagactgtgtctcaagaaaaaaaaaaaaaggatattgaatgaatgaaggcatgaattctaaggatcaaaagtgaagctttaaaaatgttaggctgggctgtggcattttgggggctcaccaaggccaagaaccatatcttctttgagtcctgatag

SEQ ID NO: 56040 - DNA, 1086 bp, Homo sapiens
tcctgaccccatggcactgcacccaattcccaggacaattgtagatgctgaattaagagcaagaaatagtacattttgtctcaaataaggaaggtgagagaaacccagtttccttccccaaagaggctcctccgagaacataaacatccaaccatgatggccccaaattgcaatctgtcgccccagtccaaaagtaaatgaagaatttttttccagcagagcagagccttacagagaggtgagctctgggggtgagaagggccctagtcatactttgaggagggcctgtctctctctgtcaagagcagggcacagggttggaggtggggcgggcgggtgcaagaccctgagcgagctgtttccctccagacagggcctccccctccagggtgctatcccggcctgggtcgggtcaaggatccaaccccaggactgccttgaggaaggggccatgagcattttccccaaaggaatcttgttcttgtgcctagaagttttccttgaatttccagagaaagccaatttggtatcaaattaatcttgacacattgggctgaaggcctgagaaaggcagacataaaagggtaggaacaagggacaaaactgtaactgcagccagggaggcaggcagggcggccagaggagaggcaggaatttcatacgtaccaaggacttgaagtcagaggcaggagagcccgggcctgctgggaaggaaatgcaagttgaggcaggaggtgctcacccctcccaccacaggcccagctcatctcagtggacaaagggtggacgggaaggtgtgtatctgctttttgttttgtttttttttttttgagatggagtctcgctctgttgcccaggctggagtgtggtggcatgatctcagctcactgcaacctccgcctcctgggttcaagtgattttcctgcctcagaaaggcctcccgtccctgctcacagcgccccctgtcccgtcagcttcaggatctggccctggccccttgctcagccgcaaagcctgtgccctccggcctccactgcctctccagcttcagcccctctgcccagggccaccctccctcccctgccc

SEQ ID NO: 56041 - DNA, 1062 bp, Homo sapiens
ctgtctgtctttaggtttgtggtcatagcaaccattttcggaaagcctggtgtttgcttttctgcctctccgaatcatggttgctcaactcctttgttccaaaacagacaccccattcccaattgctgcgcgccaggctggcttccagccgttgagtccgtgtcctgtcatgctgtctccactgttttgtctcactgatgctgttcttctgaccattccgctttggcttgacgcagccgcccatactaggcagctgctatgagagcagccagtggtgacctgtgctcttccagggactggagggtgagaccaccttgctgtgtttacctttgtattcaccacctcactctgcacacagtaggcatttaatgaatgtgtgtggggtgagcactgcctcagctctggccacattccagcattttctggttgttgtcctgccccatcacggcccaactgccttgcacctgatgaaatgatgaagaaacaggatgtgatccatttggtacgatgaggaccaagacatgaatgggatattctggtctcccagtcaccgctatgtagactttatttctttatttattttcttttttaaaaaagatatactcggtcaggcgcggtggctcacgcctgtaattccagcactttgggaggccaaggcgggtggatcacgaggtcaggagttcaggaccagcctggccaacatagtgaaacctcgtctctactaaaaatacaaaaattagctgggcatggttgagggcatctatagtcccagctactcgggaggctgaggcaagagaattgcttgaacctgggaggcggaggttgcagtgagccgagatcacgccactatactccagcctgggcaacagagcgagactccatctcaaaacaaaaaacaaaaacaacaaaaaaagatatactcctatatttttttcttttttttttttgagatggagtctcgctctgtcgcccaggttggagtgcaatggcaggatctcggctcactgcaacctcgcctcccaggttcaagcaattctcccgcctcagcctcccaaatatgtg

SEQ ID NO: 56042 - DNA, 1021 bp, Homo sapiens
tctcctgacccagccccagggagaagaaagaaggcatggcgcaggggaagcagaggggctggaagtcattcagggctgggagtaagcaggtatctcctctccccttcatccccaattccaagccaccactgcccaggggtgagcaagaaacctcaccttcagtgaagggctcccactgatacagctggcccatgaattcctgggagttaaaggctgcgcactgcagggcccgggggtctggctgctcaggggggcagggctgcggtgaggggtacaaaggagtcagagctggggagcaaaatgagggtaggggcagggctgaacctggggagcaggtgggaggctcaggtcagcggaagagctccaagacccctgccctgaggtggtcagatgccaaggcccttctccctcaggtgccaagcggaagctgaagacccagcttcagggcagggaagccacactggaggtcggggttgggaggggaggcccgaggagactcaccgcttggctgcaggctcttagctgttcactctccccagaacatcttggaatagggctactgggagcaaagaggctccagagggagctggcatgggggccgttgctcagcaggggcagccaggcgcccgggtgctgagggtcaggctccaggcggggcccgtgaggagtcccccccgttccccaaggcccttggccctgctggcctcggccccgagggaccgaaggaaaaggatcagggcgtctccctgctacctggggactggcccaaccctgggaacttggccttcgtggctgaggggatgcacggaagaagccaccttctcctaaggagtgcgtgggtgaggggggctctgtgccagaggcctgggctctggggtgatgccgtaggggggcaggcctggttctgggggccacctctgtctgagcagtttcagggcttagaggttctgcttggggggatggggtgtggacagacagttctgtgggagggagctcagtttgggggctgccgtttgcggag

SEQ ID NO: 56043 - DNA, 1106 bp, Homo sapiens
ctgccccgagccagccctgcagcctctccctcctccttccaagtgcaggggtcagagtcttacccggctgaagctgggggacagggggctctggggtggggttctcaaggattggaggaggtgaagagatgacatactgataaaaaacgcctgggttttcctcctgaaagatcatctggggagaagagaagataatgaatatgtgggggtggccagaagaggatgccaccagctctctctcccatcttgacaaccacagctctgcccagagggaacagcctccctccccagcattcagctgcccctggccccaggctcacatagacatccacaggctgggtggtggggccttcagccgacagactctcccctttgccctcctccctgggaggacggttatatcgaaagacggtcccgccggccctgtaggacccagggggatccacagcccagttcccattgatgatggaccggcccccagggccacgaagtgctgcgggtcagaggtgagagatcgggaaattccagggtgataataccttcctcctcccacaccgtgtccttagcctatagaagctcccaccagaacctaagatccccccaagccctctcagcttcctcactccttccacgaggggaggggctaggccctggacttccccctgtttggcttgctcactgctctgagtaggggtatggagggccgaacagagacggaagtggaaggggaggcagctgggtgctcacccaggtagttggagctaggccggagctgggcaatctggagccgcaaggctcccgctggaatccacaagatcttctgatagcccagggggccccctcggtcagtgaggttccccgaaacaaggcgacaggtagaatcatcacccccacagactccacagccatcaggacgcctgccagagccaaggatcccatcacagccggggctctggagagagtgaggtgaggcagtggccacagaacgccagacaccacctcaaccccaccccggtcccctcgggagcctcagctcactaccctgctttttgtgccacaagtgagagcacaaaaacagccccaccatccccagccagacccaggga

SEQ ID NO: 56044 - DNA, 1073 bp, Homo sapiens
aacacagcgaacctgccggcttctctggccccggccgcaccgcacggagcactgagggggcgaggggaatccagggagctgggcttcccagaccttctcagccagcttccagctctaggcttcagaaccaggctctgccttcgatccccagcccagcagtcacatggcttcgtgggctgaggaggaggctgagccctagggccctgggcccccagtccctggttcagtcccttatctgacttctatattgggggtccatatgaaaccctgtttgtaaatagtttctgctgatgaaaaagaagttgaaaaaccactgctgttgttcacctgtgcccattcccctccccagcacctccttgcctgggcaaactcacctggctccaaggagagccaacttcccaatggccacagaggcgcagctggcaagactgggtgatgttgggccgggggagatgtccacagcgctccgggggcaccgaggagccaccccccccaaattcctgccggcactgcagctggcggtgctgggtgccggggccacaggagcggctgcaggatgtccactcgccagcctcccagctgcaggcaccagcagggcagggaagaggcggagacatagatgagatgtgtggggctgccgtggcagcagagatggaagacacactggacgtgggggcctcagaggagagtgggcacgtttggcgtttggagtctgggttcctggggggctcagcctgccatggctttcttgctgcctaccgaatgtctgcctttctaatctaatgttgtctctctgcagccaggagatgttgcgttgagtgcagagttcaggtaagattctgggggcaactgctgtgtttccagtaccctaaccctccccgtgggctcccccatactcactatggggggcatggggtgccgtggcagggttcaggggaggctgggggcctggcacccgcggcacagctgcgttcatccagttcctctcccgactcacgggagatgcagaggaaaatggggcgccagacacctgagtgggtgagaaggcagccagggaggcaggaggctagagc

SEQ ID NO: 56045 - DNA, 1033 bp, Homo sapiens
tttccttgtggccccctttcctcgctccctgccctgggctgacgtcagttttatcttccttctccattcccttttgcctccttccccactcgctctcctcttaagatgtccaaattcttccttctcagccactttcaacccagagaaagcccgagtcccaaagcaacaggaagatgtgcgggggaccgcgagtgtggggacatcctgccgcctcgggcaactctgtcgtcccccacagggttcaggtgctcagaaaacagcagccactgagttcactgtttccgcaggccccgtattcccggccgtgctcagctgggcttgtggagtcgcgagcgggggcgctcctgcggcaccgcccctcctgggcagcccggcttccaggagagactcggcctcagtctccgaatggcaggggtctgggagaggatgtgatggcaaaggcctgcccctctcaggccgcctctagcaagttctctaccttgagagaagcgagtaggaggaggaaggaggccaggctgagccatctctgaggaatgtggctttggcaggacatccagtgctgccccgctcctccctcagccccgcccagggccctggagccgggccgggctcctcctcctccaggggaagggctcggggcaggaatcccttccctttccccaccccagaagaagccccagagcgtagggatatgcgtacggcagaaagggagacagaaggcagggctagagaaagggaacaggaaaaaagagcttcgacaagccaactgcccttcgctcaggccccagcggaaaggcgcagatacccggagacttcccagagagactcgacccaccaaaaagcgcaccgcggccgcgcagcccttccttcagctctggaacccagcgccccacacctcaaatgggagaactggtgacctctagtggcccatgaccagcctgcagggcctggggctggcggggattctctgacccaaactctcctgggctctaatgctgttcccctgcccaccctaccttctgccttcacactg

SEQ ID NO: 56046 - DNA, 1036 bp, Homo sapiens
cccagggcagggagcgaggaaagggggccacaaggaaagcccagttccaacgtctctgctgagcctaaagaggcctcagcagggaatcacagatgtggggggccagggaaacgggatccgagcccgcccagtaggtatagaaggccgaaggcagagtcctgagacccagggaggggtggggtggaggctggggccctcccagcgattcctggaagcccagagctgggcggtgccggctcagctgacttccccgaagctcccctccctctgctcagggctgttgctgggcaggtttggcgtttgccctgagcctgagaaccaatcgcaggtggaggtgcggtcgcagcccctcgcagggctccccggcttcagcaccccctttctctttctgcccgcccatgagctccctctcggcctccagcctctgacctctcaggaggtgggctctcctctgggggtctgctccctttcccctcttattttagagctaggactcagtgcagcccctaaggattccttcctctggtcactgaggtcattatggggtcaatgcggaagttctcaggaaagggaacccgaccccaagcaatcccttttcttggccccgtagaggggagtagtgtggccagacacctgttcgctgacctctgaaaccctctggggggacttgggagagcagaagctgcagcctgagggcagaggaatgtggggagggcccctgggtttggtgcactagtgggaatttagggaaggactcagaggaactggacccctgagaattgagatgagggtggggtggtgataggaacaaacttgatatgcacaagagagatcaagcatgcaaaaggcctgcaaattgttgaggatgcctcctttctgagggtgtgctgggggagggggttgtggtttgagtatcagtgacactaggggtgatctgtgctctcacaagttcagctgggtcaggattcctctcccctccccctcccagcttccccagggtaaatacccacccaatttaagttgcagcttttggact

SEQ ID NO: 56047 - DNA, 5753 bp, Homo sapiens
gttagtcaatggttgaaattttgatttggtaaaaaacctctggcgaaaaccagcaaaaagggctcacaaatcaggtctcagggaagcacagaggtagccacgagaaggcccgaggtgctcatggaaagagctcgagcccaggagctctgggaggaccccaggcgctcggagccgccgttacgtaaccggcactcagagcctccgaagaccggaaggccccgctcaggccccggctcaggccccggccccggccccggccccggccccgccccggcccggccgggcagctggtaggtgccgtgcgcaaccctccggaagctgccgcccctttccccttttatgggaatactttttttaaaaaaaaagagttcgctggcgccaccccgtaggactggccgccctaaaaccgtgataaaggagctgctcgccacttctcacttccgcttccttccagtaaggagtcggggtcttccccagttttctcagccaggcggcggcggcgactggcaatgtttggcctcaaaagaaacgcggtaatcggactcaacctctactgtgggggggccggcttgggggccggcagcggcggcgccacccgcccgggagggcgacttttggctacggagaaggaggcctcggcccggcgagagatagggggaggggaggccggcgcggtgattggcggaagcgccggcgcaagccccccgtccaccctcacgccagactcccggagggtcgcgcggccgccgcccattggcgccgaggtccccgacgtcaccgcgacccccgcgaggctgcttttcttcgcgcccacccgccgcgcggcgccgcttgaggagatggaagccccggccgctgacgccatcatgtcgcccgaagaggagctggacgggtacgagccggagcctctcgggaagcggccggctgtcctgccgctgctggagttggtcggggaatctggtaataacaccagtacggacgggtcactaccctcgacgccgccgccagcagaggaggaggaggacgagttgtaccggcagtcgctggagattatctctcggtaccttcgggagcaggccaccggcgccaaggacacaaagccaatgggcaggtctggggccaccagcaggaaggcgctggagaccttacgacgggttggggatggcgtgcagcgcaaccacgagacggccttccaaggtaagggggttcattaatcgccaaggcctcactcccttttttccatctctccccggactcacccgccaagggtgggttggaaaccgaaacgagtcagtgttgaaacgtgtctcatcctattcctgaagccagaatattctggccatgagtcattgtttccgcccatcttgattcttttggaaatggcagctcttgttcaaagaccggaaagggtgggatgtcaatttcaagtggggtcaacctgagttctgtaaatcccagtagcgattttcccgccgcgggtgggcaggcgaatcttgcgccggtttagacaaaggaggccgtgaggacctgcatgcttttctttctcaggcatgcttcggaaactggacatcaaaaacgaagacgatgtgaaatcgttgtctcgagtgatgatccatgttttcagcgacggcgtaacaaactggggcaggattgtgactctcatttcttttggtgcctttgtggctaaacacttgaagaccataaaccaagaaagctgcatcgaaccattagcagaaagtatcacagacgttctcgtaaggacaaaacgggactggctagttaaacaaagaggctgggtaagtttgccttaaggatgaaaggggccttggagtggaagtagaatgaaggattttttttagagaggtggggatatctaaaggtttttatgacgcacggctgtttgcaggctctaactaaaggaccattgtttatttgatgttgatttaagtagtggatccttagagatagtggtatggcggtcttgaattgtatcaaaaatcttggttttctctaggcaattttttgttccaattcagttgaatactcttcagtggattcaaaccatgaaaaaataagtcaccaggggaggatagctgaaataattcctaaggcggtgcctgttttaatggagaagatatggggtggagcctgcgttttaaacaaacccagatctgatgcaggatgtacttaactacgttgagaaaaactgatctgcgcaattgaggcgttactgaaatattaggtggtggagatttgagaataagggttttcgtcttttacctcatgggaactctggaagtccttttgttaggataaatcctaataagaccaagatagtactgtaaaatgaagtttaattatcatgggtccccgcttaagaaactgaagaacttattttctttttttgccccggggtgaataataattggtttactattgctttagggggaaaccttagatattttaatttaccttctctctggatagtagtgttgtaagagagcagaaacccatacttgaaaatgtgcttttcttttttgttttctaggatgggtttgtggagttcttccatgtagaggacctagaaggtggcatcaggaatgtgctgctggcttttgcaggtgttgctggagtaggagctggtttggcatatctaataagatagccttactgtaagtgcaatagttgacttttaaccaaccaccaccaccaccaaaaccagtttatgcagttggactccaagctgtaacttcctagagttgcaccctagcaacctagccagaaaagcaagtggcaagaggattatggctaacaagaataaatacatgggaagagtgctccccattgattgaagagtcactgtctgaaagaagcaaagttcagtttcagcaacaaacaaactttgtttgggaagctatggaggaggacttttagatttagtgaagatggtagggtggaaagacttaatttccttgttgagaacaggaaagtggccagtagccaggcaagtcatagaattgattacccgccgaattcattaatttactgtagtgttaagagaagcactaagaatgccagtgacctgtgtaaaagttacaagtaatagaactatgactgtaagcctcagtactgtacaagggaagcttttcctctctctaattagctttcccagtatacttcttagaaagtccaagtgttcaggacttttatacctgttatactttggcttggtttccatgattcttactttattagcctagtttatcaccaataatacttgacggaaggctcagtaattagttatgaatatggatatcctcaattcttaagacagcttgtaaatgtatttgtaaaaattgtatatatttttacagaaagtctatttctttgaaacgaaggaagtatcgaatttacattagtttttttcatacccttttgaactttgcaacttccgtaattaggaacctgtttcttacagcttttctatgctaaactttgttctgttcagttctagagtgtatacagaacgaattgatgtgtaactgtatgcagactggttgtagtggaacaaatctgataactatgcaggtttaaattttcttatctgattttggtaagtattccttaggtttttctttgaaaacctgggattgagaggttgatgaatggaaattctttcacttcattatatgcaagttttcaataattaggtctaagtggagttttaaggttactgatgacttacaaataatgggctctgattgggcaatactcatttgagttccttccatttgacctaatttaactggtgaaatttaaagtgaattcatgggctcatctttaaagcttttactaaaagattttcagctgaatggaactcattagctgtgtgcatataaaaagatcacatcaggtggatggagagacatttgatcccttgtttgcttaataaattataaaatgatggcttggaaaagcaggctagtctaaccatggtgctattattaggcttgcttgttacacacacaggtctaagcctagtatgtcaataaagcaaatacttactgttttgtttctattaatgattcccaaaccttgttgcaagtttttgcattggcatctttggatttcagtcttgatgtttgttctatcagacttaaccttttatttcctgtccttccttgaaattgctgattgttctgctccctctacagatatttatatcaattcctacagctttcccctgccatccctgaactctttctagcccttttagattttggcactgtgaaacccctgctggaaacctgagtgaccctccctccccaccaagagtccacagacctttcatctttcacgaacttgatcctgttagcaggtggtaataccatgggtgctgtgacactaacagtcattgagaggtgggaggaagtcccttttccttggactggtatcttttcaactattgttttatcctgtctttgggggcaatgtgtcaaaagtcccctcaggaattttcagaggaaagaacattttatgaggctttctctaaagtttcctttgtataggagtatgctcacttaaatttacagaaagaggtgagctgtgttaaacctcagagtttaaaagctactgataaactgaagaaagtgtctatattggaactagggtcatttgaaagcttcagtctcggaacatgacctttagtctgtggactccatttaaaaataggtatgaataagatgactaagaatgtaatggggaagaactgccctgcctgcccatctcagagccataaggtcatctttgctagagctatttttacctatgtatttatcgttcttgatcataagccgcttatttatatcatgtatctctaaggacctaaaagcactttatgtagtttttaattaatcttaagatctggttacggtaactaaaaaagcctgtctgccaaatccagtggaaacaagtgcatagatgtgaattggtttttaggggccccacttcccaattcattaggtatgactgtggaaatacagacaaggatcttagttgatattttgggcttggggcagtgagggcttaggacaccccaagtggtttgggaaaggaggaggggagtggtgggtttatagggggaggaggaggcaggtggtctaagtgctgactggctacgtagttcgggcaaatcctccaaaagggaaagggaggatttgcttagaaggatggcgctcccagtgactactttttgacttctgtttgtcttacgcttctctcagggaaaaacatgcagtcctctagtgtttcatgtacattctgtggggggtgaacaccttggttctggttaaacagctgtacttttgatagctgtgccaggaagggttaggaccaactacaaattaatgttggttgtcaaatgtagtgtgtttccctaactttctgtttttcctgagaaaaaaaaataaatcttttattcaaatacagggtgtgatatgggtcttttctcatcgacgcctctttttccttccctctcttaggcaaaccttttagagaagtcagctgagcaaatatgtacaggtgaattcaaagcaaaagcctcacaaagttgatttgccttagagcaaaggacagttcctttcttcaattctaattagaggtgttgggtttttaattaaatatattactgctgtacttagaggagttcttaaacctccaagtaaaatcaaaaacctctttaaaatcaaaatttc

SEQ ID NO: 56048 - DNA, 1091 bp, Homo sapiens
gctcagtcacccagaatggagtgcagggtgcaaacactcactgtagcctcaacctcctgggctcaagtaatcttcccatctcagcctcccaagtagctgggactacaagcacacaccaccacacctggctaattattttttgtagagatgaggattcaccatgttgtccaggtgagtctcagaacacaggcttaagcactcttcccatctcagcctcccaaagtgctgggattacaggcataagccactgcgcctggctgagaatatattttcatcctttcttttgtagagaggatctcgttttgttgtgtaggctgctcctgaactcctggcctcaagcagtctttccacctcagcctcccaaagtgcagggattacaggtgtgaaccactacacccagcagttagtgcaatttcattttaatacaagtgaggaaattaaggtatagagataagttacttgtaaagtagaaaagctagttagctgaagagcttgagttagtatcttaggcttttatattatttcttcccactattcctggcttccctggtcctcaattttaatttgtggccttaagaagcctggggtgccaaaaatgtttggggctatctgtatttcatgttactccttagccttttttttttccttttagttcttcaccactgcacacttggcaggatgtatcccattttaaaacttgacagtccatctccttcactcccatactgtagggctaggcaagcaaagcaaactgattctgcaatgcttctaatagttattcctgctcattattttagctagatgtattctaaagtctttatcccaaagagttgaatcaaaggttcttccactcctccaacctgattgtgctgacaagccactaagctgagccatctaatatacagggtggcagggatgaagtcaccgttactgtccaacagcttttattttaagctggtgtgggctgggcatatcaaagacaggcaaagaaaaataacttggagagttgccattgaggatatatccacagtgagccaacagcacccacacaagcagccctcgtctgtataatgccctctactgggtcttga

SEQ ID NO: 56049 - DNA, 4969 bp, Homo sapiens
ccatagtgaaaccccgtctctattaataatacaaacacttagccgggtgtggtggcgggcgcctgtagtcccagctactcgggaggctgaagcaggagaatggcgtgaacccgggaggcggagcttgcagtgagccgagatcgtgccactgcactccagcctgggcaacatagcgaggctccatctcaaaaaaaaatttttttattttccttactctcctctgcaatgactgtaggattataaatcattacattggagtgtgcttctctgtgcggatgaaatggtgggtgaaacatccctgtggaggatcccagttattgagtcttagtcacagatgataatgtgatgctgatttgcatttaccttgctggaggcaaggcaggcgtgggcaggctgtcacagtcatggaacatgtgtgggagctgtgagagtcagaaggaaaatacattatcctcatgaacaggcccagtttctattcctggtctgggagaataatcattttgaggttgttggcttgtggttgatctcctggtggctaggatagccccatatttatccttctctatatcttattcatttctgtttctccagttccaggctattgccctgtacccagtaaggtcctcagttaccctttatgaataagtgattttggtggaacgatcctctactgagtggagtacaaaggatggcaggggctatcccttgactccaaaactatatactctagctgggaaattgcttatgtacctgaaaaagtcagaacacactggggagaagacataagtacatgtaattaatgttaaactgtgtatgcatgaggttaatcaaggaagacttcttgaaagatccgagtgtgcatgagggtttataatggatgtgagatgtgagtctccttgtttttgaggaaggccagagtcctcactcacctaaacctccctcttatctcttagcaaaagtactttgactcaggagactacaacatggccaaagccaagatgaagaataagcagctgccaagtgcaggaccagacaagaacctggtgactggtgatcacatccccaccccacaggatctgccccagagaaagtcctcgctcgtcaccagcaagcttgcggggtaacctgagcccccctctcctccccttcctcaaccactggacgtttatatattataggcagggatgaaatgggcacctagtcagatcttctcagcttgctagccagaaatgactgtgattctgctgggggctgctgagaaggtaatgtaggttgaaaaggggctctaagtttatttatttcgttagattgacacttccacacactccctgtagtccaggtagggcccagaaataggaaaggctaggattggataatgctgcaaatgctttttttgtgtgagaaactggagagatgtgatttctccttttgggagagaatgtcccaaaattgattaggctgagccttgggaatagtttggcaggtttaacatcccaaggctaacctaacgtagttgggaaaggtagattgaatgagacatgttttctgtgcttctaagtgttctgtcccttaggctgctattgcttcatgtttccattatggcaggtttagagaatccttaaaaagaaaaattgacttgcttgcctaaaactacagtgcccccttagcctccattacttagtatctcttacagtttgctctggctctcaaataatataaagattgatgaacattattcacagaaaatgggcaccttctctctctcttccagcatgttgcttttgaaagtatcatgggatagtgggacgagcactggtttaggagtcaagatatctgggttctcactctactcagtcccagcagagctgttgtataaccttgattaagtcatttagcctctctggatttctatttcctcatctgtaaaatagagttaaatgtatgtaagattgattctgattctgaagtcttaactgccagcagaaaaactccatactgttcattgtaaaactaaaagtgaggaaggctcgtgggtggtgaacctctgctctgtaatactgggaaagtactacagaggggaaccatttgagggatacatgaggagagagtaaattgaggtttggggattataaattcaggcaagagaaccttatagatatcacagtcttgagggtcaaaaaaaaatacttaggaagctagccatggaagcttcttgcctctgacccagcccactttcccagcctacctctgggccttagctgctaaaaagcttctctggcagcggagctgcaggcctgaggaaacatgctcagtcatgcacatgtgttgacccatgtttcagatgcagtctgatgccaggtatattgttagggaaagaggaagaagggtaaactgagctagcccctggggctgagtactcctgcagggctggaggaacaggttcttagaagatgattcaccttggaggaagctggggaaagtggttagggagggagaggaggaagactgagaaatctctgcatccccagaactcagcaacccagctcttttatcatgaggagaggtagccatgctgactcatgaacaggtggaggaaaggggttgcaggtgaccagcatcttcaatctagttaccaccagcttggctagaattttattgaacgcaacttgctagttatgacagagaggaccagggtgagaactaatgctcaagagagcaagattctgtaatcctcttgccctctcacatcacaaattctgatatgccaaacatttggcccaatgagaatgactgatagacttgctgatgtgcatgtggggggatgaggtgtgtatatgcctttctcctgactggccattcagtgttcaggctgtcattcaaattggataggagaaagttggtgaggaaggaatggagagagcaggatccctggactccctggtccccaaactccttgactgtcacttgtaattgtatataatttttgtgtttcttgctccatttcctcatgctgtcatccttaaagtccatctgggaaggggaaaatgctgaacaccattgtatagtttcttcaactgtcccagccatgttgtacatagatatgtcatgttattatatatataaatatatatataattttgtacgttttcttcatctccgatcttctcaaattctgtactttttttcttttctgtctgagctgccttctctatcattcagcttgagtcctcaagactactggtcacaatgagtctgatttttaggaaggaataggaggagcagggaaatcagaaaaactgttggtctcactctgtctctctacctggtcatcttcaaggctaagaaaacaaacaagctacattctgtatttgccagtttccacagcatgaagtacatagcttccttagcaaggagtggtcattccaaaatccaaatgcaaattgctttgattaaacctagattattaaatccattcagaacagcatgtgtgtggtctggttctggcctccacacagtcaccacctcatctctgtgctacctcagtctttgcaagtagctgtggccatgcctctgaaacagcctgctctgagccaggcagcttacccacctggaaacctccagttattttgatcttatctaaagaattatttttctatgtttgttatccatggatatcccagaaaggcagataacgttgtttcgtggataggaaaagactgaaattctattttttgattttttttgcaactcccttatggataggattgagacatgccaggtagcctaatggttgttaaatgtggaggaatcatggggtagagactgggttggagttcagggtttttttcccctattacttgacagtgttgttttttttttttttcttctgtgttcgtccgcagtggccaagttgaatgatgctgcccggggctctgccagatcctgagacgcttcccctccctgccccacccgggtcctgtgctggctcctgccccttcctgcttttgcagccaggggtcaggaggtggctcgggtgtgggctggagaggcagaagccctttcctgttggtgtcccagcacatggagccccttgggctgagcaccaagaccttgaaccttttttgttttaccttttttccaaataacagttgggagaaatatcaatgaaattctgggggtgggggtggggttgaaagggtggggtgggagatatggaggagtatgaattagggcttggagttggtaaaaacattcctgactatccttcttaaccacgtggctgatgtggggtaggtatgaggggaaggaagtggagtagcctaatgaaaaggggttctagttgagctctgtagataaatgccttgtttcagtgtggttggagacctggtgtcagataaaagaaactccatccgcacagacagatgcaaacagctcctctagttctgcagagctagttgagaactcaacattaatcattttaaaaagtactgtccttgaaatagatttgctgtgggaagaagggcagtgagtgtgggagaaaggagccgtgagcgtggggaaccccacagagcccaaaggactttttcagtattcgaaataaacaaaacaaaaacccatgaaaaaacccaacccagaaatattctgaagcagttggtgtgttttattggggtttgggagggggaagaaaacaatactgaagacattgttaatgtgagatgcggctgagttccccaataccatcacttaggaaagggagcaggaatgttggcataaaccttgcccatccctttgtttctgtaaccaatgtagaaggtgcatcaacctcagtttgtggctcacaaaatgaggcatttaagatatttgatctaaatggtttcttgacacctaagcctagtccaggtttagcagaaaaggaggcccagtctccttttccctctgtcttccattccttttcaagttcccatgtttg

SEQ ID NO: 56050 - DNA, 1029 bp, Homo sapiens
cctgcctcagcctcccaaagtgctgggattacaggcatgagtcactgctcccagccccaaactattttttttttaatttctcatgtgacatgtaggatagcctagggaaccctgctactcatcctctatcaccagaagccctgcttttttctctttgtctttcttagcatttgtgctgagtgatatggcccactctgtgattaaagtattgtgtttagtattacctttagcccaatacgcacaggtccctggctggttccttgggtgaagtgtgagaagcagcttgtctttttctctcacaatagtcatcttgagctttagggattttaacaaaggtctagctttaacagcagagtagagatagcgtatttacaagtgggtggatttccaggagaagttgatagtatagttgttatcagatgtgagaagctgttgtttctcagtctttaattttatttggctcatttgttttctccaggacacgcaggagaaagaaggtattctgcctgagagagctgaagaggcaaagctaaaggccaaatacccaagcctaggacaaaagcctggaggctccgacttcctcatgaagagactccagaaaggggtatggggcatagtctcttaccctctttctttggagctaaaggaggttcttcgaatgaagtctgtagaggttctactggatccttttctggaggttttgttgttgaacagaagtagaggcgaatttgaaatttgaaaagagcaagtcaaattaatgtaaatccctgatgtggtatcaattccctcctgatttcccatgtaggaaattaaggcctaaattggagcatttgggtgtgtggggaaatgagggaaagatgttagaaactgaaatgcagactgcccccaggcatttgcctgtttgaatgttggaggttttaggattgtgcactttttaagcattagagataaattttgggatgcatcatttcagaagaagatcaaaccatctctcctacagaaataaatcctcaacttgaaatgaatcag

SEQ ID NO: 56051 - DNA, 1024 bp, Homo sapiens
acactagcactcctggtgctagcccactcctctgatgtgctagagaatgtcttctcctctctgacagatgacaagtatgatgtggcaatgaatcgagccaaggacttagtagaactggaccctgaagtggaagggacaaagcctagtgccacagaaatgatctgggctgtgctggcagccttcaataaatcttaaagccggcaggtggatttctccttttcccctgctggctggtgactgtcagagaccccatcactgagttttgtgtgatgagatgttttcatcatttttgtttccttttcttgaatcagacttgtgatttggggagagcaacttcagggcttctccatagaccttgaccattataagcagaccttatttctccctacacttccactccataggtaaataaactgggtgaagccacacacacccaatgaacattttctcccatttggtggtttagtttcacccagtgtgcttttggataagcagaaatatctaaatgggattttgagttctccagctatagaatgtgaatgagataaaaagtgaactatctattatatttttctgagtttgttttctatcataaatacatgttttcacagcctttgtctctcagactctgctaaataatgtagcttattgaaataactgtcgctgaataaggagcaatgagaaacaaaactaatttttggagcagatggtctctggaattgcatatcctgctagtgattttctcatctttccttttctaacctaatgagaatgtcccagattcaattacctggatgtcaaagtcctagagccagaaatatattctctcatccctcttagcattctcttgctccctcattcactagggcaaatgtctaaatgaagaaaagtctctctcaacacctcgttcatgcaatcagcattagaatttgtaaggaaggaaggggggtggcatgaaaatttccattcttggggtatatgactgtcctgtttcccccaggccactttttttttttttttcttt

SEQ ID NO: 56052 - DNA, 1126 bp, Homo sapiens
agctgactgaaacctccgcctcctgggttttcctgcctaagcctccaagtagctgggactacaggcgtgtaccaccacacccggctattattattatttttaagcttagctttctaggagttgcctctgagttagggtagcttattgttcagccagtgttggttcagtggttgtgctttagcccttggtgccagtgaagcatccacccttttttgatagatctatgtgtggtctggggaatactctcaagtcaagccccacgtcctgctctgattgctcctgagtgggtgcagcctggtgcaagcacacagtcttcccaacccccagtgttggtcatgattccagaaggacttttcttggctttctgtttctctggttctgcctgttaaacttctggaggctttgccatttgggtttgtcataccagtgccatagagctagcagcaccttgtaattgctctccaccaagatctctatggttttcaacacccttaggcatagaattctccacactgtgttccaaataaagtcagtcctctcaggcagagctttggagctcttcattcttcaggccttccttccctcctgggcagaacttctgcacaagggcccacttctcctacagtgatacccacctgctgtatgagtaggtgctgggggaaagaggtgttagcccctggtcttcttgacttgccttttctgttgcagaatctctaatctacgaacaagctggaatgggagcaattgaagtctaaatattgtcagcctaccaggcctgggatagagcttctgctctacaaatagggtagggaacctcagtcctcttagcttcaccagcaaatagaacttccacaatatagagtagaaatcatctgggagagactggtgtcctaaatagaatttgaaaaatacataaataattacagtgtcacagaggtcacataagaacagaaataaagtctataagctctagcaatatggaagtccttggtgacattttttgaagctggtttaatgtgaaatgtggttggagtcaaagccagattataaaggactaaggattaaatgaattgaggaatgaagattatgcttttaaacattttagccattcaagtttccaaacaac

SEQ ID NO: 56053 - DNA, 1036 bp, Homo sapiens
actgactcagcagttccattgtctaaacaggttaattaccctattgcaagagggagaaatcaaagtatccatagtccaaagagttataggaagctcctggttttgtcttccttttttatgcagaaaaatcatactcaggatgctgttgattaaattcctcctatatctatagctataacattatgaaatagccgggcacagtggctcacgcttgtaatcccagcactttgagaggccgaggcgggcggatcatgaggtcaggcgattgagaccatcctggctaacacggtgaaatcccatctctacgagaaatatttaaaaaaaaaattagcggggcattgtggcgggcgcctgtagtcacagctactcgggaggctgaagcaggagaatggcgtgaacccggaaggtggagcttgcagtgagccaagatcccgccactgcactccagcctgggggacagtgcaagactccgtctctaaaaaaaaaaaattacgaaatagagtatgatgtagggagagggactcatatgggtcaggtcagtcattgattaaccctggttattctccaataatattctgtttccttccatttactgcaagtcctttccaaccatactcctgtatccattttcttactgaatttttccactcacaacttctttatcatcctaagcactccacttaaactacattcttaggtatcaccagcttcttttcagtctttgatttatttttctcttttaacctatatgtgtcatttgacactttttatcactttgaaactttcttcattattggcctttgttattatcttattctcttgcttctctgactatacactgtttccttacttctccatttcttaacatccaagtctcagtttgtatcacttgagtgatcttctgtcctttcagagatatcatttacctttatagcttcgtctgtcaccttcatgagattaattttcaaatttctaggcaggtcttgtttttccacctccagaaacatatttaactattggctagaaatttcaactt

SEQ ID NO: 56054 - DNA, 1027 bp, Homo sapiens
ccagacatggtggcgcacacctgtaatcccaactactcaggaggctgaggcacaagaatcacttgaacctgggaagcggaggttgcagtgagccaacatcgcaccactgcactcccagcctgggcaacagagcaagactccctctcaagaaaagaagaagaaaaagaaaaaaagaagtcaacaggcttgaaagatgagcatttctactggactttagaattactcatttgatcttttgtcagtgccatctgtgaagtccaagctattgtactttggaaaagatactgtattacccacccatttttttctggtcattactccttcctttctttctatatttaaatctgtaaatatttcctatttgtatggatgtttagtatgcatgtatgaatatatgatttatttacataagcatacatatggattttttttttcaccactccctccagaaacaggtgagaatgaccactttaactcaccgggcccgtcgcactgaaataagcaagaactctgaaaagaagatggaaagtgaggaagacagtaattgggagaaaagtccagacaatgaagattctggagactctaaggatatccgccttactcttatggaagaagtattgcttctgggactaaaagataaagaggtaatgcagttaggtttgctaggctatctcaaagactattaaatattggaatgttttaggaagtaacctaatggaatatatttaataataaattggtcttagaattgtgctctaaccatctggaagatggaggagttgggacagtgaccgatacttggagggtaaaaatccagaagtagaattacgtgaagtgtatttaattacaaaattactccaaaattttagaagatacaggagaggaggatatagtataaagttttgtacttgtagtttcccaagttagattaaaggcgaaataataccgtttattaaagtaagaacaagggcccacacactgaagtcttcttcagctttgaggagaaatagtcttttacatgaaaaga

SEQ ID NO: 56055 - DNA, 1068 bp, Homo sapiens
aagtttttcacctactaggacgggggtggggtggggagaacaggtgtccttctaaaatacagcacaagctacagcctgcgtccagccataacccaggagtaacatcaggtaagcaacgagaaaattacatttcctaacgtcccttccccccaccaaaaaaaacctctattttttaaaattattattttatgggagggaaaggtttgtattcatttgggccatttgttttctttcaagtaggatttttaactagtaaatgtgcagatgaaactaatttctcaaagaaaccgccccctctccccctccccccctgccccgcgaaggtttaaagtttcttggattggtttaggaaatagtccctattcacagtgccagataggcttagtgcgcttaagaatttatttcatggttctcttcctccttcacttttcttcccacctcccataacaaattatatttgaaatatacccttgtacaaaaaaacttttgtagctcacttcatttgtatttctattttaaatgttcacatgcacttctgagtattcattttaatcaatataaatttatcgagcaataacaatgttaaagacagtgctagttgctatggagaatatataaacccaagaagacaatatccctgttcttaagaagtttacagttgagagacagctataccaagagaaagactataataaatactttaaaggaagtgagtataaataaagctctgtgaaacagctgagggagtggccatgagacacataggtaatagaaaagaggaggtcacttaaaggccttcacaaggcctttaaagaatgggtagaatgtaaagaggaagagaaaagggtgaagaccccagcaagtacagaggagcagaagcagaaagaaagcatgagacatttttgagaaaaagtctggcaacactacttattaggagcaatgggaaatattgctagaggagtagaaacgagtccagtcatagcaactcttaaataccattattttgatcttgaaaaagatactcctttatataattgctgatttaaaatatttgttatatattatctt

SEQ ID NO: 56056 - DNA, 1033 bp, Homo sapiens
cagcctcaaacttctgggctcaagcgatcctctcacctcagcctcaggtgacagaaacatgccaccacacctggctaatttttaaaattttttcatagagacgaggtctcatcatattgcccaggctaatctggaactactagtctcaagcaatcctccctccatggccttccaaagtgctagtaatacaagcatgagccaccatgcccggccagtagttttatattgtatttagccttcacatgaaacaaatttgttcataaatgctttctgctcagttgttttagttcctttttgaaatgtgtcaatttttttcttcacataattatgtaggatgatttggacattgaaactaaaatggaagaacaggaaaaaaaccctgcatcttctgaacttgaaggtaagaagttaatgaaaatgtacattaactcacttccaactcaattttatacccgggtaactttttttttttttttttacagaaccaagtttagtttgtgaggaagatgaaattatgaggtctaaagaaagtccagatctttctatttctcattctcaggtataaacttgatagtttcatctcacttttgttttgttcacaggacagttgcttatgcgctaattttttatttttcagattttcttattccaggtcttttagaataaaattcaatatttagaatgcttgttattaactaaatctggaaattatatgttgatgaattttgagtatattactggtggatttgtttagtaataaacctaaatactattggtagaatctgagaatttcagagctagatagaatcttatgcagttatttattccaccctgctttgtatttataagtggaatatataatacatttgtgttgccttggagcatacatgttttattctgcttttcaaatacagtaaaatcctgaaataagagatttaggtaatatgaacttggaaaaaatatgattgatgattgattgtctgtcttcctctgcccagcccatttctcaaataagtagactaaatttcttgtc

SEQ ID NO: 56057 - DNA, 1034 bp, Homo sapiens
actgcggggacatccccaattaaccatcaagatgtggctatgcaaaatggagtggtggcttgcagtagcttcaagccaggattctgtggctaataataagcaattttaattgtggaaagagaacttaggtgattagaaatatagaaatataattttaaaacataatgtgctttctttaaacacttcatataaaatgcacttaagtaaaattaagttattatttctagcagatattaatattaaaattttataatagtgacattaaaacacatggtaactttcaagttaacagcttaatgctataatagaaataagaatctcaaatagttaaaatgtaaagttatgatattagaagccacaggttttataaaataaattaatatgtgattctcttctagtaaaaaccaaagcaacgaatctagcatgttgtctactgacaccaagaaagcaagcattctcctcattcgcaagatttatatcctaatgcaaaatctggggcctttacctaatgatgtttgtttgaccatgaaacttttttactatgatgaaggtactatttgcaatacatcctgtttcagttggtacatatgttttatcattattgaaacaattggtttccattccaaatatttttagcacctaaattttttgaaattataaaatttacacttaatatcactattcaagaaagaaagatttacaaaattaagctttaaaatagatgcttctctagtgataggaacatatccatgtgaagtataacctcactcaaatttaacaatgagttaacagttttcacttatcagattggtaaaacgtgttaatccattattgataaggatgtggggaaacaggaacttttttttgtttgagacagagtcttgctctgtctcccaggctggagtgcagtggcataatctcagctcactgcagcctccacctcctgggttcaagcaattctcctgtctcagcctcctgagtaactgggactacaggcactcgccaccatgcctggctaatttttgtatttttag

SEQ ID NO: 56058 - DNA, 1031 bp, Homo sapiens
aaaggagagaagggagaacgtgaaagggaaaaccagaagataagaaacaagggggaaagatctactgagtgcttactttatattaggctctgttctttggggctttatgtgcattatctcatttattcatcccaaccttcatgaggtaaccactattagcatctccgctttacagatgaggaaatctaagtacaaggggtttcttgcctaaggtcatagtggctgaagtggcagaaccaggtttttgaacctaggaaggccagttcacaatttgggtgtttacccattacgctatagctgttacaatataacgtttcattcagtcaaggagaggtagatttaaactggtgttaaaaatagacgtttaaaaacatcactatgtaagcaatgaaatataaagaaagcaatagaagtattcaggcttcaggagggctgagaatgtgtcttttctttgatactcacacctgcgattaatgcttaatatgtatccatgctgacaaagcagatcatttgggtaaaggctgtgaattaatagattgtgttcagaaaactaattgattgttcagaaaatgttcatttattttcatatgttatatagttgtgcattttttctatcagtaaattagcaaccttgttgatacaataataatatttattgaatgtttactatatgtcaggtactttataaagtaccctgtataaattatcccatttgtgaatatttattcacaactatcaatgagatatgtactgtctttaatctcttttttagctggggaaactaatacttaaactaaggcttaagtggcttgcctgtggttacagtatagcaaagatttatgccctgtgttagccactctgctgaggtatgttgcctcccttatctgcctgctaaggagttccttccatgtggtataaataactgaaggggtggcctgcccctccacacctgtgggtatttctagtcgggtgggacgagagactgagaaaagaaataagacacagagacaaagtatagagaaacaatagta

SEQ ID NO: 56059 - DNA, 1563 bp, Homo sapiens
tgtttggttgggggtatatgtgagaagacagagagggataaatgtagggatcactgtcagttattgaaaagattgcagaagctagatgcagtggtgcttgtgtatatgatgtcagccccttagaaggctgaagcaggggatcacttgaggccatgagttcaaagccaggctgagcaactagcctgatcctgtccctgtcaaacaaacaaaaaaggagtatgaattgagtgtgatacataccatttaaccagaacagacaaatttagcaccataggaagatgccaaagaaagttactttagctcattcaaatagctccatatacccaagtcacagtagctttgggtttaaaagagacagaatgattaaaaataaaaagtagtgctcgcttcagcagcatatatactaaaattggaatgaatatagagaagattagcatggcccctgcgtaaggatgacacacaaattcatgaagtgttccatttaaaaaattataaaaagtaaatgaaatagaacataatgattatagccataatggtctatttacacaagtcctgagggactgcaagagtgaatggagtaatcttaggcaggacaaaggaagagctggtttaaagcaaagattgaaagaaagcaaaacaggtcttggtggaaaacaaataggataagagactccatatatgtctatagggggttatatgaaatacagcaagcagatttttctccctttgaaaatattgagaactaggaaaaggaaaaaggtggaactgtaggaggaagacagaagggattaggaaaaaaggctgcgatctaaaggagtcaaagttgttggaagtaaggaaggctaagagctcagcacagcaaagactcggggtcagggatggtagtgcaggggaatggtggagtagaacttggtaagtgtaagagatcaaggtgtgtgacccaaacttaatctttttcttttatcaggagatgctgtccatgctgggagatcagagcaacagctacaacaatgaagaattccctgatctaactatgtttccccccttttcagaatagaactattggggtgaggataaggggtgggggagaaaaaatcactgtttgtttttaaaaagcaaatctttctgtaaacagaataaaagttcctctcccttcccttccctcacccctgacatgtaccccctttcccttctggctgttcccctgctctgttgcctctctaaggtaacatttatagaagaaatggaatgaatctccaaggcttttaggactgtctgaaaatttgaggctgggtgaagttaaaacacctttccttatgtctcctgacctgaaattgtatagtgttgatttgtgctgagatcaagaggcaggttagaagaacctgacatccactgtttgccttggatagtatggcttgtttttggaaagaaattctgaagagagtggaggagaggagaaatgtcctcatatttgaggaccatgaaacattgtaggtatatatggggctttagcaagtttgagcataggctctttttgctgcctgtgagcagtccctctggaaa

SEQ ID NO: 56060 - DNA, 1046 bp, Homo sapiens
attcagctgctgaatccaaattttattcttcccttgctttctctggttacttcagaaaaagcagtgaagcttgtagggcctagcgtgaggcaaacaagctgcttttcttcctcctatttctttgcacctgtcctattgccatgttctaggctccatctctgtgtgtcctggtcagtgtgtgactgtcagtctttcttgtcttttccaaattgttatcaaattttccttaacctgcaggaagtcaaggggatctagggatagcactagattgtcctttgattcctagcttctgtgataaatctatccttttaatcttttacctcatttattcactcctaggaatagtggcctagcccctcctgtaaccattgtccagccatcagcttctgcaggacagatgttggcccagatttcccgccactccaaccccacccaaggagcaaccccaacttggacccctactacccgctcaggcttttctgcccaggtaaaacttatcatctgtgtgttccctgtgtattattttttgtttgtttgggcttttttccgtatgtaaaatcagtgttttctattttaaataccttctccccaacccctgttctccggtttccaatttccatctttgttgagagtagctaattaaaaatcacagataataaaaaaaaatctcagtagagtctgtggttttcaccttaaatcagaattgctcacttggaacgttttgagcacgtctgattttcagatttgttttggagtaaattctaagatgtttcctctttgtttaggactccataaggcaggagcaaaggagaaaattaatgactaacttacagtgatgtctgtttacaaaaaagttgaaaaattctttttttttttttttttgagacagagtcttgctctgtcgcccaggctagagtgcagtggtgcgatcttggctcactgcaagctctgcctcccgggttcacgccattctcctgcctcagccttccaagtagctgggacttgtacaggcgcccgccactgcgcctaattttttttttttgtat

SEQ ID NO: 56061 - DNA, 1050 bp, Homo sapiens
caccctgcctcagcctcccaaagtgccaggattacaggtgtaagccaccgtgcctggccagtattttatttttaaataaatattctttatagaaaatgtggaaagtattgaaaaatacaaagagaaggaataaaattctcacactccagatagtctttgttgatgtacagtgtatgtactttcatttttttacctatgcttttaaaaaataccttatatgaatatatacacacattcacaataaccaggttttgaatacctagaaggagttagaacccaacaagatgacccctgtgtcatagaacatggtttctgtttgctgaaactgacaccctagattaactataggataggactttaatgaaggatttattgattgttccacctacagatgaatctatagagctttacatacagaatcttattcttctctttctctctctctccccccttcctccctctccaccccctctttactgtctactctggtttcctaggaactctagccaagaaccacggcctacactctccaacacaatccagaggccacaactaggtcccacagctaatttacccctggagatgggctcaggacagctggcacccaggtaaaaaagggtgaaataatcatctgttgagcagtcacccagggggtggtcatttgcaatcccatatattttttgttcggttggttaattttttttttttttttttgagaaggagttttgctctcattgctcaggctggatggaatacaatggcacgatctaggctcactgtgacctctgtctcctgggttcaagtgattcacctgcctcagcctcccaaatagctgggattacaggtgcctgccaccacccccggctaattttttgtatttttagtagagacggggttttgccatgttggccaggctggtgtcgaactcctgacctcaggtgatccacctgcttcggcctcccaaagtgttgggattacaggcatgagccaccatgcccggcctgtttaatttgttttaaggttctttctccagattcttttttaaaaaaa

SEQ ID NO: 56062 - DNA, 1092 bp, Homo sapiens
cttgggaggctgaggcaggagaatcgcttgaaccagggagtcggaggttgtagtgagccgagattgcgccactgcactctagcctggtgacagagcgagactccgtctcaaaaaaaaaaaagtctgggcacggtggctcacacttgtaatcccagcactttgggaggccgaggcgggcggatcacaaggtcaggagatcaagaccatcctggctaacatggtgaaaccccgtctctactaaaaatacaaaaaattagctgggcgtggtggcacgcgcctgtagtcccagccactcgggaggctgaggcaagaaaatcgcttgaacccgaggggtggtggttgcagtgagcagagatcgtgccactgcactccagcctgggcgacagagggagactccgtctcaaaaaaaaaaaaaaaagcttaagtctctgaaaggaagcatgagaaatatgcttccatgtttaatcacttagtttttactctcattttgttttaatattgaaaaatattggtgcctcaaggacaatgacaagagttttagggttatagaaattggaaaatttttatttatttttgtaatgaaaattttctatgagttccactgatggcatgaaaactttttcaggtagtgaaattaaaaggccaagtgctgtctgtcatgttccggttccggtctaagaaccaagaatggctctggatgagaaccagctcctttactttccagaacccttactcagatgaaattgagtacatcatctgtaccaacaccaatgtgaagtatgtattatacaggagtgtgaaaaaactgtttttcctctgttctcacaacagaaaacacttctgatgccctatgtggggggtaaacaatcaagcaacaacacaaaaatttagccgggcgtggtggcatgtgcctgtagtcccagctactctggaggctgagacaggagaatcacttgaacctgagaggtggaggttgcagtgagctgggatcatgccactgcactccagcctgggctacagagcgagactccatttcaaaaaaagaaaaagaaaaaagaaatcaagcaatcagtagtggacaccagctgggtg

SEQ ID NO: 56063 - DNA, 1054 bp, Homo sapiens
attcattttatatagtttttttttttttttagaaggagtctagctctgtcgccagggtggagtgtagtgtgcaatctcagctcattgtaacctctgcctcttaggttcaagcgattctcctgtttcagccccccgagtagctgggattataggcacatgctgccacgcccagctaatttttgtatttttagtagaggcggggtttcaccacgttggccaggatggtctcgatctcctgacctcgtgatccacccacctcagcctcccaaggtgctaggattacaggcatgagccattgcgcccagcctagactgttcttttatggatgagtgagagtcgtaatgaattatataagctgactgttaattgtcattctcaggctccagctcctgaaaatatctggtgaattttatagacatggcttttgataacggtttttactttgtattagacaagttaattaacctctttaagtctcagtagtgtcgttattgatacaatgaatatattaatagtacctaaattcagacggttgttgggaagattaaataaggtaatgaatataaaacacatcacccagtatttgatacgtagtattacaaaataagtggttagcttctaatactgtttatttttatttttttaatttttaggaatatagagttaaaagattattttctattccatgagactagtatctaaaataacctaaaattggctgggcatggtcgctcatgcctgtaatcccagcactttgggaggctgaggcaggtgatcacttgaagccaggagtttgaaccagcctggccaacatcttgaaaccctgtctctactaaaaatacaaaaattagccgggtatggtggctcatgcctgtagtcccagctacttgggaggctgaggcatgagaattgcttgaacccaggaggcagaggttgcagtgacccaagattgccccactgcactccagcctgggcgatagagcaagactgtctaaaaataaaataaaataaaaaataaaataactaaaattacttttaaaaaataaaagcaaaa

SEQ ID NO: 56064 - DNA, 1028 bp, Homo sapiens
aatcatgtagttcctaagacagccaaaacatatcaacctcagttaagaaaaagagatcatcatattctgttagtacctaacattattttcagcttcctattaggactgtcatctcatgtagagaaatatggcttgtcaaaccaggtgggagcagcaggtacaaatatgtatttattttttgttgttgatattaatacagatgattcaaaggtactcatattaattagttataccagtatagctacatttagataattcatgtaattacctaaatgaataatggcccataaaacatgcagatttagcaccagttattataatttactcatgcaacagaccagttagccatctctgaattgacgcatcatataaacttttaaaactgttgtgggtcggaaggacttctggctgtggctatgtgaaagaggttggtgaaaaagaggtcttgaaaacaaagaacaaagagaatttacactacctgattcaacactaactataaagctattaccaagacactgtggtgttggtgtaaggatagatatatagatcaatagaccagaataaggtctattcttatacttgtcaactaattttcagcaaaggtgacaagacaattcaatggataaaataaatatttctaacaaatggaacaattggatatctgtatgcaaaaaaaaaaaaaaacaaaaaaaaaaccacacccaaaaatgaaaacacatagatcttacctcatacaatttacaaaaatcagcttagaggcctaaatgtgtaagagctaaagttacaaataaactcctaggagaaaatctttgtgattttgagttaggcaaaagatttcttacactaaaagcatgattcacagaagaaaaaaaattataaattggatttaattgtaattaaaatttgccctctttaaaggatattattaagaaaatgaaaagaccagacataaatggagagaaaatagttacaagtcatatacctgaaagaggatttgtaccaggaatatataaacaactcattaagac

SEQ ID NO: 56065 - DNA, 1044 bp, Homo sapiens
agatcctaaaaagagaccagagaggatggaattaagaagtcaattattgttcatggtaagcctttttttttttgagacagggtctcttgctctgtcgctcaggctggagtgtggtggtatgatctcggctcactgcaacctctgcttcccaggctcaggtgatcctcccacctcagcctccggagtagctgggactacaggcgtgtgccaccacacctggctagttttgtttttgtttttgttttgttttgttttgtttgtttgtaaagatggagtttcgccccattgcctaggctggtcttgaactcctggactcagtgaccctcccactttgacctcccaaagtgctgggattaccggcgggagccgctgtgcctagcccaagcctttttattcttcttgaatcctgagatagagaggaagaggtggatagtgacatagagaaagtgaggaaacatgtattagaaaaaactttcttatcgatgaactacatttagggtggaaacctgtggctgtggatcaggtgtgaaccagcagttgcttacggagagatgcatgtggcctgaagtgtcttacttcttcctgtgaatagaaatacttgttttttcagagtaaaatattaacttctatttctttttcttgcgcaggaactgaaacatttgatcttggaggcagcagatggctttctgtttattgtctcatgtgagacaggcagggtggtgtatgtgtctgactccgtgactcctgttttgaaccagccacagtctgaatggtttggcagcacactctatgatcaggtgcacccagatgatgtggataaacttcgtgagcagctttccacttcagaaaatgccctgacaggtgagagttatgtgtatgggaaatgaatgagaagtcctttcttgtttttttcctgagacttaagagatgttttagctgttaaattggtttgttgactctggcaaggcttcaagaattttctactttaatgaatatagtcagttctttttatccatatgagattatctactttgtggctcagcc

SEQ ID NO: 56066 - DNA, 2006 bp, Homo sapiens
gtatttgtcatttttaatagctaaataatcttttagcttgttaacctgtcatacttagacattttattcagggcctctttatctatataaatatatttaaaatggaattgacacattcctgacacaatggcctgccaacaccttgctatttcctcagttgccacccatcattacagtatctcagttttctagaaaaatttagtgatggttctttgtatccttctccagtggagagggaattgttacttttgatccattcctgtgtggctatactgcagagaaatggcaaaaggaccgaatcaaagttaataattattttaggaacaaatcaataatagaagatatgccagaaacctacctcttagagttatttatataatttctccagtgaaatctggttggttattttgtcattgtgtggcacgtgcatgtgttgtttgtgtgagagggagagagattatatttgtcatcacttgtttgatagtatcatctttaatgtactctgtctttaatttcttcattatagaatagcacatgtggatatcattttctttccagattgggagcagtgcatgaaaatggtattcctgaattcccttggttggttcttgttcagactctgtatatctttggtccctacagagatcgattggcaaaatgctttctgtgtttagatcatgttaatttactatatattggctttgcttttatgttgacctttatcttgtaagttactttttctttatcctaacagatggctttgtagagttacaggcaaggttcctgcctataattccatttccctcctctcttctctgcatctgtttagttctatatccttttctctcttctttctccttttctttttttttctccctccatttcctctccctccctccttccttttttcccttcctccctccccccttccttccttcttttttattttaattttagcttagttcattaattctatttttaggtcggatgatgagcagagctctgcggataaagagagacttgccaggtaggagaacagtgtcttttagcatgatgaagcagatgatgctgctttttctatcctttttcttactctttcttttcttcccctttctctttgtatttttccttatctgtggcaagagaggacaagattttttagaagtttgagtgtaacaggaactttggcttcccccatcagaaagtgggtgagttgagggaactttgcttagggatttaagaaattgctattagttttaagtttttttttctttttctctttatgtcagtactaagtttcacagaacaaaaagctcttagaaggaatgcaaccgtgccagttggtgctttaacagggaaatactctttttatcagaaaaccaataaatatatctgtatttgtgattagttcccagtatttaggcctcagcatttactccacacctctaggaaactcacacctattttcctatgaagactcacagcctagattattctcacaacagaactagtgttgctttggtgaccgaatcctttcttgcggtagttttctagaaaagttttagtttccttgatgtggctatttaaaagaccaggtttctgtacttacgtgtcagaaatctgtcagatactaggaagatgagtgctttatgtttgagaatagaattttatgtcttaggcaaagtgtaactaaatatgggcctatgtggtgagaccctttttgccatttagaaaggagactctagaattctcttgggagactgttgtttgtaatgtagaaatgctgcagaagaaatatgcatagacttttctgttttctagtatctgtgatttgggggtgacttaggaaatagatcattgatgccaatacccatttttactatattcccccttttttctactatttcctctttaatctgggtcacaaactcattttgctgccagtttaactcgagcttcttactaaccctttcactgttcagaaaatggatttggcatgatgtggt

SEQ ID NO: 56067 - DNA, 1019 bp, Homo sapiens
ggtggttgctaggggttggggtgaaggagaaatgagaaaatggtgtttgatgagtatagagtttcagttttgcaagatgaaaaagttctagatatctgttgcacaacaatgtgaatatggttagcactactcaactgtacacttaaaaatggtatacagtaaattttatgtgttttttaccagaattaaaaaaaaacccaaaactaaccccttactttagaattgtgctgacaggccagtcagctgtgttgtcattagatcatcatctttttttggtgtgtctggtaagggtaatggaaataccagaaacctgacaaataatagttgtgggtcttttaagttctatggggtgctgctgttatttctatcactttgtgatgcttttccattggctttttttctattgaatattttcacccctttctagtttacttttcagagtgaaatagatataacaagtgtaatgctttgaaacaatcctttttctctccttcaggtgtgatgatgatcagatgtctaacgataaggagcggtttgccaggtaatattgtagtaggtaatatattgtaatatataatatgatccatgttgtagaaccagacagtcctagcatattgacttaattttttctggatgagacggaatttctctgtttaatatctttcctatttggaagtatgtgaaacttagtattataactatcatttatgttcaggtgacatggcttcaaactggcggtatattttatacagtgtttttctgtgtatgtgataactaaagcaatgtgcttgcaaggtttccataggagcacaaattatggattttgtgcttgcatttattattaaatggatctacaaaaataggaatacagataatggttctgtaattaatttatttattttgagacagagtcttgctctgttgcccaggctggagtgcaatggcgccatctcggctcactgcaaccttcacctcctgggttcaagcgattctcctgcctcagcctcctgagtagctgg

SEQ ID NO: 56068 - DNA, 1031 bp, Homo sapiens
tttttttttttgagatggagtcttgcagttgtcgcccaggcttgagtgcaatggtgcgatcttggctcactgaaacctccacctcccgggttccagcaattctcctgcctcagcctcctgagtagctgagattacaggcacccgccaccatgcccagctaatttttgtatttttagtagagatggggtttcagcatgttggccaggctgatctcgaactcctgacctcaggtgatccacccacctcagccttccaaagtgctgggattacaggcgtgagccaccactcctggccccagttttgtacttctttgcctagtttgggactatgaacaagaggaaatgtagctttgtttgacttctgccacttcctctttccattcttccatttgggtgggtgttccggtagcttgtgttgagaaattttaacttcttaatgttttgtattatcagcaggcttaaagtatttattgttggctttcctcaggctggattttgatgatgatggagaagggaacagtaaatttttgaggtaagagactgaaaaactttccttagatgtctgatattaaaaattagtttatgatctttatacttctgacttgtaaatttttgtccttaggtctaaggagagtacttcatcctaaaactataaatattcatatatctcagaaaatttttaagcattccgttaatatctctagagaaaggacctcagtgaggagaggacggcatttacaaaccctctgtatcagttctctgctacttcatagcctaaaaagaacaacagttcgttatttctcaattctgtggattgactgcatgtttattctgcttatctcacctagactcactcataagactgcattctcagctggtcagctgagaactggactcagctgggatggctgggtatttctgtctatgtgtttttttatcctcaaggaggccagactgaattttttcatgtggtgatggctacaatctacagcacaaatcccagtgtgcaagtgcttatcaagcctctgctta

SEQ ID NO: 56069 - DNA, 1052 bp, Homo sapiens
tatcaagaccccatctctaaaaaaaaaaaaaaaaattaactgggtgtggtagtgcgggcctatagtcctagctattccagaagctgaggtgggaggattgcttgagcccaggagtttgaggctgtagtgacctataccagtgattataccagtgcactctagcccaggcaacagagtgagacctggtctcaaaaaaaaaaaaaaaaatcaagaagagcaatctggatatgagcatttgggatttttagcaaactgctgagattttgtctatagcttgaacctttcttttagctaacttgatgatactgatgataagcaaggactgtctttttaaaaatgtttacttcattattttcctgacagaaatgacatcagatgtaccatcactgggtccagccattgcctctggaaactctggacctggaattcaaggtggaggagccattgtccagagggctattaagcggcgaccagggtgagtttgagtgtagtgtgttatgaatatctctcctataaaccaactttagttgctgaatttatttagttgctgaactcacttcgctattcctgaccatctcacttcaacttgattacttactacactactgtcatataagtctccttagtccctgtatttttgtttatgaagaatttgtttttatccaagtttcccgtaagcagttctttttttaaaccaaaatttccgtaagataaaggactgtagctaagcccagagattttactatgcctgagaaaactgtttgctgctttcattaagctttgtttctgttttcccaaaatcattttggtaggctgcttttctgaatttagagaatgctgagctctagaatagctgtcttctaagttattgatatgttgcttggtttggaatgcagagtccattcagctccaaaagtatttattaaattcctaattagtgttatggcattgtgctgattccaagtaggatacaaagatgaataagacacagtccttgtttctaagttggttgtgttctgatagaaataattattatacacatgaatatatga

SEQ ID NO: 56070 - DNA, 1005 bp, Homo sapiens
cctccctcccggttcggtggcggcggctcctcccactgggggggggggtggcgcggcggcggtggcatctgcggccatggcggcgactactgccaaccccggtgaggagacggaggactggggcgcctctaaaggggaggggccgaaggggctgacaactaaggagacccagggctgaggggacgcagctggagctgaaggcgccggggcggggcgggggccgcgagagacggtgggggagcggtgacctggggaggggcccgatcccggggacttgggtagactcgagtatacccaagggagcgagggggcaggtgggagttgaggggggctccctgtcctgacctccgttggagcggcagccagtgcggggctggcccgccctcactcctcggtcggcgtctggtctgtgatgtggtcctcttttaaccctctgcccgctggagccgcttgatgccgaaaactgtaggcagagtgtctcggtttactttaagagtagtttggattcataaaccctggaccacactgctctttagttgaggcgttgcttccaaacatttaaaggtttagattttaatttaaaaaataaaaaatggacattctttgatatatacgacgtttctttaggctgttacctcccacccgcaacccccgtccccgtctccgtccccggactatactttgaaacttagatcttgtgttaagagggcctgtaggtctttgcctgctgagggcaggggtttgtgtaatggttatggttccggacaggtctttagttccacagccccaggtttaaatcttgttaggcctacgtcgaggcaatttccaaactctttcagaaaagtttgattccacaccatttctcaatttcaaaaaataatcaaatatcaaaaaggtttggtctgttttgtctaagagatggagtagggtgtagtgcagttctagagagatcagatcttcaaattactagtcccagccctctttcctctatgttacagttattcc

SEQ ID NO: 56071 - DNA, 1042 bp, Homo sapiens
ataattttaaaatttgtgtgtatctcctctactttaatccttttaagttggcaaaagcatcattcccaatcacaaatacatagcagttctacagttttatgtttctgaatggctgtttaaagactatcctaaattataacttagtttgacaagcattcaagagtgaagtttaacttgctactattttaaaagcatgtgaccttatagatcatttataaaatgtgagaaatgctaaataatctttgatattacacataaaacacactaaaatgtctttcaataagtaaaaggaaccattttaaatacagggaattctaattagattggcatagttaaggccaaaaatataaagtagacattactaccttatttatcttcaacccttgcctttatggacacaaaacacaggtgaatcttgcttggttctgagacagtgaaggaatttctccagtattcaaatatattcacataaccagttatataaatctaaatataaaaccaatctccagtaagtttgaagatggtactcaccatctttgtgaaaagtttaacattactaacaaagtctaatcatatctttagaaggggtaaacagtgatagcatttactgaattggaattactattaaaattcaaaaactgaacatattcatttaaccacaagccagtcttagttttaaatcaggactgtccgacaaaatattctgtcagtcattcatgatctgaattctggtgtataagctctgttaaagtatggtacacatgaaaaattcatgagacatttgttttgtaataaataaggcagtggccaattattactcattagtagcttttttgagataagctgtcaagtcggccttttctgccttctttttaatgccggcaaagatcatttttgttccagggatgtacttcttgggattttccaaatactccatcagcgtatcctctccccagatgatgcctttgttcttattggcatctgtgtaagagaatccaacagcctgacctgtcttctgactgaagagaccatggagattagg

SEQ ID NO: 56072 - DNA, 1144 bp, Homo sapiens
ggttgcagtgagccgagatcatgccactgcactccagcctgggcaacagaacgagactccatctcaaaaaaaaaaaaaaaaattggccgggcacagtggctcatgcctataatcccagcactttgggagaccgaggcaggcggatcatgaggtcaaaagatagagaccatcctggctaacatggtgaaaccccgtctctactaaaaatataaaaattagctgggtgtagtggtgccaccttgcgtgcctgtagtcccagctactcgggaggctgaggcaggagaatcgctggaacccagggaggcggaggttccagtgagccaagatcgcaccactgcactccagcctggtgacagagtgagactccatctcaaaaaaaaaaaaaaaattaccccactttccctaattaccatactaccctctttaccttcccgttctctaccgaatctatgtcataactcttgagaataactttgcttcttctataggaaccttgagtcagatgtctggagaactaagcaaagatggtgacctgatagtcagcatgcgaattctgggcaagaagagaactaagacttggcacaaaggcacccttattgccatccagacagttggtatgtgcaaacttggaggaaccactcctgaaaggcaacctgcaccctccactgctgattgtttcttttccccataaccttcccatttgtctctcacatagcagcctggatttatacagaaactggcagtgtttaaaaagatttatctttcccttttactcagggccagggaagaaatacaaggtgaaatttgacaacaaaggaaagagtctactgtcggggaaccatattgcctatgattaccaccctcctgctgacaagctgtatgtgggcagtcgggtggtcgccaaatacaaagatgggaatcaggtctggctctatgctggcattgtagctgagacaccaaacgtcaaaaacaagctcaggtacctggacagaggactgtaaaggggtagaggctgggagcacagcacctgccctgttcgtgccatagaccagataccacaattagcttttgtcttcttagtccccagtggactgaaacccttactctttctttaccacaggagtcatgtgggtgattctttctt

SEQ ID NO: 56073 - DNA, 1875 bp, Homo sapiens
ggttaaattaagggagaactcctaactctcaagttgagaagaaagaaaaacaggaagaaagtagtggactggattgtcttccctggagtgcatcgtgttgtgatccagagaagtagaagctatgataaaataatttctgtggatcatgttaaatatcataacccccagatctttctgctgtcactcttcttttataggtttctcattttctttgatgatggctatgcttcctatgtcacacagtcggaactgtatcccatttgccggccacgtgagtgtttctcccttattccttagctcagttttctcctctaccttgtatttcttcttaggacatccagttgaaaagccctagtgtttttggtatttcagtctcaaagagcataagtttggttgatgtcttttgctcccaaaggtcagtttgctcccaaaagagatacagttttattgttcatctccaggactgggtctttgtagacaaagagtgagacactagaagatcatgaatggccttgagtagactgctcacgttatagatgtgcttcaatttcatttctaagtgagttacgttggaaaaggtgttacttctttcctagtgtcatactgcacctaacatttgtataaatgtgtagtctgcataatgctttccacagaagctgtgttagatggaacctcatagtgtccactatatttgttaccctggcttgggagcagactcctatggaaacaatcatttttaactgcagaagaatcaactaacacttttgtttacacataacatgacagtaaacacattctgagtctcttaaaaacctgatagagaatgagaaggaaggactaatttttttcatttcatgatgccacctgatctttttaaatttaccactagactgatcaacaagtgagcaagaatttccacttgaattttccagaggagaaacatccatttgtgtaaaataagtgaatcacctatattgtacatttcttatttagtatttacttgatttgtaagtatgtacagtttgtacattaggtttattacttaggtggtcttggctttgcttcccttgaggttctgattttactttttctctccttttcaacttaaaaagtatcaaatgtctcctggccaagtcttttccctatcaagacatgccctacctgccctctcagttctacttcttccttgaaacagtgaaaaagacttgggaggacatagaagacatctcctgccgtgacttcatagaggagtatgtcactgcctaccccaaccgccccatggtactgctcaagagtggccagcttatcaagactgagtgggaaggcacgtggtggaagtcccgagttgaggaggtggatggcagcctagtcaggatcctcttcctggtactgttcttctctacaattttggaggcagaggttggtggggggggaacttaagaagcagtaatgaggatggttttatagctattccatagccttcctctttcttatcctcgtatgtgttctcactgtttttggtcaaattttactttgccctttttgttgttcctctgcaggtcattgttgaaaataaattatctgaattataatacgaatctgcatggttttgatttatttattttttttctttaggagtattcacattgtgtgtaggtacagaaagggcagccaattccatttttccagggttaaggttttagtaggatagtgggacgaagaagagggatcaaggagtcctgattatctttcaaggctcagtttaactcttaggtattttgtactcatccttttctcccttctctctcccttcttagaatcatatttcttatttttaaaagttttaaaaacattttttaatactgctgcttgcag

SEQ ID NO: 56074 - DNA, 1536 bp, Homo sapiens
tgcctgtaatcccagcactttgggaggccgaggcgggtggatcacctgaggtcgggagttcgagaccagcctggccaacatggagaaaccctgtctctactaaaaaatacaaaattagccaggcgtggtggcgcatgcctgtaatcccagctactcaggacgctgaggcaggagaatcgcttgaacccaggaggcagaggttgtggtgagccaagatcgtgccattgtactccagcctaggcaaaaagagcgaaacttgtctcaaaaaaaaaaagagaaatagagatgttatcagtcagtgaagagtaaccagggagtttcattgtccaggtttggtagggcaagggaagatctttcttgaatcatctttagcttcaggagcacagctgtttgaaagatgagagaaatggcttagctacctggagggttaattataaaacagaggtcctgttgccttccgatctgatcacttgcatctcatttgcagatcacctttaggctccacagcctctgccccagcaccctcagcactcccggcccctccagcacccccagtcttccatggcatgctggagcgggccccagcagagccctcctaccgtgctcccatggagaagcttttctacttacctcatgtctgcagctatacctgtctgtctcgagtcagacctatgaggaatgagcagtaccggggcaagaaccctctgctggtcccgttactatatgacttccggcggatgacagcccggcgtcgagttaaccgcaagatgggctttcatgttatctataagacaccttgtggtctctgccttcggacaatgcaggagatagaacgctaccttttcgagactggctgtgacttcctcttcctggagatgttctgtttggatccatatgttcttgtggaccgaaagtttcagccctataagcctttttactatattttggacatcacttatgggaaggaagatgttcccctatcctgtgtcaatgagattgacacaacccctccaccccaggtggcctacagcaaggaacgtatcccgggcaagggtgttttcattaacacaggccctgaatttctggttggctgtgactgcaaggatgggtgtcgggacaagtgagttggtggggggaattgctgcccctgcttccaactttgttatggtgtctgtttcacctcttcctttgccttgtatctgtactgctttccccatcttcctttacctcctccctcacctggaactcctgctataaggcctccatgaaagctatgaggtagggaggctggagtctgacatggccacactgagcaaccttgggtacatgtgtattgtgttatttttgttctctgatccccccgctcctttcctttatttccctctgtcatataggtccaagtgtgcctgccatcaactaactatccaggctacagcctgtaccccaggaggccaaatcaaccctaactctggctaccagtacaagagactagaagagtgtctacccacagggtaagtggtcaaggaatggcacagt

SEQ ID NO: 56075 - DNA, 1070 bp, Homo sapiens
ctcagagtttttcatcattccccttctcagaaagtttctggaaatatttgcaaaaatgagagggaaaggcaggaaaggggaagacaggtgacagtgcagtgaaagaggcttccaggctgacagctgtgtactaggcatagagaagagccactgcaggagcaggtcagatgctgtaggagcgacttcttcaggaaaattggtttaacagaaaacctgaggtgcctgaatacattcagaggagatcgagactactggggagatcataggatgaatttgtactgataacattgaaaaactaaacaaaggaatagacagttgtttagttgcattgctgtatcatgtatgttttaattattaacaaaattttgaatctaacaatagcgtttagatttgataatgctgggtggtacatgagtgttcatatcttttttacacgtttgaaatgtttcataaaaatattttcaaataatcacaaataatatatcactcccctgcttaactctataatatagtccctctgctgtttggattttattctgactcttaaccttaggttatatatttggccctttcctgtctccctccaaagtcattccaaccacactgatatttttcagttcctggatccagttcaaccagtgttttccagcctgcctctggagacttgcacatgctgtgccttcttcttggcatccttccacttttctttgtgtggctatcttctttaaccttgagctttcagctgtaaagtcacctcctcagagagaccttccctgaccactttaaaactaggtcattttactcccttaattctctcattgagcaccatgtttgtgttctttatagcatttatgacaacttttgttgacttgtttttctttttttctattatataagctccttcatgagggcaaggatcttatctgtctctttgtcttgctaaccattgtatcaccagtttacccaatgcctggcacatagtaatcacttaggccaggtgcagtggctgatgcctgtaatcccagcactttgggaggccaaggcgggcagatcacttgaggtcaggagtt

SEQ ID NO: 56076 - DNA, 1011 bp, Homo sapiens
gggaggccgagacaggtggattacgaggtcaggaattcaagatcagcctggccaagatgttgaaaccccgtctctactaaaaatacaaaaattagccatgtgcggtggcaggcgcctgtaatcccagctactccagaggctgaggcaggagaatcacttgaacccgcgaggtggaggttgcagtgagccaagatcccaccactgcactccggcctaggcaatagagtgagactccgcctcaaaaaaaaaaaaaaaagtaaccacttaaattttgtggaatgaatgaatgatagtatagctactgtaaaggtttcatgtggtaataatgacacctgagttcaaattccagccctgcccctactgagctgatcttttttgatcagctgtaaacagaggatattaacataaacacccccatgtccccagtggggttttaagggacctaacaaagttgtttcttgatctggtgcaggttacatggtatgctgagtttgtaaaattcattgatctgtatagacttacgtgtactttcctctgtgtatattacgtttcaataatcttttatttccccctacccactagaccaccagggaaataatctcttttttttttttgctatggagtcttgctcccaaagtgctgggattaccgacatgggaaataatcttttttaaagttagaaaaaaaagctagacatggtggctcacacctgtaatcccagcactttgggaggccgtggtggggggatggcttgagttcagtagttccagacttgcctgggcaatgtgatgagaccttgtctctacaaaaaaagttttaaaaattagctgggcatgtggcatgcagctgtggtcccagctacttaggagactgaggcaggaggatcacttgagcccaggaggtcaaggctgcagtgagctgtgtttgtgccgctgcactatggtctgggtgacagagcaagaccatgactcaaaaaaaaaaaaaatgggaggtcgaagcaggtggatcacc

SEQ ID NO: 56077 - DNA, 1410 bp, Homo sapiens
gtattgatggaataatccttattctttctaataggtccccgtggccgggtgcggtggctaacacctgtaatcccaacactgtgggaggctgaggcgggcagatcacctgaggtcaggagttcgagaccaacctggccaacatggtgaaacgccatctctaccaaaaatacaaaaaaaattagccaggcatggtggcgtgcacctgtagtcctatctactcaggaggctaaggcaggagaatcacttgaacctgggaggcagaggttgcagtgagccgagatcgcgccactgcactccagcctgggtgacagagcaagactccatctggaaaaaaaaaaaaaaaaaagcaaacaaaaaaaaaaactaataggtccccataaccctagaaggcctttaattctcttcattctcaggcaaaatcctgacagatgactttgcagacaaggagggtctggaaatgggtgatgagtactttgcaaatctggaccatatcgagagcgtggagaacttcaaagaaggatatgagagtgatgccccctgttcctctgacagcagtggtgtagacttgaaggaccaggaagatggcaacagcggtacagaggaccctgaagagtccaatgatgatagctcagatgataacttctgtaaggatgaggacttcagcaccagttcagtgtggcggagctatgctacccggaggcagacccggggccagaaagagaacggactctctgagacaacttccaaggactcccaccccccagatcttggacccccacatattcctgttcctccctcaatccctgtaggtggctgcaatccaccttcctccgaagagacacccaagaacaaggtggcctcatggttgagctgcaatagtgtcagtgaaggtggttttgctgactctgatagccattcatccttcaagactaatgaaggtggggagggccgggctgggggaagccgaatggaggctgagaaggcctccacctcaggactaggcatcaaggatgagggagacatcaaacaggccaagaaagaggtaagcagtggcagaacactctgagagctatggctttaactttggtgcagtaacaatgcagtctcaccatgagtctttgcatgtagattattctacttgatggatatttctgtggccacctcgttatctctccccctaactagcacattcctagtgtttgtttaaagaaccaaattattgaccgggcacagtggctcacacctgtaatcccaacactttgggaggccgaggcaggtggataacttgaagttcaggagttggagaccatcctggccaacatggtgaaaccccgtctctactaaaaaatacaaaaattagccgggcgtggtggtgcatgcctgtatttccagctacttgggaggctgagg

SEQ ID NO: 56078 - DNA, 2430 bp, Homo sapiens
gcttcttgcatgtgaatttttttagatggagttctcgctctgtcacccaggctggagtgcaatggtgcaatctcgactcactgcagcctccgcctcccgggttcaggtgattctcctgcctcagcctcctaagtagctgagattacagtcgcccgccaccacacccagctagatgtatttttagtagagatggggtttcgccatgttggccaggctggtctcaaactcctgacctctagtgatccaccctccttggcccctcaaagtgctcaaattacatgcatgtgaaatttaaaaaagaaaatattacataactgcaaggaaggcataagaaagactctcttcgtttatttagttgatcccccttctcaattcctaatagtctgacacttattgccatgttttatttaatattttttatttaatcttttaatttttaaaaaaaacccattaacagtacattttggtctaaaatggtccctctgctgaaatgctaggtgctagccgtaattctggctttaaaaccaaaaccccaaatatttaataaataaaaattagaattagttgccattctactccaaaccagctagcctagctgaagagaagagggaagggggaagaggccagagaaaggaggaggcagtcagatcttagacctgtcgctacagggacagctgaaagaagtagcactaagaaagatcatccgagcagtccccagtacagcccccactttttggcagaggtagggtaagggttatgtgcaccctcctcctaccctcaattcatttgtgtcatagagggagaaagttaaaagctcagctttggtttctggcccaagttagggagcttagaaaggttagccttggtccagctttggcagaatgaggcccacagatgggacaataaggcacaaccctggctctggaggtcagggagtcaaaggcaaacagctggggccaaattctcagaataaggaatgtgaattgtaacccctacccacagagagctgagggagggcctcaaaagcagtagaaaggatgacttggcgggtagggaggaaaatacgaccgtccccctctaacagaatataaccaacgtccccctacctggggataggctggttagaatttggtttaaaggcaactgggtgacaagcaaggagggaggatgcagagaactctcctctcactttctcctttttccccagagcttaaagtgaccctatagcgcagggagcggggtagttccttggctttatgcattaatctgggaggcagctggagtaatggttcagtcattcttacgatggttgttattgaggatggggtggccattggctaggggccggctctttgctcctcccccagctgcagcctcctccccctctgagctctctgtttcttcccggtcactgcgttcatcttctaccagctgtggaaaagggacaagaagggttattacatgagatcctcaaacccctaagtactgcttctctctgagggcttgttcctgttatacccagggctccacactagttttttagagagttactggcaagatgggagttcaggaagttgtagagagtagtaaggcctacacaatgggaacagggcttcacctttccagttatgaacttgtgggccatgcgcaaaatgaggtaggcccagaagatatgcagcagctgtagaactcccatcatggaattgaagaagtaatagccaaagaaggcaggatagagctccagtgggtacaccagggtgcaatgcaggatcctgaggattcaaggagagagagaacgtggacaagagcaggtcagacaccggggagatacaggaggggaagaaaggcaaggctcctgatttcttcagaacaggagtgtagcctagctgcctactcaccagaagggcaggatgaccagtcgggtgatgataaaaacaatggcgaagacgatgaagatgttgttgcaggtgttcttccatcccgcgtagttaaacatcttggctgactgcatagagagcccccatccatcatcatgggctcctgactccctcgagtacattcatatgtacactccagttaggagcactgactctgtgccctcctccttggtcccaggaatgtcatcctccaaattcccaccccgcacctccctcccaaagaaaaccaaagggacagaagaacctgcaccagggtctctagatttgaggaagcctgacctccagcaggtaatcggaagagtcatgcagagccatgattagagtcccagctcggatgtaattggcaaaccaggaaaagctgatgagaatgatggtggccacatggtggatgatctgttccttgaaatcctgcagagatgatgcaggccccagggcctttttttattccccagctctcactatgccttcttaccccttgcctttggttccccat

SEQ ID NO: 56079 - DNA, 4634 bp, Homo sapiens
ttttttttttttgagacagtctcgctgtcacctaggctagagtgcaatggcgtgattccggctcactgcaacctctgcctcctgggttcaagcgattctcctgcctcagcctcctgagtagctgggactataggcgcccgccaccacacccagctagttttttgtatttttagtagagatgaggtttcgccatgttggccaggctggtctcgaactcctgacctcgtgatctgccagcctcggcctcccaaagtgctgggaccacaggcatgagccatcacggccggcctaacagtaaatgttaaaactggaaagccaccgtattacagatgaggaaactgatttgcccaaggctacatagccaggatagggatctagagttcgactctctgcccccttctccttttgatacatcctgaaaacttttattcatctatctcttcctccatagctactccctcttgatgccctcccctttgcccctcactcaggatgctccagaccttgtatgattacttctggtgggaacgtctgtggctgcctgtgaacttgacctgggccgatctagaagaccgagatggacgtgtctacgccaaagcctcagatctctatatcacgctgcccctggccttgctcttcctcatcgttcgatacttctttgagctgtaagcatgccagcctaccctcatgccttcccctgttgccagttgcagtttcttggacttcaagtttgttccttgctgtttaattagcccttgaccctgatgttctggctactcaggttcctgcccactgtgcaccccctcccctgaaggcaccattgtcttcctgaaggctcagcacccccaggccctttccatcaatggttatttgttctcaccctctacccgccgcccgcctggccactagtgaacacacaggcagctttgtcagctgtgggcagccctggaggctagagaaaagggggttgccaggaagctggggaaactgaggccagggtaaagttgccttagcttgcagccctttcccttcccagcaagctagataccttactcatatcccttccccaggtacgtggctacaccactggctgccctcttgaacataaaggagaaaactcggctgcgggcacctcccaacgccaccttggaacatttctacctgaccagtggcaagcagcccaagcaggtatgagccgcatgctgctctggctctgggaatcactgagtttggtggtggggggacagggtttgaatgttagctctggcaggtgaagagatggggaagcagtggtgctgactgaggttgttactgggagaggctggggatgctgctgagttccgaaggtaaacataacaatgggcttcttcactgtgcccaggtggaagtagagcttttgtcccggcagagcgggctctctggccgccaggtagagcgttggttccgtcgccgccgcaaccaggaccggcccagtctcctcaagaagttccgagaagccaggtgggggaggctggggcagaagctgggtgacaaggaatatcctgatgtgtcttgctgggagggataggcggtggctatacgcagggagatgtgaggaggtgaattcagttattaatggtatcttgtgagggtatctgcaggtatttgggggctgctgggggactgtgctatcctctgacctagccatttctgcttcctctgccagctggagattcacattttacctgattgccttcattgccggcatggccgtcattgtggatgtgagtggggattactgggaggtgggagtaggttctctggcaaggtcaggtgaggccatggaatttgggttcctcctcttttaacttctcaccatctctctgcagaaaccctggttctatgacatgaagaaagtttgggagggatatcccatacaggtatgagttctgcttcctcatgtgggggtggactaagacacaccctagtgaagagacggtttgtggaatccatggcagagggattagagtgatggaatgaagaacctcaggggctagggggtttgtggagtggggacacccttgcggctggttgctcttacctctctctcctctcccagagcactatcccttcccagtattggtactacatgattgaactttccttctactggtccctgctcttcagcattgcctctgatgtcaagcgaaaggtgggtgaaggggttgtgcaattaagcctcagagccaaaatgaggccctgggatgaacaccctctcctttgacttctgggtactctgaatggagctgttggtatatggggaaccaaaggcaaggggtaagaaggcatagtgagagctggggaataaaaaaaggccctggggcctgcatcatctctgcaggatttcaaggaacagatcatccaccatgtggccaccatcattctcatcagcttttcctggtttgccaattacatccgagctgggactctaatcatggctctgcatgactcttccgattacctgctggaggtcaggcttcctcaaatctagagaccctggtgcaggttcttctgtccctttggttttctttgggagggaggtgcggggtgggaatttggaggatgacattcctgggaccaaggaggagggcacagagtcagtgctcctaactggagtgtacatatgaatgtactcgagggagtcaggagcccatgatgatggatgggggctctctatgcagtcagccaagatgtttaactacgcgggatggaagaacacctgcaacaacatcttcatcgtcttcgccattgtttttatcatcacccgactggtcatcctgcccttctggtgagtaggcagctaggctacactcctgttctgaagaaatcaggagccttgcctttcttcccctcctgtatctccccggtgtctgacctgctcttgtccacgttctctctctccttgaatcctcaggatcctgcattgcaccctggtgtacccactggagctctatcctgccttctttggctattacttcttcaattccatgatgggagttctacagctgctgcatatcttctgggcctacctcattttgcgcatggcccacaagttcataactggaaaggtgaagccctgttcccattgtgtaggccttactactctctacaacttcctgaactcccatcttgccagtaactctctaaaaaactagtgtggagccctgggtataacaggaacaagccctcagagagaagcagtacttaggggtttgaggatctcatgtaataacccttcttgtcccttttccacagctggtagaagatgaacgcagtgaccgggaagaaacagagagctcagagggggaggaggctgcagctgggggaggagcaaagagccggcccctagccaatggccaccccatcctcaataacaaccatcgtaagaatgactgaaccattactccagctgcctcccagattaatgcataaagccaaggaactaccccgctccctgcgctatagggtcactttaagctctggggaaaaaggagaaagtgagaggagagttctctgcatcctccctccttgcttgtcacccagttgcctttaaaccaaattctaaccagcctatccccaggtagggggacgttggttatattctgttagagggggacggtcgtattttcctccctacccgccaagtcatcctttctactgcttttgaggccctccctcagctctctgtgggtaggggttacaattcacattccttattctgagaatttggccccagctgtttgcctttgactccctgacctccagagccagggttgtgccttattgtcccatctgtgggcctcattctgccaaagctggaccaaggctaacctttctaagctccctaacttgggccagaaaccaaagctgagcttttaactttctccctctatgacacaaatgaattgagggtaggaggagggtgcacataacccttaccctacctctgccaaaaagtgggggctgtactggggactgctcggatgatctttcttagtgctacttctttcagctgtccctgtagcgacaggtctaagatctgactgcctcctcctttctctggcctcttcccccttccctcttctcttcagctaggctagctggtttggagtagaatggcaactaattctaatttttatttattaaatatttggggttttggttttaaagccagaattacggctagcacctagcatttcagcagagggaccattttagaccaaaatgtactgttaatgggttttttttaaaaattaaaagattaaataaaaaatattaaataaaacatggcaataagtgtcagactattaggaattgagaagggggatcaactaaataaacgaagagagtctttcttatgccttccttgcagttatgtaatattttcttttttaaatttcacatgcatgtaatttgagcactttgaggggccaaggagggtggatcactagaggtcaggagtttgagaccagcctggccaacatggcgaaaccccatctctactaaaaatacatctagctgggtgtggtggcgggcgactgtaatctcagctacttaggaggctgaggcaggagaatcacctgaacccgggaggc

SEQ ID NO: 56080 - DNA, 1079 bp, Homo sapiens
ctgtccctctcccctggagccccttcctgtcttcctctccctactctctgtcccaatcctgacaccccttcttctagaatctcttcttgtgctcttccaaggaagttcagtgaccaattgttaaatccgatacaggggagaggagccacatctggacgcccagccggggagcgtcggcagaggccgaagcacgagtcagactgcattctgctgtagctctgccccagtgccaggctggcctgccccttcttccagaggctatggctagttggcttgctcccccgcctccacccctgagatgtgctggataacttatttatggactgttggggatgagagcaggcaacaaatgccaaggtcagacttggtaatgtccttgacctcacgtgctgctgccttctctgcctcccatccagggcaacactaggattggtgggtttctggttctcaactcccggtccctgaatagtcacacgtatgtacagactgaggctctggggtgaggtccctatccagaatgcatctcttctgcttcccatccctgctgcctggatgctcctgatcacctaggcaggcctgtctccagttgtttcagagcttaatttgggtttctatctcttatttgtaatgccttcctggggtttggaaataaaacttctggccgggcacggtggctcactcctgtaatctcaacaatttgagaggccaaggtgggcggatcacctgaggttaggagttcgagaccagcctgcccaaaaaggtgaaaccccgtctctactaaaaatacaagaaattagctgggcgtcatggtgggcgcctgtaatcccagctactcgggaggctgaggcaggagaatcacttgaacctgggaggtgaaagttgcagtgagccgagatcgcaccattgcactccagcctgggcgacaagagcaaaactgtctaaaaaaaaaaaaaaccttctttcctgagatctgttgtttgccttaccctgaagcaatagggttaagtatttgacccaattgaagaatgcaaaaagcgggaggtgggtcagaggcaggaaggtggttacctgtcatttct

SEQ ID NO: 56081 - DNA, 1019 bp, Homo sapiens
tcacccaggctggagtgcaatggtgggatctcggctcactgcaacctccgcctcccgggttcaagcaattctccctgcctcagcctctggagtagctgagattacaggcacctgccaccacacccggctaatttttgtgctttttagtttcaccatgcttgccaggctggtctcgaacccctgacctgaggtgattcgcccaccttggcctcccaaagtgctgggatcataggtgtgagccaccgcgctcggcctattctcatttttatatgaggaaaatgaggcttagagggtccaaagtcctgcaacaagtaagaagcagagctggaattcaaccccaaagtctgtgatcttttcaaatagtagttctgcattcaaacagagaacaaatagtgcaaagggcagagctgggaatgtgcacatcatggtttgcgggtggtgaatagtccagtcaggccggggtgacagtgggtgttgacaggggagaggaatgctgctgcctcccttggtcactccagttccaagatttgctacaagtcccaaagtattccttttgtattcattccttttggttactgtctaggtttggctgagcgcaaggggttcattgttcaccttcctctgtagatggtttctcctgacttcagaaccataccactgtatttggtccctactttgtgcttttctgcttagcattctcttcatggtaaggatctaactgaacctgattcagctgctgcttgcagtgaagcaacactgatgtaaataagcgtggaaaggttctccagcatctctttggaccctgcagtaggtctctcctgcttgctctgccttttctccactgctcttatgtttttcctccagtcagggccatatgcctcatgtttatatagtttcctctctagagaacactcgctccccctaactgcttcagtgagcaagttatttctgcagcctcttatctcaagtgctttgctgtcactttggtccacagccatttgggcagttcttggtctcca

SEQ ID NO: 56082 - DNA, 1207 bp, Homo sapiens
atcttaaaaaaaaaaaaaaatagctgggcgtggtggctcgcgcctgtaagtcccagctacttgggaggctgaggcaggagaatcgcttgaacctaggaggtggaggttgcagtgagccaagatcgcgccactgcgctccagtctgagcgacagagtgatgctctgtctcaaaaaaaaaaaaaaaaaaattagccaggccgggcgtggtggctcacgcctgtaatcccagcactttgggaggctgaggcgggcagaatcacctgaggtcaggagtttgagaccagcctgaccaacatggagaaaccccatctctactaaaaatacaaaattagccaggcgtggtggcacatgcctgtaatcccagctactcaggaggctgaggcaggagaattgcttgaacatgggagccagaggttgcggtgagccgagatcatgccatcgcactccagcctgtgcaacaagagcgaaactccgtctcaaaaaaaaattttttttaatctataaatatctcaataatgtctgtttaacaaatgtacacatttataataattccatccctaatttactactggaaaaaactaccaaaaaagcaacacgattatgtgactttcctaagtctgtttggctcctgctaatatttttttcttgagcacattgtggttatagcaggatactgacagaaggcagcctgagagagcattatccatctatggattcattcagtaataaactttcctttttttttcttttttttttttgagacagagttttctcttgttgcctaggttggagtgcaatagtgcaatctaggctcactgcaacctccgcctcccgggataattttgtgtgtgtgtgtgtgtgtgtgtttttagtagagatggggcttcaccatgttggtcaggctggtcttcaactcctgacctcaggtgatccgcccacctcggactcccaaagtgctgggattacaggtatgagccaccgtgccaccaccttttttttttttaagagatggtgtctctctcgctctgtctcctaggctagagtacagcggcatcatcataaccttgagctcctgggttcaaggaatcctcccgcctcagcctcctgtgtaaaagcatcattcctggctaatttttttttttttttttttgaaactgagttttgttcttgttgcccaggctggagtgcaatggcaccatctcggctc

SEQ ID NO: 56083 - DNA, 1412 bp, Homo sapiens
tgccaccatgcctgactaatttttgtatttttagtagagatggggtttcaccatgttagccaggcaggtctcgaactcctgacctcaagtgatccacctgccttggccttccgaagtgctggaattacaagcctgagccactgcacctggccaagaactgcagtttttaaagtcaggtagatgtgcttttctgttctaggtttgcctcttactcactctttgagctaaggcaagtcagttgacttctgcatctggaaatggcataatagtacctactgctaattctgctatgatcattaaacgtaatatcatgtgtaaagcacactcctggagcagagtaagcactttgtaaatagtggctcttactaatcctgtcagtaagaaaagggtgctttggccattagaagtacctcttccacgttcctgaatcttctcccctctgtgctgctcttttaaagctgtgtggatttctaatgactctaccattgtctaggttgcccctatgcttggaaacaggagtccttctctctctgttttgtttttgtgtgtgtgtgtgtgtgtttttttttttttttgagatgtctcactctgttgaccaggctggagtggtacaatggcactatctcagctcactgcaacctctgcctcccgggttcaagcaatcctcccagcctcccaagtagctgcggctacaggcacaccaccatggctagctaattttttttgtattttttgtagggacagagtctcgctatgttgcccaggctggtctcgaactcctggactcaagtgatccaccagcctcagcttcccagagttctggaattgcaggtgtgggccactatgcccagccaggagtccttttcttacagtctactctaccatctcctctctttctcctatgttaggggtagtataatatattgatttagaacactggctttggtgacagctctgggctcagtgtcagttttgcttcatgcaaattatgaccttaggcaagttacctgatcattgaagcctcagtttccctgcatgtaagtgagggtaatagtgataccagtcttattttgttcaattcattctttcttcctccatccctcttctggcctctagataaattctagttccatcctagttcaagttcttgagcacatttatacacttggaaacgacactagattagaagctggggttcctcggttctggtttaactgccatcatctgcatgattttactcacaaccatcttacttcgctttagttactttaataataaaatgaaatatacaatctaaactgtttcctctgtttttaaaatactgtgtatggctgggtatggtagctcatgcctgtaatcccagaactttgggaggctgagctgggcagatcacctgagctcaggagtttgag

SEQ ID NO: 56084 - DNA, 2279 bp, Homo sapiens
cctggaacgctcccactctccacccctgaagctgacccctgcctcaagtacccaccctaacctccatgcctatcttcaaggcaacacccaggtctctcgaaagaaacttctgcccctgctccaggaagccctgtcagcatattttgactccatgaagatcccttcaggacagcctgagacagcagatgtgtccagggagcaagtggacaaggaattggacagggcaagtaactccctgatttctggcctgagtcaagatgaggaggaccctccgctgcccccgacgcccatgaacagcttggtggatgagtgccctctagatcaggggctgcctaaactctctgctgaggccgtcttcgagaagtgcagtcagatctcactgtcacagtctaccacagcctccctgtccaagaagtgactgttgagaggcgaggaggtagtgggtgaggctacctgactcacttcaaatgcatgttttgagatgtttggagattcagcaattctgtcttcattgctccaggatctggtatactgttctcataaaactgagaggagaaaaaaagtgaaagaaagcagctgctttaagaatggttttccaccttttccccctaatctctaccaatcagacacattttattatttaaatctgcacctctctctattttatttgccaggggcacgatgtgacatatctgcagtcccagcacagtgggacaaaaagaatttagaccccaaaagtgtcctcggcatggatcttgaacagaaccagtatctgtcatggaactgaacattcatcgatggtctccatgtattcatttattcacttgttcattcaagtatttattgaatacctgcctcaagctagagagaaaagagagtgcgctttggaaatttattccagttttcagcctacagcagattatcagctcggtgacttttctttctgccaccatttaggtgatggtgtttgattcagagatggctgaatttctattcttagcttattgtgactgtttcagatctagtttgggaacagattagaggccattgtcttctgtcctgatcaggtggcctggctgtttctttggatccctctgtcccagagccacccagaaccctgactcttgagaatcaagaaaacacccagaaaggccttaatgacctcataggcactcttccaaaaagacaacagaactggaatgagaggcctgggtctgtctcctgccttagcaggcctatcaatttcttgtcaatctctttttttccttgctcacattaaaaggaagcatggagttctaatgctcccataaactatgtattttggcaagacacttcactactccaggtctcactttccccatctgtaaaacagggtttggactaggtgttccctggtattctgtgatctgcctcttgctgccattctttctctcctctgcttctctgtatttttcttctgttatccctgggggtgctcaggttcacttgattgtctgtatttctgtgtggttgtagcaaggactcagcctcatgtagcacgaataggggtgtggttcatggcgtgttgacccagcagagcactccctcccactaacttgttctgcatgtgtagagtctccccattttttttaacgcaaccctttcccctttttcctaccccacagctctgttccatgtaagttgccaacagtttcactgaacagtggggtatgtgatggttttggcatgacatcttcagtatgagggggacagtttgacttcactttgagggtgtgatgtctgtagctatgtggaaggtaaaaatagtggtgtgatcatgaaccaaaggaatttatgttttgtaacttgggtactttattttgcattttgttatactattaaataattttttcctgtttgggggtcttactgtctttttttacaagtgtattcaggcctttctctgtgatagttgtttcagtctcctcaaaattgatcccccttcttcctactatacttaatgtcttctttctgttgactctttttgggaataaggagcaacaggcttctgtctcccctcatcctcagcctcccgttcaacttgtttattctcccagaaacctccttataacatacttccgtttccccagttttccttatgcttgaaaagtagatccaagataacagtcctagaaacacacacaatggtttctttttctttttttttttttttttgagatggagttttgctctttttgccctggctggagtgcaatggcacaatctcagcccactacaac

SEQ ID NO: 56085 - DNA, 1055 bp, Homo sapiens
aactcttattcggtgggaaacaaggttcctaatagggatagagttaagggcggaggcaacagcaggatgaggataattaagagaacctgaattaaatttttaatattttaaaaaaggaaagttgctgggaagctggtaaacagaaacagaagattagaggcctaactagaaagagacactggtgttagcagagagatattgaggggctgtaagcctaaggtttgaaatctaaagatagagtggaaaagggagtaggcacccccaccagcccctgcttgacatctgctttagttcattccagcaggaaggaggagaagggcagggaggtagggagcttctcagcaaagccagcttcagctttgataatctcacccacctaccccatttaaggagttccaggtttaagagtttaaaaacaggtggcacccagaccatcattcaggagacaggaactcattccaggttcctagagaactcctatctcagacctgagggtttccagggcttcagctgagctcctctggctaaccagtagtcacttgatcagtcctgctgccttgaccccatctccaggaggggctatggccagagggagtagagggagtccagcccccaagccttgtgaggcactgttaggcagatagggaaaagaggggtccttagatcactggttcaaggagggatctggtaggggcagcatttcttctgggctggaaacagaatgggggtttcaagatggcagaacctgaaataaaaaaaaagtttttcttaaagaagattagcctcaaagaaaaccaaggctttaggaagaaggcactacctagtgcagactttaagctatttccacagtgtgttctttacttctgtctgcacaacaccctctcagtctttctatatcctacattctttttttttttgagatggaatctcactctgttgcccaggctggagtgcagtggcgcaatctagactcactgcaacctccacctcccgagttcaagtgattcttcggcctcagccgcctgagtaactgggattacaggcgtgtgccatca

SEQ ID NO: 56086 - DNA, 1046 bp, Homo sapiens
cactatttcctcttcagagtcacttaaatgcccctccccttctgccctaaactcagagagaagggagctggagcttgtatcaccccaaactttgctaatttctgccactatcctttggtcctcgcccatcctcttaactctaagtgcttctagcccccttcctctcccttggtaccaccagccactgctccttaaccccttggtgtccttttggttctgttccttttttttagagtcaaactgaggttcatagtgtttgggaatgagtgttggtgtacaggtctagggcctctcagggaggactgggaagatataggctcatcaggaggtttctcaaggattgggggagggggagatttctcactgatctttctttttactttcttctaatccagggttccgagtctgaggaagacataaccttgtgcctgcctgcccacctctctctctggtcctgttcatctctcaggctctgagacactgaccttcactgctcagttaaaggttccagggattccactttgtctggacccatccagctgagtgaacccagggtggtggtgtatctggggagagtgaggagtgggttgtccaaacaccagggaaagagccctttggggcctcagacagcggagtgaagctggaaccatcagggaacatgagtgaattttggcacaaactgggctgctgtgtggtagagaaaccccagccggtgagtctccccaccccccatcctaacccaaagagcagtcagttactgtgtgctgtgaggtagccacaccatctaggatctgccatctaaaaaagcacacttcttgcctccctctgtgtcaggagcttctatggtcaggcagctgtatatgtggaacaaaggggactgggtgatggaagaagtgaatagtcctagctattacctcctgttcctgtccattctgagctgggtggggtttgtaggtggagctgcatacctgtcagttttccccattatttcatcatcagtcagaggtgactttgacatgtcctttctttgtccagtgttcactctg

SEQ ID NO: 56087 - DNA, 1041 bp, Homo sapiens
gcgccgggctccgagccggacgggtttcgtaatcgcgtcgccgccgcttccgccctcagccggccccacctctgccggctcgtactcggctcccccacctcgccgcagagctagcccgggaagcccacactggcggccacggagcagagtccctcacccccaccagctgtagctgaacgtctggatggtggagaagagcaggtgaggccgtgcagttggtcccctggcccgcctgccgcgccggccgggccaggcggagacacaccggatgcggggtgtgggggaggcgggtgtcctgggctgcagagatgctggggtggtgggaaaggggtgcgcgcccggggtggccgtagtcatccacgctcctggggtgcgcaggctgaggccgctgaagagtagaaggaaaagaaggaactggaatgttgggggaggtgggagggagagggtccgaaagattcccagagaggtcccagtccggttaagggttgagaacagcagagaacttctaggtagagttgtgtagtggggggagacagatacggaatctgtgtgattgaatatatttggggaggggaggcttagggcctagccctctttcctcttaagcccccagaagacctttcctggggaagggaaggttggtgttgggcctgtcacttggctgaaatatggagtccacaccgcttctccagagtccctcagcagccctccatgtctcggggtctccacacagggaccagctgctgccccgggcttctagccagaattgcccatgccattctctcgattctttctttctctccagctgcttcatgtgagggcttgtcaggccgcgggttggaggccttagggccagaggcggtgggaccgggagaaccggtttggggcccgaacaggaccagagaactagcctgtacatccttcctccctggcacctctttcccatcccttctgctcacctcccaacagctctgagaccctcaagtcctagtatgatcttggtgggggcggggggtggctttcccggttccatatttcact

SEQ ID NO: 56088 - DNA, 1048 bp, Homo sapiens
aagcaaattttatgaaatattaactcaaaaggcctaaaatctctatgtcattgacccagagacatgtacacagggtaccaaatacattcaagaaagacatgcatgcaaacatacgtggcattaaaatcaagtcaagaacataaagtaatactacacagaaaattgaagttaaaatgctattcactaatgtaagtagtaatgacatttttgatttaatatagtatggatttaattatcaaatactccaaatttcgcaaaagatccttttttggctagcttccccttcccctccacaaatgctctccagccctacttcatctatctttacatctttcattatcttaaatggtatcatttacttaaagggttttgacagtgccttgtaccacaatatatgttcaataaatgcttcccactatccttcactttaaattatccgggtattttaggcaaaggcaatatctaattatcactctgttcttagagatacatgattagcaaatgtatagattagaaagatacactctcggagccacacagacacgcccaaatatcctttgtccagaccctttgtgggcatccaaggcctactcaacagggccttgctgtgtcatgctgccaccatggggaagggggaaggacaaggtggtggtggtggtagaggggagcagaacctctctgacatctcataatgtgtgcctcagtcagagcttggattttcctactagcattcctccaccaattccactgagctgcaaatcattcttttccagaatctgtccccatacctagctcctgtgggctatactgatttcactatggaatcaggcagttctccaacacagaggcccccacctttcctaccctaggctgcctctttctttggagcaaagattcgaggtggaatgaaagagattatccaaagaaaggtcaggattacacccaacattatcccatataaccccctcccaaactccctcctacagagaaacatagaacactacagaaaaaaattgcaagtatagggaagtagaggacagagagatac

SEQ ID NO: 56089 - DNA, 1071 bp, Homo sapiens
cccatggtggcagcatgacacagcaaggccctgttgagtaggccttggatgcccacaaagggtctggacaaaggatatttgggcgtgtctgtgtggctccgagagtgtatctttctaatctatacatttgctaatcatgtatctctaagaacagagtgataattagatattgcctttgcctaaaatacccggataatttaaagtgaaggatagtgggaagcatttattgaacatatattgtggtacaaggcactgtcaaaaccctttaagtaaatgataccatttaagataatgaaagatgtaaagatagatgaagtagggctggagagcatttgtggaggggaaggggaagctagccaaaaaaggatcttttgcgaaatttggagtatttgataattaaatccatactatattaaatcaaaaatgtcattactacttacattagtgaatagcattttaacttcaattttctgtgtagtattactttatgttcttgacttgattttaatgccacgtatgtttgcatgcatgtctttcttgaatgtatttggtaccctgtgtacatgtctctgggtcaatgacatagagattttaggccttttgagttaatatttcataaaatttgctttagctttttaaattgcaagatagctctaccaaacactcagggactgtttgagcagttttttatacatactctggttgtaagaaaaggagtcagtttgtcgaagagcttttttttttttctcagattctagcttgctctactgccctttgcttttccccattcagatcacaattacaggaacaatcacctaaaccacggaaaatctattcttcagcaactaaaaattcttttaagttttgggaatactggtatagggttatataaagctgttggcaactatccatgtacaacacaaaaagggatcagattgggaattatgagatctggattctatacaaactggctggaagtcttcccaagtcattaatttctaagatgtcttctagttttaaaattctatgattttttccccccatgattctattttttttttttttttaaga

SEQ ID NO: 56090 - DNA, 1088 bp, Homo sapiens
gaagcttgtccaagggaacttggattctctccagaggcaattggggatggtgagtttcttttttttcctccccaaattcctttttactggtgggattggaggatatacaattttctttctttaatagaaaaaaaaaaaaaaaagaaattcctttttaccagtatgtggagtatctaagcaaggaaaggccatgggccacaaagaagttgctgtagcatgaagactgacaagtggtttctttctaggaagctatgagggaccctgtgagtagccagtacagttcctttcttttctggaggatgcccatcccagaactggatctgtcggagctggaaggcctgggtctgtcagatacagccacctacaaggtcaaagacagcagcgttggcaaaatgatcgggcaagcaactgcagcagaccaggagaaaaaccctgaaggtgatggcctccttgagtacagcaccttcaacttctggagagctcccattgccagcatccactccttcgaactggacttgctctaaggccaagacttctctctcccatcaccttgccctcattgtcttccctctcaagccccttcctttccactcctttcccattttaatcttgttctctccctactgtgttggtggtgctgatgaatctgccagagttgagttctatgtatttatttatctatctgtctactccatttctctcaaaagccctcaagtcacaaagtaaatggttcaagcaatggagtactgggtcacagggattcctcctttcccccccaaatattaactccagaaactaggcctgactggggacacctgagagtagtatagtagtgcaaaatggaagactgatttttgactctattataatcagcttcagagattccttaaaccttcctaatttcctgctccagggcagtaaacacaaatatttcttcaaggggtgatgaaaacctcggaagttttaatttgaggttatctgctacgaaacagtatttctaaaaggctaaagtgataagtctcttgcttttttttgatcctgctcttatattcttttttttcctcagagaaatcaggagggtagttaga

SEQ ID NO: 56091 - DNA, 1057 bp, Homo sapiens
ctaaaatacaaaagaaattagccgggcatggcagcgtgcgcctatagtcccagctacttgggaggctgaggcaggaaccctggaggcggaggttgcagtgagccgagatcgcaccactgcactccagcctgggcgacagagtgggactccgtctcaaaaaaaaataaaaagagagagagagagacagagaaagcaagcaagcaagccatttctgctgcattttcagtatttttttttaattgacaggtggtctatatactggttagtcccttgaactttcaattctttgtttagagccctttcataactggactttttaaagtagtgattatgtttgtagaaaattgcttctgaaagtaataaagataagctacttttcaccaaaattgaacagatatccctggaagcaaaagtacagcatatggagcgagactttaaaatctggcacttatttatttgcttgttatatattctctcaggaattttttcaatggccgaatggaacaagtagttggacaaaactctagagaatattgttctctatagatactctgcagggatctcttgctagcacactgacttgtagataattaatcataaaatgttagtgctggaaattactttttaggctattcaggtcaactccctcatttttcttttttctttttttgagacggagtctcactctgtcgcccaggctggagtataatgacaccaacttggcttaccgcaatcttggcctcctgggttcaagcaattctcctgcctcagcctcccgagtagctgggattacaagcacctgccaccacgcccagctgatatttttgcatttagtagagacagggtttcaccatgttggccaagctggtctcaaactcctgacctcaagtggtccacccgcctcagcctcccaaagtggtaggattacaggcatgagccaccgtgcctggcctgactccctcatttttcaaatgaaaaaaacaagattcatagaggttgattgaattgtctagaagtttttgcaaatgatacacctttgctttcctgaagtaggaac

SEQ ID NO: 56092 - DNA, 1008 bp, Homo sapiens
gctgttcagtaactgtgtaactaaagctaataagtgttcttgggctgggcacggtggctcaagcctgtaatcctaccactttaggaggccaaggtgggcgatttgcctgagcccacaagttctagaccaacttgggcaacatggcaaaaccctctactaaaaatacaaaaaattagctgggcgtggtggcgtgtgcctgtaatcccagctgctcgggagggtgagtcatgagaattgcctgaacccaggaggtggaggttgcaatgagccaagatcgtgccactgcactccagcctgggtggcagagtgagactgtctcaaaaaaaaaaaaaagaaagacagaaaagaaaagctaataagtgttctgattgaaatatcctgccttgtttgataggaagcaatgcagaatcaggtgaatgttaatccagagagagccaaccctgtgactgaccctgtgagtatggctgctccattcatcttcacgtcgggtgaggttgttaacctcgcaagccttatttcttcaaccaacaccaaaacaacctcaggtaatgttctgataacatgaaatttattttagactcaaaaaagaacagaaccctagattttccaggagatgaatggataccctttctaatactccttaattaaaatattgccaaagcagaagatttgtaatagattttaaagctgaggtacttattctttctggggaagggaagatcatacatagggattacaaaggaatacttattgtgttaaaagtaaaatattctggcttgggcacagtggctcatatctgtaatcccaatgctttgggaggccaaggtgggaagattgcttgaggccaccctggactggacaacatagcaagaccccatcctctactaaaaataaattggatgggcatggtgatgcatacctgcagtcccagctactcaggaggctgacatgggaggatctcgtgagctcaggagttggacttactgtgagttataattgtgccactgt

SEQ ID NO: 56093 - DNA, 1047 bp, Homo sapiens
tcctcccaccttagcctcccaacatgctagaattataggtgtgagccaccttgccctgccatttctgggcggattgataagctaattggccataggtgacctagagtcagacaccttcatataagagcttcagacttgggacttacttgcatggcttccaagcctgcaaatctatacccttcctttttgagccattctcagtgctctattaatcctttttgtttctccctgaagggccatgccttacctgttgattcgaaaattcaaagagatattaaaaataatatatcaaggaatatattttactttctctttctttgcttttttgttgagatggggtcttgctgtgttgtctaggctagtcttgaactcctggattcaagaagtcctccagtcagctgcctgagtagctaggaccacaggcacacaccactgtacccaacctagaatatattttagtttattttctaattaaaagcaagcaaaacctctttgttttattatgcattcatcacctccaattggtgtcctttgacttgtagttctaactgtacctgctggtaaggttgcagaggagactgtaattaaagaggaagaagaagagaagttgccactaacaaagaaaccaaggataggagagaagacaaacagtgtggaggaaagcaaggtaatgtttttaggagtgatgaaaagaatttaaagccttaattattaaggcctgaacccttcttcatcttttcttttttctttttgagacggagtcttgctgtgttgcccaggctggagtacagtggcatgatctcagctcactgcaacctccgcctcccgggctcaagtgattctcatgcctcagcctcctgagtagctgggattacaggcacctgccaccatgcctggctaatttttgtatttttagtagagacagggttttgccatgttggccaagttggtctcgaactcttgacctcagataatctgcctacctctgcctcccaaagtgcttggattataggtgtgaggcaccgctcctggcctgtctttttgtct

SEQ ID NO: 56094 - DNA, 1138 bp, Homo sapiens
gataatttatgatcaggaatttacctggtggtgacatggcttacttttacaggaaggcaatgaaagagagctactacagcaacaactccaggaggccaatcgaagagcccaggaataccgacaccagctcctaaagaaagagcaggaagcagaacagtaccgtcttaagctggaggccatagcccgacagcagcccaatggagttgatttcaccatggttgaagaggtggctgaggtagatgctgtagtagtcacagagggggagttggaagagagagagacaaaagtgactgggtcagcagggaccacagagcctcacactagagtttccatggcaactgtttcatcttaatatgcaagggccacaatttgcactgtgttcatattaatcctcttttaaaaaaggaaatatacagaagacaaacattgtataaaaactaagagtgtctttaagaagaaaactatagcagggtacaatgcttgggctcaggaagtttctctgtgcaactagaaaattcaaagccatatttagggaacattttttctgaggggccaaaagaataaaggaccaaatttcttagctcatatcattgctttaaacatagaagtaaaagaatactgcatgttgtgggttgattttttttttttaaataactgactttctcacaaaagattttaagataacatttctaatatatatgcaccaatatatatgcctttaataattataccatcaagtgacctgaaaatgccccttagatttatgatgcgtatctgttggaaaaaccaattggaagggaagttagacaagctttggggaagagaaaaggaatatagtccatttccaaaggagcaggaactcccaaccttaagttaatttcactgaagagaattttccctttttttttttttttttgagacacggtctgactctgtcacccaggctagagtacagtggtgcaatcttggctcactgcaacctccgcctccagggcgcagcctcctgagtagctgggaggacaggcatatgccaccacatcactgagaagaaatttttgattgtctgacagatacttatccattatgtgtctatagttcagatgcttgtgtaagaaactgaaataagctgcgtgtggtg

SEQ ID NO: 56095 - DNA, 1551 bp, Homo sapiens
cagacccggcagctcatgcctgtaatcccagcactttgggaggctgaggtgggtggatcatgaggtcaggagttcaagaccagcctggccgagatggtgaaaccctactaaaaatacaaaaattcacctggcgaggtggcaggcacctggaatcccagctactcgggaggctgaggcggtagaatcacttgaacccaggtgacagaggttgcagtgatccaagatcatgccactgcactccagcctgggcgatagagtgagactctgtctcaaacaaacaaaacaaaacaaaattagctgggtgtggtggcacatgcctgtaatcccagctactcaggaggctgaggcaggagaatcgcttgaacccgggaggcggcagttgcaatgagccgagatggcaccattgcactccaacctgggcaacaagagtgaaactcaattaaaaaaaaaatagaaaagaaagaaaacttgtttatgtgggaggagtatatataaaaccaaaatccaggctgtgtttccacagtgctgggaagtggccagaaaaaggcttataggggctatgaaactctggtcttgacatataaactttgctctgactggatttcataaaattacagtgaggagggtagtctcttgtcagaaaaacttgtttccaaacatttatgtaatgtcaagctcagtctctcttttttttttttttttttttgagacggagtcttgctcttgttgcccaggctggagtgcaatggtgtgatctcaactcaccgcaacttccacctcccggtttcaagctattctcctgcctcagcctcccgagtagctgggattacaggcacgcgccaccacgcccggctaattttgtatattcagtagagacagggtttctctatgttggtcaggctggtctggaactcctggcctcaggtgatccacccgccttggcctcccaaaatgctgagattacaggcgtgagccaccccgcgcacagcctagactctaattttataaaactttgttgaattttctaagtgtcatttaggacatattgtgcttttctgtggagcttatatcttatcctcttatgtgcaacaaaaagggggtcggaggtaaatgctgatgatgttgtttagttttatttccttttgatctggcatgagtaaattgctctgtttccttaagcttgggtctgttacagagctttgtgccttatagggtgctcagtgtgtgttgacaaagggaataagaactgtcagtgccataaagaaccaaagattctggctactttgtcttcttcctttctctcccactatgcctacacttcctctgcccagacacttttggaaagtgtttaactgctgggttttctttttctttttctttttttttttgagacggagtttcactcttgttgcccaggctggagtgcaatggcgtgatcttggctcaccgcaacctctacctcctgggttcaagtgattctcctgcctcagcctcccgagtagctgggactacaggcatgcgccacaatgcctggctaattttgtattttta

SEQ ID NO: 56096 - DNA, 1801 bp, Homo sapiens
ctcgacctcccaaagtgctgggattataggcgtgagccactgcgcctgaccacctacctgctgggttttctttgtatgtcagcatggagtttttcccaaagaaagggaatatggatggagagagagaggttatgaacaggttatgttacagaggttattgcctttgaaactgggccctcatcattctagacttgcttgctttgttataaattagaagaaaccagagggagatgtgccaagtaaacattcgaatgactgtttagaatatggttttcttaattagcagtcatggggaaaacatgcatttttaatttggaaaaaacctgacagttaacatggttctgtttaccttgattagtgaagtaatttgctgcagtgttacagaggagcagaatcacttgggtctcaaaatagactgaaaatttaactccccaaaccaaatttaacaaacagaattggttattagagatttataggcaaaaatatcagtttggaaattaaccttggctactggccaccttagctaggttttctccacagatctgttttctccacagatctgagtacttaacacttcccagatgattggagaatattctgggctgttggggatgacaggaaaatgtgagggggagtagcctaggtaagggtgatgatgaaattgttctatctgctgtcaaataatcttttcctgtttgcaatgtttttattttttctgagtccctttgggaaccaggtgctaacaagaagctgttatgtgtgggatttcggagccttactttaacgatagaggaaccaagtatcattttagatatcttttatttatgttctcggtgcatatgttgactttaatccctcttcccccacacctcgcccattaaggggaaggaggttaactctgcagatgatattcaggcccaaccagctcactctctggggtggctactgactaaaggcagagaatgtccatccaacatgcccttctgactatacagtcaccacttttttgggggaattctttagcagatcttattgttctttctgcagaagctatcattcctacctccccaacccccaaaatctctaatacaggccaagtcattttttatgatgggtctctgagatagggcagtttgttagaggagaggctagggtagagagggagagaatggaggtatctgaaaataagtaagaaaaaggcattgatttttatttactcggaacggtcctcttggcatcccagataagggaaataggatttgatctccaattgtattgccatggagagaatggcaggtgaggatgctttgaagtagttagaaattaaatattgaatacattaatggcaataccatttcatgactttgcatatctttctggattagtcatggaagttggggaaatattgcttagatcttctgggttagaggattccaactgtttattggcaaggttggattattaagaatcaaatagcagacaaaaatggctgggcacggtggctcacgcctgtaatcccagcactttgagaggctgaggtgggtagatcacttgaggtgaggagttcgagaccagcctggccgacatggcaaaaccctgtctctaccaaaatacaaaaattagttgggcatgatggcatacgcctgtagtcccagctactctggaggctgaaacaggagaattgcttgaacccaaaaggtggagtttacagtgagctgagattgtgccactgcactccagcctgggcaatagagcgagactctgtctcaaaaaaaaaaaaaaaagaaggaaagaaagaaaa

SEQ ID NO: 56097 - DNA, 1301 bp, Homo sapiens
atttgatgcatttactgaactcttcctgaaagtttaatatggagtgggaatcagtttttgtcctaatttattagagaaggcttcctcttctctactccttgtgcaaacccatctctggatagctagaaaaggaacttcagaatggactatatgtgatgaccacctgtatgcactctaggctcttatctgtctctattttatgtggtgactatatctcagaagtactaccccttctgagtagtactattatttcctatgccaattttttttaagtctctgatgctgccctttttaaatttttgtcttattttttagcctctttagtattagggggtgaggtgacattcctagactctacagtagcagtttggcatgttagtgacaggaaattgtgattccctatctccccctcctcctaccttttctgcttttgtgattccattgttcctatctcattgaggctttcccaggcattcgaatttagttagtaggtcatttctaatctctgggccttgtcttttctctctccgttcccctccttccctaccacatattttttgtttattctgaggtggtttgtttctgaaagttaatctaggtcaccttctatatcctgtgctttctagttggctttagacatcttgttctagcaacaatgatggtagcagctctctccctgaccttgccccatgtgctgtccttctgtcaaggccatttgtgtgtgtactgcggcaggtgtgtgtgtggggggatgcgcccagactgttctcacaatgtcctcagtttttcaggttgtctgacagctttatgtacagcgtatttttagaaaaacttaaatatacttctttatttagggttttattctgatgagcaagtttgtgtgtatatgtgtgtatgagcatttgtatgtatatatacttatacagatctatattatatatacagtttttgtactatcatttaaaataaaaatgtttctcaataaaatgtcaaagccgaccatttcagggtgtcattgaatttgttttcatctcctgggcaaaatttgtatctattctcttttttttttttttttttgagacggagtctcgctctgtcgcccaggctggagtgcagtggcgggatctcggctcactgcaagctccgcctcccgggttcacgccattctcctgcgtcagcctcccaagtagctgggactacaggcgcccgccactacgtccggctaatttttttgtatttttagtagagacggggtttcaccgttttagccgggatggtctcgatctcctgacctcgtgatc

SEQ ID NO: 56098 - DNA, 1043 bp, Homo sapiens
aggtgagaagcccgtctcctcagtgagccagcatttcagggggagctggcggactcccactccccgctcccttccagccaagctgccttaactcgcccctcggggctcccccagagactgtgccccgggcgggccgcgcgcgctgtgtccagagtcctcgggccttctgggtctgggacgtgcctctcctactgtgtaggagcctccgcttcccaatacagccgtgtctgcagccactgcctgacttcactcgggcgggggagggcggcagtcggtcggctcgctctgggcgccctcgctctctgccttcatctgggccctgggctctcccgggtaatgggatggctgcggtcccgccggggggcagtctggaaaggtttcctaaaggagacgagcgaattaacggtgtcgaggtgagccagggccagggggaccccggtaaagtttagttgaggctggggaaggccctcggagctcgtttccagatcgaggtaagagggactttcttaaaggcctagtctatgggatggggcggcggagggaattttttgagaaataaaatgaagctgcagtgtacgttacttgaagttccacatcagaaaatcttgtccttaggagaatttgtctggcagattttgggttgcatgaggggtaggctacaaaaaacagcaaagtattcgtccctgttggaggcaagggtctgcccccggctcttacttaaggagcgggacgggggacgagagcgtgcgcggcgtcacacgcacgcttagccaccccccaagaagccgccgccgcgctcaagctccgcgcgctcaggaccaggtagcgtgtagctgtcgtgaagctccctttgctccggttgggactggctgcggatacctgtccgttatccccggcaccaatgagagggacgaacaggaccacctgcaccgcccaccaccctcgctaacaacgctttaaggcctaacgcaggaggcagctggtgcgaatttacaaatcgggtttttcacccccgcgtggctgcaatgtccgcccagttcgag

SEQ ID NO: 56099 - DNA, 1052 bp, Homo sapiens
cttatggtgagtcctcttgtcccaacctcaccttcccttgctcagcccacatacctgagtgtgtgtcctgtagcagcagcagagcagcattctgaataccctgggagtatcggaaaagggtcggcatcctccagatacccagcatgtagctcagtacttggcacacagtagggtactttttgaacaaataaatcaatgtcctgcatgatgagcccttccccaggcccagaagaaactagaggctggcgttctggactcctgggttccacaggagggaggaaggacccctggaagggtgtcaggggtagagatcaagagcctcactggctctgacctggtctctgccaccagtgcttccgggtcctggcccttcccctgggacccccagtcctcccagtgatgcccacccccggccccagtcttccactcttggagttcacactcggggtaagggggctacttgggagagataggagtgaagtgtggggctgctgattctcggagcgttctaagcccctcactgaatggtgtttggtgctcactaacgcctgtttggagcctcccttccccagaattgggcatcccagccccgagttctcctgcacgagcagtttttggcagttgctcttggcatggctacaggggccagaagtgggatggggaatccccaggcccaagctctggcctgagtgtgaggggtagtgcgtgggctgtatgctgaggagtcaggagaggtgaatcctgaggatggtggaggctgtaggagtgaggctgagtagcagcgggagggacgatgatgtcaggcctgggaactgccggcgcctctgggcctaggtaccccgcaccgcctccccttggctgagcctccctcctccctctcggtcggcaggcgtgcgccgggacctgcccccagcctcggcctcccgctccgtccccatcccactcctcctggccagtgtggccgcagcttttgccctgggcgcctcagtctctggcctcctggtctcctgtgcttgtcgccgcgcccaccgacgtcggggcaaggacatcga

SEQ ID NO: 56100 - DNA, 1023 bp, Homo sapiens
gccccaagccctctgaccccacatcctgcttgtccctcacccttgacccaagttgacctaccatgccatacccttcattcactgtgcccctcacattgctcccttggtgctctttttttttttttttttgagacggagtcttgctctgtcgcccaggctggagtgcagtggcgccatcttggctcactgcaagctccgcctcctggcttcacgccattctcctgcctcagcctcccgagcagctgggactacaggtgcccaccaccatgcccggctaatttgtttgtatttttagtagagatggggtttcaccatgttagccaggatggtctcgatctcctgacctcgtgatccacccacctcagcctcccaaagtgttgggattacaggcgtgagccaccgcgcccagccccttactgctcttaactcaccacactccttgcatgcagctggccctgtgggtctgtctcaccattgtctactccactctcctcccctaggtgcagttctcccgcgtagcccgagtatgtaaacgtgacatgggcggctcgcctcgggccttggaccgccactggacatccttcctgaagcttcggctcaactgctctgtccctggggactctactttctattttgatgttttacaggccttgactgggcctgtgaacctgcatggccgctctgctctctttggggtcttcaccacccagaccaataggttggtactaggctgactagtgtgacccaatctgtcccctgcctcaccagcctccaaactcccctttcacagcctactgatggggcagttaagggaacctccgaacaaagccagtttgctgtgttgccattttttctcctagtgtggcacccagtggctgccccacctcctcagtctctatctcttaatgtggtatgaagggtgccaccacttcttcctgggggaagttgtgcagttcctttcagcacctatcctgcatcttttctggctcctccagcatccctggctctgccgtctgcgccttc

SEQ ID NO: 56101 - DNA, 1067 bp, Homo sapiens
tgcctggctaacatggtggaaccccgtttctactaaaaatacaaaaaattagccaggcttggtggcgtgtgcctgtaaccccagctacttgggtggctgaggcaggagaattgcttgaacccaggaggcggaggttgcagtgagccgagatcgcgccatttcactctagcatgggcaacaagagtgaagctccgtctcaaaaaacaaaaaacaaaagtcttctacctcatggaattatttagggattaaatgaggttatacatgtaaagtgctgagaagactgtatggcacaaagtaaatgctttatatgtgtttcctgttattcttagctacatagagaaggtctaatactagttcagtggttcccaacacctcttactcgcctctctaccactggtaccacccaccaataagcccaccatgatagaaagcataaacccactttttctgagaagaacctttatctatttgcagttccggttatatttgtaggatttagagtaattttaaggatagaggagctgcagttgggttactgagagtaattgttgagggatatataagaatagcaaacactcctatgtgctagaagcagctccaagcacattatgaatttttttttttttcgagacggagtcttgcactgttgcccaggctagagtgcagtggcgtgatctcggctcactgcaagctccgcctcctgggttcacgccattctcctgcctcagcctcccgagtagctgggactacaggcgcccgccaccacgcctggctaattttgtttttgtatttttagtagagatggggtttcaccatgttagccaggatggtctcgatctcctgaccttgtgatccgcccgcctcggcctcccaaagtgctgggattacaggcgtgagccaccgctcccagctgagcacattataaatgttaaatcatttatccctgaactctggctatcctttgaccactgatgactgtggtttccaccacgatcaggccaggtggatgctggaggtgaggtggtcagaggaggcagaaaccttggagggctgaggtggcctgtgaa

SEQ ID NO: 56102 - DNA, 1119 bp, Homo sapiens
ctaaggcgcttttgctaagaaggctgttggattctgagggccttaacatgggagtggtcgccatgccccacaaactctcccagtgaccccctttgccaaggctagccctgtagttctagcagtttctagaaaggggccatccccttcccctgcatctctgggcataaagccaccagcacctttgtaaccaaactattaagaagtgtcatcagccccctcccattttcaaggcagcatctcccctacccaagcgtcagcagacttttcttgaatttttacatttacttgtaagggatgtggtaaggggagcataatgcagtctcttctctcctttgtcctgtcttccatcaggtcagaggtttcctatccccctcaagcccccacaggagtcaccaacccaggtaaggaaagggcagcagctcctgagggcagggggtggaagcaggcatgagcagggagcagaaagaggggctggctcttctcctcacttgccagagaccaaagttgtttccagggtgaagataccagttgctcagggcaacttggaggcaggggggtggtggggagagcaggttggggaggatgagagacaagctacgtccctttctcttcccctgggaacaacagtatccggaaacatgtcgggggagggaggaaggcccagcctttcaacaccagagggtcgttagctagctgctactctgccctggggaaggggggtcatcattaggtgttcctactcttttcctttcttcagctctcttgaggccccacctgacgtcagcctccccaccagtgatgctggattgggggtggggggacacttgggtcctggctgggagagtagaattactggggagatggaagggggcttggcctggaagcttagggtctgttttaggggacacggtgggatgggcaactaaggattggtgaaggatagttatctgttcacaaaagaaaggagtctcacccttcttgacctgatttttggagccgaccaagtccctcacttcaattttaggggaaggcaggaagctggtgtatacctcctgctgtgggccccagccagggtcatttggctgagggaggctgatggtggaaggagacctgtctcac

SEQ ID NO: 56103 - DNA, 1068 bp, Homo sapiens
ggaggctgaggcgggtggatcacgaggtcaggagttcgagaccagcctgaccaacatggtgaaaccctgtcactactaaaaatgcaaaaaattagctggttgtggtggcgtgtgcctgtaattccagctacttaggaggctgaggcaggagaatcacttgaacccaggaggcagaggttgcagtggattgcgccactgccctccagcctgggcgacagagtgagactctgtctcaaaaaaaaaaaaaacccacatcactgacagagtcattactgacacagccctaaccaactagtttaaaatagaactttctcatccctcctctaaggccattttcctatttctgtcattttacgacttgttatttaatatgtacccttcatgcttccaaaaaggatttaaggaggcttacaatataaacaaaaagtaggaacagtaaaaatagagacagatcagaagtaattgtaccaggaacctctgctaaaatggtaatagcaattgatattaaatttagttgtgagcttcctggtagccaaaccttgtatttctttttttagtaagaaagaagcatacaagttcttcaagagacacaaactttttcagccttaaatcctagggagcatttatcattatatccttatattataaaaagtaatggttttcatagatgatatacaaacattctcttttctagtgatgtctcttaatgactctcaataaaagccgaaggaatggtagtaaatccttaatttagtgcaagtatgttgattgggcactaagctaatgtgtggttgatctactaccctctggtgatatggcttaataccagattaaagctgaggggattaatgtgttcccaggctgtcttttacaaacatcagttaggaggaaatgatggtcatcagtgcaaaattgaactctggctggcttggagtgtcagccatctgtgttatttgcttgctttggcatcatgtgtaccaagattagcccattagtctgcatcactgattgaagagagaaccacatatgtgaggtgtcagccagcccagttgactccctctccctcaa

SEQ ID NO: 56104 - DNA, 1053 bp, Homo sapiens
gccgggttgggcgattaacaggccgtggttaggaaggacggagaaggggcgttcgctcctttgggacttttcatgcctcgtttttttttcagatgtggcttggtctgggcgcaaggtcccagcagccagcttaagcttactcttctgtgaaaggggaaagtatcccctgtggaaagcggttaaacttgtggagggggtgcgggacgtgagttcttccccatgccaggcgaatggtgtggccttgagctggtccaggagccggctcgacgtgtctgagggaggccccggagggggcggggaggtggcccacagaacgcgggttctgtaaagagacgttgggaagattcgattccgagaagaggaagaaccggattgaaagagagccaggccgctgagggggagggggctgctaagatggcgtcggcctcctccgggccgtcgtcttcggtcggtttttcatcctttgatcccgcggtcccttcctgtaccttgtcctcaggtaagcccggcagggcgtgggtagggagctggtgaggaatatgcgatgggaggaagagcgagacctaagagggtacctgtagctgggaatgtcctacgtgttaccggtaagtgggcgcgagctgggctttcaaatagggatttatgagcgggcaggagtttgaggaaaggataagtttgattaagaagttgtcgaaaactttggttgtctttgaggaggacggatggagattgaaggtgggggtagggtggcccggcgcggtggctcacgcctgtaatctcagcactttgggaggccttggcgggcggatcatttgaggtcagaagttcgagacgagcctggccaacatagagaaatctcgtccctactaaaaatacaaaaattatccggacagtagtggcgtgcatctgtaatcccagctacttgggaggctgaggcaggataatcccttgagcctgggaggcagagcttgcggtgagccgagattgggccactgctctccagtctgggcgagagagtgagaccctgtctcaaaaaaaaaaaaaaagaagttg

SEQ ID NO: 56105 - DNA, 1074 bp, Homo sapiens
ggcaggtggaatctaagttgattgtgggctaattggatgaaaatgttgaagagaagccatgggacttaaaagatatcgaaaagttattggacgctttcgatttctggagaggtagggaatcgtgaattttgttgggtgggcgggagttgttgaagccatcttttccctcagatactcccccctaatgtgtcaccccttctcacttcgcacccccacccttagggccgcacaggcacacagacacacatacatactttctcagactaattcctttggtgattcccaactctaaactgcccaactttgggaaggaatggaaattttgaagagagtctaaggaatgtaggaaattaaggtcaaagaccttaaaaacagatgggaaagatggaatggagtcttgaattgcagtagagactgcgagaagtgatgttttggaaattaggcctgagaagaagaaagatgggtgggggggtgactgtaagtgttgtgggggagtattgcataatagaaaaatggactggaagaatgcttacgctgtatcaggagattggaatttggagaatggagccaggttaatgtagagagctcagcgtattaatagttaaaaacgaatgaagattgagggagggctgaggaggctcacaagaaaagcagtagattgtgtgtaggggagaaagtgtgtgtatgtgtgtcgggtgggggggcgggaggtgagtcagaaactgagcgcttccatcagaagtgtctggtgtttcacagtaactgctgcttctacactggaatagacgctgccagatgttggatgctttgcttgagattttggtatttcctcaggcctggtgttgcgtttttgctgtttagaatttgctgaatagggttccttccacctttcacattccagctcagatgctgaaatatctagtcacacatatcttcttaataagctgcagttttatttatttttaataaatctctatttttagtttgttgagaggggattttttacctttcctataaaagtattaggggaccagaacaactcatgctgcattataagcatgaaataggataaag

SEQ ID NO: 56106 - DNA, 1057 bp, Homo sapiens
agcctcccaaagtgctggtattacaggcgtgagccgccacgcccggcctgtggatgtttttttgatctgtgttctgttgtgtacagtgtaagccatttgtaggctgatttctttcctagttcttcctcttagtgaaaagtaaagcagtttagatcatgttgaatgataaactgaaatttagaaatgcaaacatagaatacaatgtcagaatatcaccaggtgccattttggttgatattttataaatagggagatatttttctgtttactctccatagggattttgacactttccacccacccctttttccttttgtcaccttggtatattctgccagaaaactgacatcagaatgtcattgcttctgatcgatttatttctgccatgacactcaagcccattgtcagttataattaactagtctaataggtatccagtttctgatattaattgataatgtgtacttacacgttagcgttgaatatcaaaatagtacgttttgcttattaatgtctgtgggcttttttaggttaatttaaaactcttctgattaatacctttgctcaaatatgtgctacctaatagctattaaatattttattagcctgtttttcttggataataaagtggaaactatagcctgtgaagtgaacaacagagataataccaggccagctagcaaactggggagagggaaggtggtaattttatcctttaaattgttctctcctagaatgttatttattatttttttgagacagagtcttgctctgtcgcccaggctacagaccagtgtagtgcagtggtgcgatcttggctcactgcagcccttgcctcccaggttcaagcgattctcctgcctcagcctcctaggtcactaggatcacaggcgtgcgccaccacgcccagataatttttgtatttttagtagaggcggggtttccccatgttggccaggctggccttgaactcctggcctcaagcgatcctcctgccttggcttcccaaagttctgagattacaggcgtgagctactgcccggcctctctcctagaa

SEQ ID NO: 56107 - DNA, 1050 bp, Homo sapiens
ctttcagtagagacagggtttcaccatgctggccaggctggtctctaacccctgacctcaggtgatctgcccacctcagcctcccaaagtgctgggattataggcgtgagccaccttcccggctatttttgtatttttagtagagacggggtttcgccatgttcgccaggctggtctcgaacttctgacctcaggcgaccctcactgcaaccttcgcctgctgggttcaagcgattctcctgtcttagcctccctagtagctgggattacaggtacacaccaacatgcctagctaatttttgtatttttagtagagatgaggtttcaccatgttggccaggctgatcttgaactcctgacctcaagtgatctgcccgccttggcctcccaaagtgctgggattacaggcgtgagccaccgcgcctggtctgaaatatgttcattttaatccagcagaattcattgctgtttcaagatagaaccagatttggaaataaaattggaaggtggctatctgccaaaaatttcaagtgcctcttggccatgggtagcttattcaggaaacccaagtcttttaaggaaggacttggatttttttcttaatttcaaagaacgtttttgtgccaagggatacatatttgaggtctgagaaccatgaaacttgtttgtaggattagaagcaaaagttgactagagggaaatgtagagttattttaatttaactccctcattttccaaattaggaaactgaggtaaagatgttgcataaaggctgtatgttaccaagattaatctttttttttttttttgagatggagtctcgctctgtccctcaggctggagtgcagtggcgtgatctcggctcactgtgacctctgtcttccaggttcaagtgattctgcttcctcagcctcccaagtagctgggattacaggcgcacgccaccacgcctggctaatttttgtatttttagcagagtcagggtttcaccatgctggccaggctggtcttgaactcctgacctcgtgatctgcctgcatcggcctccca

SEQ ID NO: 56108 - DNA, 1660 bp, Homo sapiens
tgtatttttagtagagacgggttttcaccatgttggccaggaggctggtcttgtgaactcttgacctcaggtgatcacgcctcccaaagtgctgggattacaagtttgagcctctgcgcccggcattcttttttaaaagataaaaaagtctggctgcagaggaaccttatacctgaaatgttttgctgtctgaattcactccagagtgaaatgacttgaagtacaagttttgtgactgctccgagaatttttgtgtcagaggcttctccttctgccattttttgaacatttacctagaattacaaaaaaatcattccacatttcacagtatggtgctaggaatctgaccaggtccagttcataattttaaactttagagttttaaaaacatgtatgcttatcatgctgtaagcaaatgggaccccaggagtaaggggtaactttctgtttttcctcattaggtttcaactttctgtgctgtggggtcagtggtaagagaggtagatctgatgtgtatctgtgctaaagaagcatgagctccttacagtaactagcagccaattcctcttccccataacagttgcagacttctaatcccagcaccttgggaggccgaggcgggcggatcacgaggtcaggagatcgagaccatcctggctaacacagtgaaaccccgtctctactaaaaatacaaaaaaattagctgggcatggtggcgggtgcctgtagtcccagctactcgggaggctgagacaggagaatggcgtgaacccgggaggcagagcttgcagtgagccgagatcgtgccactgcactccagcctgggcaacagagcaagactccgtctcaaaaaaaaaaaaaaaaaacagttgcagacttcttggagtggtagttcatggtcttcttctaagaaggctgtggatgccttaaaagcattatttgacgctggctcccatatctcactgccctctccaaaaaatgtgttaccctaacatagaagtatcttttctcagaattcttcagtatattatgaatcagtgactaccttttctctcccttgaaattttcctgtaacttaatgttcatttccttttgtttcagtaaaccagtctcaactcttttccttttctctttctgttgtacctctcatttccccgacccttcctgtcctgtagatggcatttcataattcacattgataataattgctagaatttataggcatttattgtagattaagtagagcatttattatagattaagcctatacgtaacttgttgaattctcataacaaccttaggaagtacatgttgttacttccacattttatagataaggtagccagtctgctctagagaaattttaaccaacctacccaaggttacctacttagtaaatgttttttttttttttttttttttttttttttgagacggagtctcgctctgtcgcccaggctagagtgcagtgctgtgatctcagcttactgcaacctctgcctcctgggttcaagcaattctcgtgccttagcctccagagtagctgtgactacaggtgcgtgccactacacccagctaatttttgtatttttagtagagacagggtttttccacgttggccaggctggtcttgaactcttggcctcaagtgacccaccca

SEQ ID NO: 56109 - DNA, 1058 bp, Homo sapiens
caacctgggcaacagagcgagactctgtctcaaaaaaaaaaaaaaagcgacagagcgagactccatctaaaaaataaaaattaaaaaaaaagggacaggtgcggtggctcttgcttgtaatcctagcactttgggaggcttgaggtggatggatcatttgaggtcaggagttcaagaccagcccagccatcatggtgaaatcccgcctccactaaaaacacaaaaattagctgaatgtggtaggaggcgcctgtaatccctgctactcaggaggctgagcaggagaatcacttgcagtgagctgaggtcatgccactgcactccagcctgggcgatagagtgagactccatctcaaaaaaaaagaaaaagttatatttcccagagaaaatatggatatttgaataagaaaggggtctagaataaaaatggaatatgcacgaggcctatgtgagtatggagaaggagagagggacatacacagttgctatccaaaaggatctggtattactgagcaagaggcaggagtttatacttatgtttagtttgactcaaactctgatggtttcagtatgcttgacagagatgtgagtgtgtgatacactcttatgattgtttttttttcccccctagcagcatctggaatcaagagacccatggcatctgaggtgagtttcatactgatacaatggttactaaaaccttaattctgggatagaaggaacctgtttatgacatttttattttttctctacttaggtcttggaagctagacaggattcttacatctcattggtaggctagaaattatgcaactcatcttttattgtagtttattttaaatattaacaatatctcacatttattgagcatttttaatgtaccaaatgcaatatataccaaaaagtaaatactgtacctaagtgccctttaagatattcttatttaatccttcaaacaactacagtgaggcaaatactgttatctgttttacagatgaagaaagtgaggattgcatagttactaagtgggattagtaaagctgggattcaaattcaaa

SEQ ID NO: 56110 - DNA, 1047 bp, Homo sapiens
tgtggaaggcatccttcttcatcatgcctagtaagtgtaattactgaagtgtcacaaatatcttagattgtttcatttttttaaggtatcctgtaatatgactctcaagaagagtgtcttagtgggcataaattaagatagcaaaagtactgaagaagttgagttaattaggagagcattcccaaaattgctgagtagtggcaattttagattctctttggtggaatcagagtggaagaggtaggcaagaagatttggagaaaactagattataatacatactgtagagagttcctggggttagaggaaggatctcattttctcctgtttttttaatgtatttttttctctttttgttttcttgatcacttattatctgaccttctggtttatggaggatgaggcagttatgtgtaggtttcacttccccatcctgatctgactaaactagccaacagattttctcaccctttcctttttgccttttccagtatgggtggcatccctgcccggaatagtaaaggggaaaggcttctgctttatattggcatcattgacattctacagtcttacaggtgaggagcatatggatcccaaattaagagagggtggatacagataaccagtcacgtttctcttttagataggtttgttaccaagttcttccggaagcaagaacagtgagttgcagtctggctacttacttcattagttttcagatggtttatttccttgattttgcctctttccccggcctttataacccttcctcccccatctccccagacataatgtataccttctgtggaaagctgagtcagtccttggaagcaccagggtagaatatgccatctgtctggctctttgcaaaaacctatgagatgagtcatgttccacatggggatacaactggaaacgttacccttttccaaggaggaaaaacaggagggtcactgtgttctgtaaaatgtattagactgtggaactaagaggcaatggagtgatcatcagggaggagctggaattgttagaccccagttttgttcc

SEQ ID NO: 56111 - DNA, 1028 bp, Homo sapiens
gttgaacaggctggtgtcgaactcctgacctcaggtgatccgcccacctcagcttcccaaaatgctaggattacaggtgtgagccactacgtctggccccttccgtttatttcatctgtaggttttacccttctgctaggggctcagtctgggggaagatggcccttggactagagttcctcttgccgggcctcctaactctatagcatttcttctgctctgcaggacactgtctcagtgcatcgcccaggcttctacgctgaacggttccagcgcttcatgtgcaacacagtatttaagaagattccctgtaagtggtttctaccaattgactgcctactcctgcccagtggctcccttaccccaagagaacagagggcaggacacctctggtagggagctgccaatgccagaggcctctccttccacctacatcccatgagagccatttcttgtcctttgtgttagtctgtcatagtcatttccaagttgctgtttcccccttggctcttcctgcatatgtcaatgaggtgaggaccatttctggggaattgggatttgcaaaaaaataaataaataaataatgtgtagttgtggatgtaggatccatgccacagagataggcagagcctatgtacagagatacgcagtgaggttaatggtgttctgttttgtcttctagactatctcaggtggttacagaagcatttactgatttctgcttagcacatgtttttagtctcttttctcaactttcttgtttaggaagtgccaatatttttttgcaaatcttccatgctgctgccatagcaaattctagcttctctttcccttcttctcatattaggcatcattattcccatagcgagggagaggggacctaggcatgccagtcttaagggatatggaaaaaccaggctgggtgcagtatctcacacctataatcccagcactttgggagaccaaggcaggaggatcggttaagcccgatagtttggaaccagcctgggcaacatcatgagaccttg

SEQ ID NO: 56112 - DNA, 1427 bp, Homo sapiens
cggaccacctgaggtcaagagttcgagaccagcctgaccaacatggtgaaaccccgtctctactaaaaatataaaattagctgggtgtagtggcgcatgcctgtaatcctagctacccaggaggctgaggcatgggaatcacttgaactctggaggtggaggttgcagtgagccaagatcgcgccattgcacttcagcctgggcaacaagagcgaaactccatctcaaaaaaaaaaaaaaaaaggaattatgcaatagggtacatttcatctgatggaagtaaagcagtcatcaaggctccatgttggggggttaggtgtggatatgtttcctttcttctaggttttcatgcctcttggaaagtgaagtgagctaacaccttgttctctgaatagtaattcataggcctgtctttgttgacattagccttttcacttttcagaccaactttgggtgtgtgttggggatactagcaattatttgtatctatgtcttggtaatagttgctaaggtagttgctaagtaggctctctctttcccttttgaagtgaagccttctccttccaaaaagtttcggtctggctcatctttctctcggcgagcaggctccagtggcaactcctgcattacttaccagccatcggtctctggggaacacaaggcacaagtgacaacaaaggcagaagtggagccaggtcagcgctagggctggggtccccatgtgattgggtactccctcccttccttctgagcctttatcttgtctggccaggacctctgctcccatttctatccaggaagcctagctgctacatatttttccttgtatttactgtaccccatcttctctatcttttttccaggcgttcaccttggtcgtcctgatgttttacctcagactccacctttggaggaaatcagtgagggctcgcctattcctgaccccagtttctcacctctagttggagagactttgcaaatgctaactacaaggttggtttattggcccctttctccatataatcttatctctcttttcaagtccttggaaacctctataatttgattgcatcataataaattaccccaaagattagtggcttaaaataacaaacatatatcatactttctgtgggtcaggaatccaggcccagcttagctgggtcctctggctcaagatttctcatgaggtggcatttaagctgttggccagggctggggtctcatctgaaggctcaaacaggaagatctgcttttaagcttatttatgtggttactggtaggattctgttccttgtgggttgctgaactgagggccttagttccttgctggctgttgtctgggggcttccctcagttctttgctacatggacttctccataggacagctcagaacatggcacctgggctatctgacaagtgaaca

SEQ ID NO: 56113 - DNA, 1082 bp, Homo sapiens
tagagttccctcagaagagccatggtgtttatgaagagaagagtagtgattgctctgccagaagcagctcctctttaaactcctcctctcttgatgaatttcttaaggctgaaggaatgaagagagtgggacatggggtaatctttatcccttttgttaaaacaggaggcagccatgggctgggagatcatagcccttcctaggcagaatcctgttcactgccaggctatagtaattattactattttgcaatttgaaatatattctggttgtttttctaaatgtgaagacttaccaaatgaattttagatcattctccagaggagattttttttgctcttctcatcttttccaacagtgttctcctgtttgtggagctaaggtaaagaggggacacttctgtctgtttaacagacagtccatatctgtgaggccagcaaatattttcttaaactcatggggagacagcagattcttgccttggtgaggtcattgctgtgccatatgtcctacccccctgtcttcatgcagggaagttggaaatgggggctacatatgccctctcctccccgtctacaagagttgtggttttccatctgatccttccactcttgtcaggggaagaagggggcctggtatctcaggcagattgttgaattcctgttctatcccttctctatcccaccctgccttgataatatgttagcccataccccaaataactgtctatattagacacccccagccagtttctggctgcctgtctttgctgccatgttttttacaagaaggaaagaattcttgctatttttttttcataatttactatttatgatgtatttaagtgttttattaaggacagagttctgttaggggtgggagggaatatttgagggagggctgggtcttagggaaaggaatggggaagcaacatttttattaagtgttactatttgcctctactttgtattgttcagaaatggcaaatacaatataaaagtgatatatggttttaatgtaataaactttaatgagttatttagacctcttattttttctgattctttttcatataccatctg

SEQ ID NO: 56114 - DNA, 1017 bp, Homo sapiens
attttttgtatttttagtagagacagggtttcaccatgctggccaggctggtctcgaactcctgacctcgtgatccgcccgccttggcctcccaaagtgctgggctaacaggcgtgagccaccgcgctcggccgatcccgacacttttttaaaatgccgaagccggaatcgacacagcactttcaaaggttcctccatagctcccctgagatccggccagcgggaaaccccaactgagaactgcaatggcagggaaagtggaggctagatcctgttttttgtgttaccgcgattcccttcaactaccctcaagacgcctacaaatttgtttggcggcacctacaactcccagaacgcaacgtgggggacggaggcggaagcagctggccaagccgaggtctgtgattggtgaagagcgacgggccaattggaggagttgttgttaggccgtcccggagacccggtcgggagggaggaaggtggcaagatggtgttggaaagcactatggtgtggtgaggagctacttcggggcaggaggggcagagctgggttccgggcgcgtgtagcgccaaggcagggagggcctggggtgggggccaggggctcatgggcgagaggcggccctggccccggaggtaaggagcccgctggactccctgagtcatcccggggccctggagtggcggatagtcccgggttaccactgttacccccagggggacggtcattgactggtcattcctgcttcctttctctgttctagcgccgtcttctctagagcagcccgggtctgtctttagctacagttctgcttttcggactcatcgtaatagttttctgccctcctttctttgcaaaataacgtctattaggaaaatagattattaatcccttcctctccccattccctcgtctctaacttcattacctttccctgtatcatcttcaaaggtaccatttacagattgctttttatgtatcagtcattttgtttatctcacttatacctcacaacc

SEQ ID NO: 56115 - DNA, 1022 bp, Homo sapiens
aattttttcggctgggcaccaggtggctcacacctgttatcccagcacttggggaggtggaggcaggaggatctcttgagctcagaagttcaagaccagcttgggcaacatagctagatccctgtctctacaaaaaaaatttaaaaggtagctgcgtggtggcttgcacctatagtcccagctacttgggaggctgaggtgagaggatcacttgagcccaggaggtggaagctgcagtgagccattagtgcaccactctactccagcctgagtgacagagcaagaccctatctcaaaaaaaaaaaaaaaaaaattcctcattggttattctgagtcaataaatgtgggctaaggcttgatcatctgtatatttaaaaaagaaaaaaagctacaggtgatgctatgaagactgctgctatagggggcctctggaactggagagaaggttttggaaaacttctacatttcttctctcttgtccttcaaccctaatctgacagtgtggacaacagtgagtatatgcggaatggagacttcttacccaccaggctgcaggcccagcaggatgctgtcaacatagtttgtcattcaaagacccgcagcaaccctgagaacaacgtgggccttatcacactggctaagtatgggggacagaggaggaggggactcagtaggtgggtggttgttacatgctactcttctttagattccatgaagctgcttttgcccatcaccttcctagactgccttctgcactatttagtgtaaatgtcaatagcaacttgttttttgtattaacctgtatttaatgtagtacggaagctaaatctcctggggtgaaatttctgtttctttttattgtttgttgggcagggctagggtagggggtgaaatttcataatatattttaaagtcagtgaaaagtgattttgggctgggcacagtggctcatgtctgtaatcccaagagtttgagaccagcctgggcaacaggacaaaaccctgtctctactaaaaatacaa

SEQ ID NO: 56116 - DNA, 3459 bp, Homo sapiens
tggccaacgtggtgaaaccccatctctactgaaaatataaaaattagccagtactaggaaggctgaggcaggataatcgctggaacccgggaggtggaggttgcagtgaactgagatcacgccactgcactccagactgggcgacagagcgagactccatctcaaaaaaaaaaaaagagagaaagagaattaacctcccttctttatgcacagagagtcatagcaaaaagggaggaggtgggggtgttaaatcttgtgtgaacgtgatggtagatggtgtacttcaggtacaaagaaactgtaagaaaaagggaaccgagtgacagaggaaagagctgagtgattcctctggttaactctgagaacttcctctccctttacaagctggctctgaagcaccgacaaggcaagaatcacaagatgcgcatcattgcctttgtgggaagcccagtggaggacaatgagaaggatgtgagtccaagtggcagctggggaatgtggggagcccatgtttgggactgaggtcttccagccctcaggagaacctggcagaggcatcaggctcatcactttggggaaaggtgaatgtggagaattcagtgattctgttggaggaccttggggaggtcaatagatttctgtatgcttttatgcggcgggtcctttccccccctcgagtatggaacagatttcttgatttttctccccttcttcccagctggtgaaactggctaaacgcctcaagaaggagaaagtaaatgttgacattatcaattttggggaagaggtgagtagggactgattggagggcattgacttaatttggtcataaacagaatggtccttaaccctgaggagtgcgggtactgtggcagagtagtgcagaaatgggaaagaacagggagcaaggcctgaagaagggcatcatgtgttctttcctccccaggaggtgaacacagaaaagctgacagcctttgtaaacacgttgaatggcaaagatggaaccggttctcatctggtgacagtgcctcctgggcccagtttggctgatgctctcatcagttctccgattttggctggtgaaggtggtgccatgctgggtcttggtgccagtgactttgaatttggagtagatcccagtgctgatcctgagctggccttggtgagcaaatgttgaccccaggtagagtccaaaggtccctctttgttctcttctggcacacacatcacagagcttctatcaggctggatagtcctagacactaccaatcactcattttccaagacctccttttgccgcctcttccctataatgctgtctgatctctaggggcaccagtgtcagatgctttcttgttcacttctgatgaaaaccgaggcttctcccaagtccttactttttaatcccgtaccactgcttatccctccagcttcttctctgtgtgataaaccagaagctgcccctttatgttcctttcccacaccccaactgactttcccagctccctgtaggagtgagggcaggggagccctgattatgccctgcccttcaccaggcccttcgtgtatctatggaagagcagcggcagcggcaggaggaggaggcccggcgggcagctgcagcttctgctgctgaggccgggattgctacgactgggactgaaggtgaaagaggtggaatccgaagtcctgggactgcgggatgctaaacattgaaagctgggtgtaggcactgcagggagagtgtggaggtctgacagggtaggaatatgtgggagggctgggctaggaatggccttggaggctggcctgtgtggatatggcaccaattctaccctgctcctcttttccttttcccagactcagacgatgccctgctgaagatgaccatcagccagcaagagtttggccgcactgggcttcctgacctaagcagtatgactgaggaagagcagattgcttatgccatgcagatgtccctgcagggagcaggtgagccagagcctgggtggtgcctaggcagaggttggggtgaggaagtgtaactgaacagactgacctctcttcctcagagtttggccaggcggaatcagcagacattgatgccagctcagctatggacacatctgagccagccaaggtgagacccaaccctgcccccatcaggtttaaagtccttgaatttagatcctcatccctctggggctgggagtatttctaccatagctaagtcctttgaggagcagagggaaacacatggatttgcatttcttacatgtaaaccttgctaaggtagcaatgctaatggtcagagttggagaaatgtcctcttgttctgtaattttcctttcttgctggtgggagcagcctgggcagttctctaggatgtcttcccaggagggaaaaaagcgggtctgggaaaaagaaaaaggagaactgggtgtcttgagagcaggaaacctcaatgtgatggcatctgtttttctcctcagagctcaattaacagagttctcagcaggcccctctatttggttagtaataactgcattcatgctgtataaaggattttgctgacttgtcctttccttacgtcgaccagaggtgcccagatccccacacagtcagaaggcagggggcctctggcagcggcatgctcctgtccttaacacctgcttacttcctgccgctccataccctcccttgagctcacactgcctgtttgcaggaggaggatgattacgacgtgatgcaggaccccgagttccttcagagtgtcctagagaacctcccaggtgtggatcccaacaatgaagccattcgaaatgctatgggctccctggcctcccaggccaccaaggacggcaagaaggacaagaaggaggaagacaagaagtgagactggagggaaagggtagctgagtctgcttaggggactgcatgggaagcacggaatatagggttagatgtgtgttatctgtaaccattacagcctaaataaagcttggcaactttttttccttttttgcttcaaatattgatggttttgagtgtgagagaggggaggagtccctggcctgaaggagaaccttccttgttgagttctctatgtctctgtttccacctgtctgggcctcctaacgtgctgggattacaggcccaggagccaggtttccatttctaatgaacgaagaccttatttaaaccaccttcttgccaataacttttactctgcactcacacagctgaaccccaagcatggaatgatactcaaccttttcagttttttcatgtggacttctgaggttcagcaagtttaggttatttggccaaggatatttagctaatgaagaggcagaaccaggatcaaaatccaaacttgtctcagacctgtctcgccaggagttgaatcaccaccaaacagtagtttcccattggtcagctgccttcagtgactctgct

SEQ ID NO: 56117 - DNA, 2562 bp, Homo sapiens
tccacaattccttcaggcatggactggaactttcctcctctaggccgggccctgccctagtgcccacccccgcccccgcccccgcccaaccccaactcactggcactcaagccccctacccctgcagtgcctttcacttctttttttccccagaaatccggggcgggggggtggggggttggtagggatgagtcctgtcaagggggccacaggagaggaggggacaggctctcaggaatcctttattcttgtagtaataataatactaacaaacagttggggaactagggagaaaaccagaccattaaaactgtttgtggtcgaatctccattcaggcctctctttttctgtgacttggacaatgtggagttgaagcgggtgagagaacatggaaggcccgcccttctcagggaagaggtggtagtgaccaagacaggcagggaaaaagcaaacttctatgtagtgccttttgtatcttggacactgaggcatccgttcatacctcatcacccatctccccctgcactcccccagaaaacctggaaatgacacaagtggctaactaaggactttatttcaaacaaaaattaaaaataaaaaattgagagctcttttccctgggtttggggaaggagtcagggtagggaattccacatggctaggccagtaccctcagtacactggagggctgtgggaattcccttccttgcccatgatggggaacctcagcaagtgcagggcccacgcagcgcccgccagcaaggggagcttgggccaggggtcggtccctgggaggggtaggtccctgggaggggtagagctgggcagcagcatggccagtggccaaccacaggatcaagtcctaagtaccgagaacctactcttccccacttcctgggccccagaacggaataagaggatggcctgtggaaagaacctctgagagacccctacaaggagaagaaaggccccagtgtccctcacatttgtcacctctgttttctggagggcagtgagtcctggagtcagtctggtggtaatactgacacagaccaggaggggcagggaagccccaacaagtctggaccccacagctggctctcccacccctcagcaagctctcgcagttaccacatgatccttcgtgtttcttgccttccatttcccttgggtggatggttgggtaggtggggtttcctggtttggggtttctcagacaagggccctctagggagggtgccctggaccccccaccactcctgggctgaggagcgtgtcacatgatgccgttggtgaggtactggaagccgtcatagagtttggtggtgatagaccgcatactgccatccaccatctgctccaccagcagctgcagctgctcctcagtcatgctcatgtggaacctctctttgaggtttcgaatggtgctggagccatggaagcaaggaagctgagaacctgggggaagcagtcggagttcagggtcatggatggacgggaggggcagtggtgtcagccatagcaaatacagagctggggcatctgaagtgcccttttcctcccacctcaggtccttgatgatgtgggtgcagttctgcttgggcagagagaaggaaccggcaggaacccctcatcaccccacgcctaagcccttctgtaggtgagggcatgtgggcagaggaaggaaggggaccaacaccacatctccctcagtaagggtggaggggcccagagggcaggctgggaggaggctggagggagtgggccctgagctgggcacttatctggttgcagacctctgcctatgctacgtctgacactcacagatgacctgggccaccgtcatcatggggccagatggggatgatcctgagcaacggcgacaacctgtggggtaggggcaggaatggggaggagggggagactggcagttcagacctggtatacacctggagccttgaggagggggatgaggacagaagggggtcctgggcaaaagactgtagatggcaagactgtagtggaaggagataatgatgagaggggaaatacttctcagagctgaagggtggcagaggacagggcaatcagaggtcatagtggaatggagaagacagatggaaggagactgagaaactcagagctggacaggggtggggaggtgagaagggaccaggaggctgtaaatgggcctgttttctccctaaagatgccaaggaggcaggtgctgctatccccttccccagccttctggacttagccttaccagggtcaggaggaatgtcctaaaggagaaacaaggcactggaccagagctagaaactctctgggaacccccctccctcaaccgagtctcgtgggatcagctttcttatgctccagggctccgacttaaaggggaagcctgaggcactatagcacctgacctcaccccagccccaccttgctgcatgatctccacgatctgcaccaccttgtccatgtgtttccgagcggcaatcagcccttgcagcatcagcatcttatagtagttgaacatgtcgccatccaggccgcccatc

SEQ ID NO: 56118 - DNA, 1435 bp, Homo sapiens
ccacaggttgtcgccgttgctcaggatcatccccatctggccccatgatgacggtggcccaggtcatctgtgagtgtcagacgtagcataggcagaggtctgcaaccagataagtgcccagctcagggcccactccctccagcctcctcccagcctgccctctgggcccctccacccttactgagggagatgtggtgttggtccccttccttcctctgcccacatgccctcacctacagaagggcttaggcgtggggtgatgaggggttcctgccggttccttctctctgcccaagcagaactgcacccacatcatcaaggacctgaggtgggaggaaaagggcacttcagatgccccagctctgtatttgctatggctgacaccactgcccctcccgtccatccatgaccctgaactccgactgcttcccccaggttctcagcttccttgcttccatggctccagcaccattcgaaacctcaaagagaggttccacatgagcatgactgaggagcagctgcagctgctggtggagcagatggtggatggcagtatgcggtctatcaccaccaaactctatgacggcttccagtacctcaccaacggcatcatgtgacacgctcctcagcccaggagtggtggggggtccagggcaccctccctagagggcccttgtctgagaaaccccaaaccaggaaaccccacctacccaaccatccacccaagggaaatggaaggcaagaaacacgaaggatcatgtggtaactgcgagagcttgctgaggggtgggagagccagctgtggggtccagacttgttggggcttccctgcccctcctggtctgtgtcagtattaccaccagactgactccaggactcactgccctccagaaaacagaggtgacaaatgtgagggacactggggcctttcttctccttgtaggggtctctcagaggttctttccacaggccatcctcttattccgttctggggcccaggaagtggggaagagtaggttctcggtacttaggacttgatcctgtggttggccactggccatgctgctgcccagctctacccctcccagggacctacccctcccagggaccgacccctggcccaagctccccttgctggcgggcgctgcgtgggccctgcacttgctgaggttccccatcatgggcaaggaagggaattcccacagccctccagtgtactgagggtactggcctagccatgtggaattccctaccctgactccttccccaaacccagggaaaagagctctcaattttttatttttaatttttgtttgaaataaagtccttagttagccacttgtgtcatttccaggttttctgggggagtgcagggggagatgggtgatgaggtatgaacggatgcctcagtgtccaagatacaaaaggcactaca

SEQ ID NO: 56119 - DNA, 1052 bp, Homo sapiens
cagacacaatgggaatatccttttggacgcagaaggccacatcatccacatcgactttggcttcatcctctccagctcaccccgaaatctgggctttgagacgtcagcctttaagctgaccacagagtttgtggatgtgagtcaagaaggagaggtgcctctcgggggtcattgtattctttctctgtcatgggagagggagctgatgggctccctgcaaattagggatgaacagaacaggcagtaattaggggtgaggcaggagttcctgggagcttcctgcccaataaggaagggggaaataacagggccccaagaggaggaggagttctggtaggccagtcaggacagggaccatccccggtgtaagaccccttgtgcacacaacgctctcttccctttccaggtgatgggcggcctggatggcgacatgttcaactactataagatgctgatgctgcaagggctgattgccgctcggaaacacatggacaaggtggtgcagatcgtggagatcatgcagcaaggtggggctggggtgaggtcaggtgctatagtgcctcaggcttcccctttaagtcggagccctggagcataagaaagctgatcccacgagactcggttgagggaggggggttcccagagagtttctagctctggtccagtgccttgtttctcctttaggacattcctcctgaccctggtaaggctaagtccagaaggctggggaaggggatagcagcacctgcctccttggcatctttagggagaaaacaggcccatttacagcctcctggtcccttctcacctccccacccctgtccagctctgagtttctcagtctccttccatctgtcttctccattccactatgacctctgattgccctgtcctctgccacccttcagctctgagaagtatttcccctctcatcattatctccttccactacagtcttgccatctacagtcttttgcccaggacccccttctgtcctcatccccctcctcaaggctccaggtgtataccaggtctgaactgccagtctcccc

SEQ ID NO: 56120 - DNA, 1779 bp, Homo sapiens
caaagtactgggattataggcatgagccaccacacccagccattattagctagatcttaatgggccaccatgttactggaagccccagcagcactggccattgcatttccacctttccaggacagctgccctgtgccgagggtctagagctggaactcataggagcattcagggcagagaccctgggtcactgttgggagatactcttagaaggcagggcctagatggtgtaattatttttgtacattatgtgcctcacctatatgtgtagttagttttcatcaaggtcatgtcatattgaaaaaaaatgacagctctgggcaaaacaacagatacttaaaagctgtggaaatcatatgctggaataagaagtgaggagagttcatggctgagagtttccacttcatctccatcatgtttctcctttctgctctcagtcactaaccactacccttagtgccaggccctattatctcttgctttgttgctaaacacccaattacatccaccttcacccacagtgccacagggcatttaatcaacacagactggatcatgtcattcctctgcctgcaaaataaaacacctaagcttcacaatgaaggcccttcttcaactggcctcaatttacctgcctcatggtaccacctcctactccactgccatgcagtgcagtctgtgctttaatcacattcaattatttcttctagctgggatgtacctcccctgcagcttcctctgtcatcattttcccttgtccttgaagaccctgctcactcaaacccttagtcctcccataaatccttcatttctttgcccttttaccctagttcttattagtctgcctcctgacttaatgtcatgggaacacatctgtctctgcttaaaatacattgtttcatttttcacatctttgccatggagggcagtaataagtaattgagaactacacacgaagggacagagagaaccctggagaaatgttaggatgagcagcagaagtcacctacctgtccttgacttgcagcaggtagcagaccaagcagtacccagcacaactttgcacaaaattgcgctgtgcactgaggaatgcctcagtggtgtaactgccgtgctcctgtaggaagtaatcgagcaaggagagctgtgactgtttcttcacctgatggatggacacagcattgaccactggttcaatcatgccactatcagccgaaatcacaagaatcttgtatggcttgatccaaaggggcactcgctcctgttcccaaatggactgtgaggagacatggaggatacaggactcttatctttctccaaactagagaagaaggctaaaactcttccctttctccagcctctctccttggtagcattgaattctaagccatcaaatgagtaagactcacttaacccagtgaggaccagggagtttggaaaggaagtctagggcctgacaaagtcagaaactacactcaggtatgtgggaaaaggtatcacctaagtagaaagcccaagacaggcagggagaacaggaaacttcactatcccctctcaagcagggagaatgggagctgtaagttcaaataataagaaaaaagaggccaggtgcggtggcttatgcttgtaatcccagcactctgggagaccaaggagggcggatcacctgaggtcaggagttcaagaccagcctggccaacctcagtagagagtgaaacctcgtctttactaaaaatacagaaattagccaggcgtggtggtgtatgcctgtaatcccag

SEQ ID NO: 56121 - DNA, 1053 bp, Homo sapiens
gtagatcataaggtcaggagatcgagaccatcctggctaacacgatgaaaccccatctctaccaaaaaaatacaaaaaaaaaattagctgggcgtggtggtgggcgcctgtagtcccagctactcgggaggctgaggcaggagaatggcgtggacccaggaggcggagcttgcagtgagccgagatctcgccactgcactccagcctgggagacacagcgagattcttatctcaaaaaaaaaaaaaaaaagaaaagaaaagaaaaatgcaaattctagagacacacccattctgaatcagccttggtagaggaatatggagggcctggtaatcttaattttaacatgattacaatcagttagcaaaaaggtgtcattggttatgttttcttccatgagtccctttcagcctgggttcctatctttgtgtgtccagaatccaggagacagtgcaggaaatgtcagtatagactgggcatggggcttgggggtagcttctccaagcaaatgatgtattttcttcctgccagccggcgcctttcggaacagctggctcataccccgacagccttcaaacgagacccagaagatccttctgcagttgctctcaaagagccctggcaggagaaagtacggtgagttgggtgtgggtctctgaacccctctcaaagctcagaggcagttgtaagtgctcactgcaccaactttattgtccatcagcctccaaaaaaatctgtcaggcttccaggctgtctgggtccttgccctatggggcgtttgcttgggattttttgtggaagccatgtctcttgtcctcaccctggcatcaacctttgacaccctttacttctgtcttcacaggcggatcagagagggctccccctacggccatctccccaattggcggctcctgtcagtcattgtcaagtgtggggatgaccttcggcaagagcttctggcctttcaggtgttgaagcaactgcaggtaagagaagagaaggagaggccaggcacagtggctgtaatcccagcactctgggaggccgaggcgggt

SEQ ID NO: 56122 - DNA, 1232 bp, Homo sapiens
atcttccctctttgaaagtggaaatgatgtggggctcccttctctagccttgcgggacttgacggagcccctcggcagagatctagcccaaggatccagatggggagaaggacaaccctgttcttgaaaagggtgaaacaattcaggtgtaagcagctcttctctctgtggccctggctaacctatccagatgtccccctgctcactctgaagccttggtacagtccttaaggaacccaagtccaggagaagaggagtgcatcccagttacctggactcatggcctcccttaccctcaagggatagcctatagggaaggaatgtgctggctattctcaattcaagttgtgaagggtgggtggaagctcctactaagactaaaaagcagctgctttcctggagttctccagatagtggggtccccggcctgcatggccaggagtgactgagtgggtgtgccattgtattctatggtttcttcaccatcttttgtcttaccccaaacccctgtagcctgttcgactggctcctgagagagaattcatcaagtccctgatggcgatcggcaagcggctggccacgctccccaccaaagagcagaaaacacagaggctgatctcagagctctccctgctcaaccataagctccctgcccgagtctggctgcccactgctggctttgaccaccacgtggtccgtgtaccccacacacaggctgttgtcctcaactccaaggacaaggtagatgggttctggcccaaacccctaccctggacgtgactcttcacccatggttgttcagagtttgcgtgtatgaccagtgaggccctcaccaacatcctagactcccttcatagttcatgatgcatatgtcaaccatgactctgtctcagtgcgattgtgattttgagagcccccctgtatccctttttgggctttgtttttctggaccaaagaaacctaatctttttagcttccttcttgctgtatcttaggagaattgctcttcaccccaccttatggtcattttggtagcttttctccagcctttctataactcttgggctttccagatacagcaaccataaggatagagaaatattttgtttctaagaccttttctgatcagaatgagccgacaaaaggagagaaggatgcccaattcacactggagagaattagctgaatttgtgtgctgactggaatgagtattcatggttcagattcttctt

SEQ ID NO: 56123 - DNA, 1044 bp, Homo sapiens
aaccctttccccatggcttctgccgtcagattatcaaatatttattcataatcttctaaatgctaggccctgtgctggtgagctgactccaaaaacaaataggacttggcctgaaggaaagttttgcctctccacaactggttttcttttttaacttcaaccacattttttccaggtctgagttcttcccttttcccagctcactgcccaggatgttccttaatcccctctcctttcttgttccctctggactaacccctgaccctttggtcccacagggtcttggaccttgttgctgggcaaagacgtgagaggaaatgcaggacctctgggagtttggctgattttttttatattttctatttgatttgtctatcaaatcagttttctctgttctgtgctaatcccctttcagtcatgattcctatctcctctcatgtggcagagcctctctcttgaggcctggggtcacatttctaacatgctcacgtaacttaggggcccctaacccaaatgctgatttgagaatgggaaggaattctgccttttctaatctgagatgattatgaattgggtggggtagagggtccttgggacagagatcagttgccatctgagtggattcagatgaaggaagaagtgagtcttcaaatttcctcttattttctttctctattagacccccaggatatttccagggaccttagaaacccaattccattgttttccttttctttatctcttttcaacaatgtcacttaaagcattcctgaaggattcagacaccctctttcagtccctatgtggcactctgaaccatctcccaagaggcagaggctggaatgagcttttcctttgaatcctggcactgttgcacatgtagaggtaggcctgatactccccagttttcaaaagaagctcttttagagttcgagggagcaaggatagaaattctctcaatccagaaactaagcaagacacacggaaagggagagaaaggcttggtgagtcaaatgctgtttctacaaaggaggggagatggga

SEQ ID NO: 56124 - DNA, 1011 bp, Homo sapiens
agatactctaggagaatctctaggtagaccctaacactctgctcccagtctcttgcttttcttttaggttctgagtttaatactatgctcctaccaccagtagaggggctcccaaggatgaggtcgggcctcaaagaagaggctcaggggcagcatgtacagttctcttcctgcccatggtctccctgcagagttgttctctgctcagctctcacagtgttctctttcttactatgaggaatcctttacactctctcccacagtcagaaggctttgtgctgatttttcacattttccaccactgctcctcaaagcctgccgcttcaaagccattttatcagcctagtcggggaactctgcccaggcagtttgtcctcccatttgtaaccaaatggcaaatattttggtatagaatgggggagctaaaaggagagagtgatttaggtatcacaccctccccgatatgatgacactgttagtagattagctttgtcttttcaggactgcaacctttgtacagagaaatctgccgcatgtcacactggaagccccagtaggccttctagcttgatatggtgtgatgtcagcttcttgcttcatctttactccccggagctgactcagtgtgagtgactcaagcccagggagtaggagaggagcaggtcatgatatacctcccttcccccagggctgtcaatgagtcagacaggacctgtctgtgacagaatcagctggagcgttgctcagggagccaatatcttgcctgctgttccttctccaaccagctcataggtagaaatagaaccactaattcataatagactctgacatcctcactgccttaattctcccaccaccttctacccaaaatggaagagttgttgccttaggggcatgtttccaaatgtggcttctccctcaaagtgctccagtccccagattcttcaaggaaggacctgactataggacctccagctagaatagaactgaaaccatggaattgagttcaag

SEQ ID NO: 56125 - DNA, 1049 bp, Homo sapiens
ggtcttggcatctgcctctgtggggcatataacccacccacgtttttgatacaatgggacttctttcaaatagagggaagtcagagtgactagagaaaaggaagagggagggagactatagagcctgctctctggaaatttggaattttgttaggatagtttaataatggtaaagctaaaagtgctaacatttattcagcacttatgtgccaggcatcttgccaagtactttacatttaatcctcacaaccatgctgagagacaggtattattttgccagcaaggaaactgaggcttagaaagattagatgttttgcccaaggtccctcaactagtgaatgtcagaccaggactcaaatctccagctggtgctcataatcattcagctgaactaccttggttatttctcaatatctacttcccaaggtccccagctgtcagaagccatgtggggaagaacggcccaggctatggccatctgagcttccacatccatgcacaggcaaagccaaaactgttgtcagaactagaatgaaccgttttcatatctggttgagcttggcagcagagccctgggtcatgaagagaagttgctgcagaacaagaagagtcatccagattctagtggaacatgaagggttggatagctgtctcatcttggagtcaaacctgtagcagagggtgagcagctggaagtgaattccttggtgcctcttgtcaggcttggcttttctctttatccattttgtagtgctcatcttaggaccagaaaagctgaggcctcagggcttttcttactctgctgatccttggtccctctttccttacatctaactcccactccaggataagattatggatggcactgagaggcaggtattaggtgaatacttacatcatttagggtgggttctgtagctgccgttcttccaacctgactccttatcttgggtcactagatccaggagaggaaggagatactatgttcccaggcactcctgcgttatctgatactgacagaatgaaatacctgaattcattatggctcc

SEQ ID NO: 56126 - DNA, 1032 bp, Homo sapiens
tcatttcactgataaaagcatggaatgttagaatggaaaggccttagaattcatgtattttgcctgccttagtttacaaaggaagaactcagacccagagagataaagtgagttgcctcaggtcatataggtcatggcaaggctgacgctcctgactgtgtcccaaatcatttttattaaactgcactggccaggcgcggtggctcacgcttgtaatcccagcactttgggaggctgaggcaggcagatcacgaggtcaggagtttgagaccagcctggccaacatggcaaaatcccatctctactaaaaatacaaaaattagccaggcgtggtggtgggcgcgtgtaatcccagctacttgggaggctgagacaggagaatcacttgaacctgggaggcagaggttgcagtgaccagagatcgcgccactgcactccagcttgggcgacagagtgagactccgtctctaaataaataaataaataaataaactgccattccattaacatctactatgttaatgagaactgtggcagaagccctccacaccctgacctgagacttgagatagctaccagagcctctcagagcagcatctgtgggaaaggaaaaggtactattgtctttctgtgtgctggggtaggggagatgttagaacatcggcttcattctcctggccactcctcctcataatctaatcccttttcactaccctctgaagatcctaccttttgttgacataagtgtaaggtttatttcttatcactgaggcatctggagaatgccttcattgcctgcctttccttagggggaagagtgccttgctggtatctttcccataccatttgggagaagcacaaagggaagagaaagcactcttagtatagagtaaatatagtgcctagtcaaggacctggaggctgggaagaagaggaagctacagcagcagttggaggtataacttaggatatagagcagggaagaggtggccacatgaataggttatacccactcttcactccacatctgga

SEQ ID NO: 56127 - DNA, 1344 bp, Homo sapiens
cctattcatgtggccacctcttccctgctctatatcctaagttatacctccaactgctgctgtagcttcctcttcttcccagcctccaggtccttgactaggcactatatttactctatactaagagtgctttctcttccctttgtgcttctcccaaatggtatgggaaagataccagcaaggcactcttccccctaaggaaaggcaggcaatgaaggcattctccagatgcctcagtgataagaaataaaccttacacttatgtcaacaaaaggtaggatcttcagagggtagtgaaaagggattagattatgaggaggagtggccaggagaatgaagccgatgttctaacatctcccctaccccagcacacagaaagacaatagtaccttttcctttcccacagatgctgctctgagaggctctggtagctatctcaagtctcaggtcagggtgtggagggcttctgccacagttctcattaacatagtagatgttaatggaatggcagtttatttatttatttatttatttagagacggagtctcactctgtcgcccaagctggagtgcagtggcgcgatctctggtcactgcaacctctgcctcccaggttcaagtgattctcctgtctcagcctcccaagtagctgggattacacgcgcccaccaccacgcctggctaatttttgtatttttagtagagatgggattttgccatgttggccaggctggtctcaaactcctgacctcgtgatctgcctgcctcagcctcccaaagtgctgggattacaagcgtgagccaccgcgcctggccagtgcagtttaataaaaatgatttgggacacagtcaggagcgtcagccttgccatgacctatatgacctgaggcaactcactttatctctctgggtctgagttcttcctttgtaaactaaggcaggcaaaatacatgaattctaaggcctttccattctaacattccatgcttttatcagtgaaatgaaacagggaggacagaaagaacagcgtaaccctgtgtgtatataggaggcatcctgtctccatgcagccctctaccaccttttgtctctggccctccccagaattttacctcatcctcattctccactttagggttgctggctgttcgtttcaggttgctgctgagacttatgctggcagtggcatctgacttagagcgctggtgagtccttttggagggagacagccctgtgtcaggggccgggctcaaggagggcagctccctcttcctgtgagctggctttagctcatctgagaggatcagcttccgtagcttggtcccacgggagtgtcgttgagtgg

SEQ ID NO: 56128 - DNA, 1050 bp, Homo sapiens
taggatatgtcttcttatctgattttgaaggagtccaggaagacaaaaagaggaggtgcctgggaaggtgtcatagcaaagggaagatctgaggatggcaccactaaccaatgtgtgtatgtgtctccctttctgttcttttctccctccctcttcctgtagcttggaagctcgaagtctggctgtggccatgggagatacagtagtggagcctgcccccttgaagccaacttctgagcccacttctggcccaccagggaataatggggggtccctgctaagtgtcatcacggagggggtcggggaactatcagtgattgaccctgaggtggcccagaaggcctgccaggaggtgttggagaaagtcaagcttttgcatggaggcgtggcagtctctagcagaggcaccccactggagttggtcaatggggatggtgtggacagtgagatccgttgcctagatgatccacctgcccagatcagggaggaggaagatgagatgggggccgctgtggcctcaggcacagccaaaggagcaagaagacggcggcagaacaactcagctaaacagtcttggctgctgaggctgtttgagtcaaaactgtttgacatctccatggccatttcatacctgtataactccaaggagcctggagtacaagcctacattggcaaccggctcttctgctttcgcaacgaggacgtggacttctatctgccccagttgcttaacatgtacatccacatggatgaggatgtgggtgatgccattaagccctacatagtccaccgttgccgccagagcattaacttttccctccagtgtgccctgttgcttggggcctattcttcagacatgcacatttccactcaacgacactcccgtgggaccaagctacggaagctgatcctctcagatgagctaaagccagctcacaggaagagggagctgccctccttgagcccggcccctgacacagggctgtctccctccaaaaggactcaccagcgctctaagtcagatgccactgccagcataagtctcagcag

SEQ ID NO: 56129 - DNA, 1036 bp, Homo sapiens
agaagtccacgtcctcgttgcgaaagcagaagagccggttgccaatgtaggcttgtactccaggctccttggagttatacaggtatgaaatggccatggagatgtcaaacagttttgactcaaacagcctcagcagccaagactgtttagctgagttgttctgccgccgtcttcttgctcctttggctgtgcctgaggccacagcggcccccatctcatcttcctcctccctgatctgggcaggtggatcatctaggcaacggatctcactgtccacaccatccccattgaccaactccagtggggtgcctctgctagagactgccacgcctccatgcaaaagcttgactttctccaacacctcctggcaggccttctgggccacctcagggtcaatcactgatagttccccgaccccctccgtgatgacacttagcagggaccccccattattccctggtgggccagaagtgggctcagaagttggcttcaagggggcaggctccactactgtatctcccatggccacagccagacttcgagcttccaagctacaggaagagggagggagaaaagaacagaaagggagacacatacacacattggttagtggtgccatcctcagatcttccctttgctatgacaccttcccaggcacctcctctttttgtcttcctggactccttcaaaatcagataagaagacatatcctaggaagctttcctgactacctccacttctgattacattactcgtcattcctcctgtagttactcagcttagcctctgttcttagcttatatatgtgaaatgttgttttgtatatgttgtatttatatagatttacaaattctttttgttgttgttgttgttgttgttgttgagacggagtctcgctctgtcacccaggctggagtgcagtggcgcaatctcagctcactgtaagttccgcctcccgggttcacaccattctcctgcctcagcctcccaagtagctgggactataggcgcccaccacaacgtccagctaattttg

SEQ ID NO: 56130 - DNA, 1109 bp, Homo sapiens
aaggattgttcttggagagcagtggctttggtcagcagtgttctttcattgaacttccttccaacagtccctccagaggaggtgttctttgttttgtgactcctgttcctccctgttctttggaaggcctagatctatgagtcctagtctgatttctttttgccttttcaattgtccctccagttgttagaatgtgtgtatgacagtggggggagtggtattggggcagaaaaggctgtcataagtatttctggaagattctcaaacaattggaactctttgcttcccttataaaataatataagttttatgttacacacacactggttagtaaccttttaggtgatgaggattcaactagcatttcttttttttttttttgagacagagtctcgctggtcttgaactgctgacctcaaagtgatccacctgcctcagccacccagtgcactgggattacaggcatgagtcactgtgcccggcctcaactagcatatattgagtactactatgtatcaaagactgtgctagattctttcatacacgtgatggtatttgttccacatagcaacaatgagaaggaagtgttttttcccaatttgcagttgaggataaatggcttgcataagttgcacatttctgaaaggctgaatgaggattttcaaccccagcctatttgccttcaagtccagagctctttccattatatgttagcagccacggcactggagaaagagggtgtgatgtcatgatgtcagacaaccagagaaacggcacagcttcagcagggttgatgatggttgttttagagctgccttcttctaagtgaagcctggcatggtatttactggcctttattttctgggaacttcgagtttaaaagggaaggtaaaaaaatacctgtaaccagaaaaatatatcaagactttaattttatttatttatttatttatttatttatttgagacagagtttcgctctgttgcccaggctggagtgcagcggtgcgatctcggctcaccacaacctctgcctcccgggttcaagcgattctcctgcctcagcctcccaagtagctgggattacaggcatgcgccaccacgcccagc

SEQ ID NO: 56131 - DNA, 1051 bp, Homo sapiens
ataaaataaaaataatagtaataataaatagctaaagcaatttaaccctattccctacaacaccttcttctccatatgacttgcttcagatgcaggcagtgcctgggttcctgagaggccagggaagagacccagctccagtttggtggtttctagtggtagagctgcttatataggagaggagtctgttttttcctgcacctctcaacactgtctagctccctgaggagtaaaagctgccgggagggagagtctgttcagtagcaaaatcctctgaatactgtgatgtgattcttagctgagccctgggagtttttcttttgtctgtgagataaaagaggtgatagtatccttatttgccttcctggtgccagtaataatcccaatcgtagttaattggggcaggcatctgctaaattttctagtgaggtctgagacactattatgtgggagaatgtctgaactgtatttcccttgaaagttttgaaaagtgtacttctaggagctttcagtgacttaaaagtctgtggactagagggagaggaaaggatgtaccaaacatagagactgagaaaaagaagttgattgtttaagatgattgaggctatcacatgagtttctaagcagacctaaaaggtagtggtccccgttgaatcggtgaccctctgatgagagtgccctacgaaggtgtggcagggaatgattaaagcttccttcttattattcctgtgcaactcacagttgcgagtagggacagatccacataggcagccatgctggttctactgctcagagggcactacctaattttgggagagagcatagtgaaagagttgccaccttcttaccaataccaagctcaatctgcatcagggatattaaattcaggaatgaacttgcttggcagagttggcagaaagaaacagaaatagccttttttggtgatctctgagaacagaagagttccccatccgtctttctgcaaaactttagtggtgactgctgggaggcagggagctggactatatgatattgggcagttaaaagtaac

SEQ ID NO: 56132 - DNA, 1050 bp, Homo sapiens
cgagatcacgccactgcactccagcctgggtgactgagtgaaactctgtctcaggaaaaaaaaaaaaaaaaaagcagctttcctccttggaagcatccccaaccagaaatcatatttcctctcatttccctgctttcttcttagagttgagtccacgctccatgagaatgctgaacaccatccaaagcagcaaattgagattccttgatttggggaagaggtttgggaggaacccttcaataattggcatgggacaagaggggacccagtccaagtgtatttgggactcgcagtagggaggaacaattcagagagaggtgagtgcacaggctgctttctttgccatctgtttcagtagcggctcccatagctggcttgggctgtctggctggaatctgcttataccagctccatggctctgcacagagttctcagcctgaatcaatattgacttaactaccatgagaccactgccctccctaccctcgtgctagtagcttgagaatgccctctcccctaatgcccacactctctgggcccttgtgtcagcagttacctggatcctggtagggctggagctggcttgactgcctggccctgagtttctataaggaaaaaggagtactcaatctctacctttaccattgaggtcaaaggggagagatgagttgagacatccttaaagaaaggtttgagttagacattaagacatgaggaggaactcctcaacagcagaacaggcagtcaaagatgatatggagtctcttttgaggagcaacctctctttaaaaattatttttgggctgggcaccgtggctcatgcccgtaatcccagcacttcgggaggctgaggtgggcggatcacttgaggtcaagagttggaaaccagcctggcatgttcgagacaacatggtgaaaccccatctctactaaaaatacaaaaattagccaggtgtggtggcgtgtgcctgtaattccagctactcgggaggctgaggcagagaatcacttgaacctgagaggcagaagttgcagtgagctgagatggcg

SEQ ID NO: 56133 - DNA, 1128 bp, Homo sapiens
tgcaacctccacttcctgggctcaagcaatcctcccacctcaccctccctagtagctgggactacaggtgcctgccaccatgcctgaagttttgtatttttagtagagatggggtttcaccatgttgcccaggctggtcttgaactcctgggctcaagccatctgcccaccttgggctcccaaagcgctgggattacaggcatgagccacctgtgcccagctatgttatactctaatagtcccctgcagtttgctttttctcacttaccattgtttctaagattcatccatgctgttgtagatagctatgattcattcattttcatctgcataatattttatcaagttcataaaccacaagttatttatccattcacctatcaatggatctttggatattttcagtattttgctatttcaaactgctgctatgaacattcttgtacatgttagtgcctttgttttcagtaagatttctaaagaggcttctaccatggtcctttggtttatataacctctaagttgggaactgttccctcttgtcttattctctggaagagtttatatcagattgaaacaaactgttccttgaaagtttggtaaaactcacctgtaaagctatctgagattgatgtttctttgtgggaataattttaactattgattccatttctttaataattatagactgggctttctattcttcttgagtcagcttaggtaaagtattattctagggttttgtgcatttcatgtattttttttaacacaaaatgcatatatttcttctagtttctttttttttttttttctttgagacagagtctcgctctgtctcccaggctggagtgcagtggcgtgatctcggctcactgcaagctctgcctcctgggttttacgccattctcctgcctcagcctcccgagtagctgggactacaggcatgcaccacgtacacctggctaatttttttttgtatttttagtagagatggggtttcaccgtgtcagccaggatggtctcgaactcctgaccttgtgatccgcccgcctcagccttccaaagtgctgggattacaggcgtgagccaccgtgcccggctcttcttttttttttttttttttttttg

SEQ ID NO: 56134 - DNA, 1640 bp, Homo sapiens
gttgtgggagatgacgtaggggccggcgacgtggggagggggagcagcgggggaagtcgtggcgagattaagtaatgagaacttgggcccagttttttttccaagcctagaagggcagaatatgttcgtatcctttctgacctcccaggcatatgcaatggtgaggagtatttttgagaattagagaactttgttttgtggctgttattgttgtttttgagggggaggagggcagtatggggtcagaggcagaaatgaaaatttcttgctaacatggattcccaatccccctatctcttcctttacagttttccagatttaggagacttcagaaaggtggggcagatagaatggagatggcaaagatctctttgggcatatatgggcctggcgaagtaatggaataatttctaattttcggagaaggcaagtggtgagaaaaagaccaccggggaaattcggaggctttgtttctgtttctctgcctttctgggtaaagagatgaggagtgccctggggccttctggggaagggaaggccagtgtgagttacatctttatgcctgtccctctcaattctagccctcatgccgggatggcagaagatgagcctgatgctaagagccccaagactgggggaagggcccccccaggtggtgctgaggctggggaacctaccacccttcttcagaggctccgaggtaccatttcgtaagtactcatcacatctccaagtcctgtccaagacctgagtatagatccctgcagcacttcactttggctgtagatgaactgcctctcagcaagggcatgggagcagagggagatttttggccatggtagcaattcttgagcacctgctgggcatttcagtccttttccctccctagcagtcagataaagagacagggaaaatcttgtgtgtgacctccagctttctcctcttccccacagcaaggccgtgcagaacaaagtagaggggatcctggtaagtgtgttggggaagagggcaagagagggatggaaatgctgagggaggaggatgtgaggatgatgggcatcaacaaaacattgatgtgggagaggtagggtcctctgccttgtcagaagatagttggctttgcaaacttgctgccagtttgactttgtgcctctcacttgatctctgtgagcacttgcatagaagcccagcagagatgaagtcagagctgatcccctctacttccctcctctccatggtagcctatagggctcctcagagcacctagcatcaaataatttctttcttttttttttttttttttgagatggagtctcactctgtcgcctaggctggagtgcagtggcgcaatctcggctcactgcaagctccgcctcccaggttcacgccattctcctgcctcagcctcccaagtagctgggactacaggcgcccgtcaccacacccagctaatttttttttgtatttttagtagaaacggggtttcaccatgttagccaggatggtctcgatctcctgaccttgtgatcagcctgccttggccttccaaagtgctgggattgtaggcgtgagccaccgtgcccggccttgtcaaataatttctaaggtcctttttcagtctgacaccctgtaagtcagct

SEQ ID NO: 56135 - DNA, 1035 bp, Homo sapiens
ctttttcttttctcttttttttttttttttgagatgggagtctcgttctgttgcccaggctagagtgcagtggcgcaatctcagctcactccaacctccgcctcactggttcaagagattatcctgcctcagcctcccgagtagctgggattacaggcatgtgacgccatgcctgggtaattttttatatttttaatagagacagagtttcaccatgttggccaggctgatcctgaactcctgacctcaagtgatccgcccgcctcagcctctcaaagggctgggattactggcatgagccactcttcccccagccctggatgcctgaatttaaggaactggcaaatccagcagtggaggtagaggcaatgggcttacagcctcttagacatgcctcggggagagggctggagggtggggttagtgtctctactgcttctacctgccaccctgcttccttccctgttcagggggttttgtgctgctggatggggagacgttcgaggtgaaggggacatgggagagacctgggggtgctgcaccgttgggctatgacttctggtaccagcctcgacacaatgtcatgatcagcactgagtgggcagctcccaatgtcttacgagatggcttcaaccccgctgatgtggaggctggtgagaatccccccatgtgccagcaggagccttgggcctacatccccttgctttctgctccaaatctcccacccccacacttccctcctgtggccccagaatctaagagagatggcataggatgtaccgcatgctcagattgctcaagcgtcttcctgatccctccaatccatttcttaaccttctgccctgattggtggcccagtctttgcccatgccttccaacctctgatgctgagcctatcctccggccccactcccaccccaggactgtacgggagccacttatatgtatgggactggcagcgccatgagattgtgcagaccctgtctctaaaagatgggcttattcccttggagatccgcttcctgcacaacccag

SEQ ID NO: 56136 - DNA, 1029 bp, Homo sapiens
ggaactcctgagctcaagcgatccgctggcctcggcctcttgaagtgctgggattagaggagtgaggcacaacacctggcctgttttgactataactttgaactgaattcatcagtgaagactcatcttaatagaaatattcaaaactgaagttacttgctaacatttaaaatactggctgggatccagctcactggttctccttgggaagtcattccaaccctccccttccattctgctcctcccacagaaaaatgcttcccacatttcacagctgtggaagttttcatgagcacacagtgctggcaggtacctttgccattgcccttgacgtctcccagggagctgatcatcacttccccgctggccaggcagtggctggtgtggagaaaggccagttcgcacttggcatggatgtccttgggctcaatgacctggaaggggtggggaatggtgtcagaatcatacaggactgggagtccctgctcttaacctccatacttcccctacttctatctgctgactctgtcatcttttccttcaaaacatggacacaactctccctgtgggaatatgacaaagattcagtctggtaacttctacagagcagcaagggaaagtcagagagattgctaataactccccaggcagaaagcgctgacctttccccatgtgtcctgaaggcacacgcagccctgtgaaaccataagctcctcccaggctggcctacaccagtgtcaactctgtattaccagtagacaacacagtaaatgcctggcaccaaaagtgcactaaacaaagtgttgggagagaccggaatttttaagagaaccctgagctcctaactgcatgggggaataaatggctccctccctctctcagagtaaaacaagaagccttgtccctcttctcccatgccctggtcaccgtgctggagggtgatgacccagaatgcctgggtagactctgctctgaggtccaacctccctccctgctgccgagccagttgccgcgtaagagctggaggct

SEQ ID NO: 56137 - DNA, 2925 bp, Homo sapiens
acaggaaaaagaaagaaatgacactgaaggatcacttccgcttccgttggcgcaagcgctttcattttttctgctaccgtgactaagatggaagcgtttttggggtcgcggtccggactttgggcggggggtccggccccaggacagttttaccgcattccgtccactcccgattccttcatggatccggcgtctgcactttacagaggtccaatcacgcggacccagtaagttctcggcgctttcgtttgcgtagcgggagggaccgtggggcctggtgctgccggctggttttgagagcccgggaaggtgaggcggggaccccgggggcgcgcgaacggcaggggagctcagggcgcggagtcctggagaatgcagaataattggaaggaattatagaaaatcagaagcgcagctcagtgcgcggaaagagggcgcagtccatcccccctctcagctcccaccgttctcactctttaggaaccccatggtgaccgggacctcagtcctcggcgttaagttcgagggcggagtggtgattgccgcagacatgctgggatcctacggctccttggctcgtttccgcaacatctctcgcattatgcgagtcaacaacagtaccatgctgggtgcctctggcgactacgctgatttccagtatttgaagcaagttctcggccagatggtgtaagtcatccagagaacaggagagtggttcccaagtagagaggggagtcccctgttttttattcccttcgatgggatggggggacttgttgcagcgggggactggaagagttgttggaggtgggcgatctgtgtttgcaataaagtttttggcattaggtgtaaaatgggggaaggtgtggtaacttcttttggggatgggtggagaccccgacttaattctctcccttttctcacaaccaattccttttaaggattgatgaggagcttctgggagatggacacagctatagtcctagagctattcattcatggctgaccagggccatgtacagccggcgctcgaagatgaaccctttgtggaacaccatggtcatcggaggctatgctgatggagagaggttcatatgaatacaaataacttatttcctttaccacccaacctagtacctgtgtagtatctcttctgtctcttctccccaagtgaatcccactttaactcagaccccatggtccccttcttcagctaagatgaatctaaggtgaaatgagttttgacccattgtgtcctgttagcttcctcggttatgtggacatgcttggtgtagcctatgaagccccttcgctggccactggttatggtgcatacttggctcaggtaagtagtaagtctagaggtgggggaaagggaagacaaaaggaaatggattagtggttgtctgcttttctcctgaaattctgatatgagggatgggctgggatcgctattactgggcagatggttttctttgtagtctgggggctgtaggtgttgacactgattccagtgacaagatgacatgactgggagtcagtagacatgcaaagagaggacaccctagaacttcttcctgaagtggctcttagcttattttctaagcagagttcattctggtgaggcaagaagtagaatgtcatctttcactctaatgctttttataccatagatttgagacaactagcctgttattcagcccaatatccccccatggttttcccccaatctccctagcctctgctgcgagaagttctggagaagcagccagtgctaagccagaccgaggcccgcgacttagtagaacgctgcatgcgagtgctgtactaccgagatgcccgttcttacaaccgggtgagggatgtgctgggaacctaattggcgggctctggctacttgcaatccctgggtctctatgctttgaagaacagattgccttacttgtgtgactcctattttcacattggggaagacctccacctgacctttcatttaaggacttaaggcgtgggcattattgaatgctctgctttcttccagtttcaaatcgccactgtcaccgaaaaaggtgttgaaatagagggaccattgtctacagagaccaactgggatattgcccacatgatcaggtgagtaatagggaaaaaattggtgacagacttgggaggtctttggcttacactaagctgggcttttctgggaggctcacccaggaaaattttctgggtggaaagttttggttggacagtacagctatttttaggaattgatccctttatgcttcacaattttattattctgtcttccttttttagtggctttgaatgaaatacagatgcattatccagaactgaagttgccctacttttaactttgaacttggctagttcaaagatagactcttcttttgtaaagtaaataaattcttcaaaatgcttgctgagtggtttttgtctgactgggtcacaccaagtgcaaaactgctgagtactgccatgtgccatctccctccctggtcggagaacccttgtggtcttgcagcacacacagaaattctctctgcacaacacagaaagacacactagcgtcatttggagctgtattagaagcagagcttcctgtagaagccagacttaatttttgtgtgctaactggcttttgtgttcaaattcccctcccaaatcttcctccactgcactggattatcaaatacagatttcttaatgttggctgtgattttcattaaaataccactttaaaaataatctagtagaactattctgcatcaggttgccctcaagtcagctggggcatcagccatccctggaatggttctaaacctgaatattttagagacaaaagtctcattctgttgcccaggctggcgtgcagtggcatgatcatagcctactacagccttgaat

SEQ ID NO: 56138 - DNA, 1041 bp, Homo sapiens
ggatttataaacttgttttttttctaggtgaccctgtttaataggctttcacagactggggaatgctcaagatgtgatgggcctggtggtacaggtgtgacatttgttaccacccatttctcccaccccaccctgcttttttgtttgtttgttttttcatcccccagcacactataatatagtgaactggaaaagtcccttccagaaacagcttggccagctttgtgaacctttgacatctgaaaacaaccaaggatccatctgggcttctcttccccagctttttgcctgatgccattttattgacagacaatggactttgaagtcagcctttgcctttgagaaagttcaagaactatggttggtcacgtctatctacaacctaatcctactctttggtagtctctgcagcagccacagccttagcagagctggggttcctgtcttctgcacacgattgactttcttgatgggtaattttttttaagattataccaacagtggatcagctgggttttggccaggaagttgtctttgtggactctgcctgcatggcttagtagtagaaggaaatttttttttggttttgttttttataattcagtttaatcaataaacatgtatttattgactgtttcctgtgttgagactgaatgtgtggaggtttcagattgaaagctcattgtttggctttacaagtttgttgttaacggacaatgcaaatggagggatggttttattttttccttcagttctcactgaatttctgtactttgaatttgctgcctatattttctttctcaagaagtttggagaggatttgtgtcagaatcgcctacagtgttcattttaaaaattcaagctgggcatgatggctcatgccagtaatcccagcacttgggaggctgaggcaggaggttgcttgagctcagaaattcaaggctgtagtaggctatgatcatgccactgcacgccagcctgggcaacagaatgagacttttgtctctaaaatattcaggtttagaaccattccagggatgg

SEQ ID NO: 56139 - DNA, 1238 bp, Homo sapiens
tagatctgatggagatttgagtgttggggtcatgagggggtgtggagtgagggtgggaacatgtgagggagggtaaaggggcttagggaaaagggggcataccaggtggggtatttggtttctattttttaattttataccaccactcccccctgaagttgacttacacttccctgtggatttgtggattaattaggaaaaccaatagtaatcacgtctgagccaaggagctggcccattggtcattcacttctgctaaaaacaggtttttgtgactttttttttttttaaatttaaatcactgtgtttggtatttttctgacaaaattaagaaaaagaaaaaaaattatttgtgggcaaatgttaaatttttttgtttccccttttacctcaattgtatcatagtactgggtttttttgtttgttttattgtgtggccaatgtctttgggcatgatgctatctaatcattgttaatgtgagaacatttctgaagatgggaaagacaaattatgtagctcacaaactggtttattatatatatggataaaaaacttttttcattgtggtcttaacacttttatataaaaatgaaaatggaaaaaaagtcccactgaactctctcttccttctccttttctttccttccctctccagagatgttggtttctacagcaaccctagatataaaattgtggctttaaaaatgcatgaaaccacctttaattatccagaatgaatagatttgtcttttcctcaccaccttccctccaaaacatgacataaacaatattttttgcacttgtgatccttggcccctttccccattctcaacaccatccatccctctggacaaaggatcatacaggtgttattagcaagcaagagatactgaagcgatcaaacagttttagggtggaagccattcccagtttgagtcttcatcctgtaagcccccaggggcagtccctgctttactgaacttcatcctgttagatggagagcatgcctgtttaagggattactggtcctacagccaggagctaattgttcaagaagtgttgaactttaaaaagacaagaccacttgttgaaatccagcgtgctctgtggctttcccctatttctcttaatacttagggaagaatctgacaggaagaagcgcacaggggtgtgcacaaagaaaatgacatgaatctttatttttcactgccagcttcaaggaaagaaaattttttct

SEQ ID NO: 56140 - DNA, 1442 bp, Homo sapiens
ttctgaaatttagtgtgggtgatgtctcattgttacttcccttggttctcaggtgacaatccgggcttcccgagggcagccacgaactgttcctgtatcctctaatgatacacctcccagcgccttgcaggaggcagcaccgctgacctcctcaatggaccctctgcctgtcttcctttatccccctgtccagcgcagcatccagaagagagctgttaggaaaatgtcagcgccttcttctaagtgctgggcgggtggggactgggtggccaggattattcctgatacacagtgcaatctggtagctttttagcagggtttgttgtctgaaaatcctacattttggggacccatgaggcagtaatgagaattctttttttttttcccccacaggagtgtcatgggccggcagacatgcctggagtgcagcttcgagatcccagacttccctaatcatttccctacttacgtacactgctctctgtgtcgctatagcacctgctgttctcgagcttatgccaaccacatgatcaagtaagttggtttttaaccagtgttttagcttgagagttcagattctttttttcttcttcttcttcttctttttttttttttttttttgaagacagggtctcactctgtcccctaggctggagtgcaatagcatgatcttggctcactgcaacctctgcctcctgggttcaagtgattctcctgtctcagcctcccaagtagctgggattataggtgtgcaccaccatgcctggctgatttttttgtatttttagtagagacggggtttcaccttgttggccaggctggtctcaaactcctgagctcaggtgatccacctgcctcggcctccctaaagtgctgggattacagacatgagccactgcgcccggccccagccagattcttgagcactcatttcattttctcccctgcttctaatatgtttcctccttcaactcttagagctatttgttcttctctcctagcagagtgagaggctctgttttttcggttttgatggtctgtgctctaatttcatagggccttgctattcaagtaccagtagtattaggtgggagcttgttagaaatgctgactctcagccccgccctaggcctactgaaccagaatgtgaattttaatagatcctcagtgacttgtatgcatattaaagtttaagaagcatggtgacaggaaaactggcttaggttgagattagggtgcactgaagaagtgtctcttttgttgggggcattgtcactggctggtgatctctagcttagccagcagaactccgtaactcataccacttctttgtctttctcagcaatcatgttccacggaagagccccaagtatttggctttgtttaaaaattctgtgaggtaagaaaaaacttattggcagcatcttaatttttcaggtttt

SEQ ID NO: 56141 - DNA, 2603 bp, Homo sapiens
taattacttgggcatggtggtgcaccactgtagtcctagctacttgggaggctgaaacaggaggctcgcttgagctcaaaggatagtcctagctactcaggaggctgcggtgagctatgatcatgctccagcctgagcaacagtgagattctgtctcttaaaaaaaaaaaaaaaaaaaaaagcccaggcacggtggctcacacctataatcccagcactttgggaggctgggacaggtagatcacctgaggtcaggagttcgagaccaacctggccaacatgaaattaccaaaaattgtctcagaagtttgacaaaattgttcatttgtgtcataaaattttgtcaaaattttttctcataagcttgacaaaatggacaatttcaaagagagtaggaggtattggaggccagctgattagcagtgggaaatcatatgggctagtaccaagtttttgccttattataagtatagagaagtgacagttcctacatgcagtttgaaataatggtgacagaatgcagggtttggaatccgagatagtgcctaaattttgagctcaggaagaaatggggaaaggaaaaagggaaacagtggtaagacaggaggatgctgaattaggttagagttgacgatagaataaccaatttaaaatgtcttatagataaaatctagaatgaagctttggtaagaagtctgagctacgtacataagattatcagcaacatatatgttaaggtggagccatttaaagaaagaacagaagggacctatgatttactgattgttgaaaatcaaaataaaggaggcagagaaaataaagattgtgagtcagcaggacttttgtcttattttcaagtggatttattgattacttttcttcttacagccaagtgcaagatctgtgaatgggcgtttgaaagtgagccactatttctccagcatatgaaggatactcataagcctggagagatgccttatgtttgccaggtattgcctttttctccagggagttttagcagttttgccctcaggaagaatacaaagaatttactaatgaatattgttgaccacctactgcatacactcagtttaggaactctgagtaggtacagaagaaatagtaaacacagtttatcttcagggtttccatgcaggagaaaaacataaaagaacatgtccacaagtagactagccgggaacatgtgcatattctaagggagtgtctgtctcctgaacgtgccctttggaaattgacagaaaaggctttatttttcttagttagagaacatggattattcttagactttctgtcccttcctatttttaaagtaatagctaaacctatcacaaacatagcccagcattacaaagtcaggaaaataatttgatttctatgcatttgagaaaactttttttttttaatttaaaaatttttgttgctacctttttttttaaggcctctcagttgttcacttcattcttagccttattttccctcctatgtgactcaggtgtgtcaatatcgctcctcactctactctgaggtagatgtccattttcggatgatccatgaggatacccggcatctgctctgcccttattgcctgaaggtcttcaaaaatggcaatgcattccaacagcattacatgaggcaccaggtactaggcaccaagcaattcccatattctcttgttttttttttttttaaacatggatgctggggccagggctgagctaggcaaataatttgggcagagattataatatgcatatgtttgcagaaatttattgaattcacttaatgtgccatgtactagtctagatgctagagatttagtagtaaacaaggcaaacaatacaataaaacatgaagagtactgtgttggggaaattataggatatagaaaatcacatagctattctgggtgcctagtaaggcttccagaaagaagtgttgttcaatacctgagggatgaataagaatgagccagatgaaataagacgaagaacagtgtgcccaaggcacaaagcaaaattgtggaggttcaagaaattgagagagattcagtgtagggtgtaagagacagaggggttggaagttaggcagggacagatcatggaggatcttttaagccatgaaaagaattcactgggaagccactaaaggggttttaagccctggagtgatgtgttcagctttagttaaggctttatactgcctgcactgcagagaatggattaaaggagattgagactacagttagggaaactagctagaaggcctttttcagtagtttaggtgagagatgatagtggctattggcttttgaaataaaaagagggtagagttgagagatattcagaagatttgtgatatttatgatgtagagatggattaggtgaaggtagcaatgcagtagttaagaatagtgcctaagattctgtcttgggcagttgggtgaatgagggaactatttgctgaaatagaaacaatagagaaagtatatttgtgaggggggagatcatgagcttggatattgtaagttagcagtatctgtggatgtcaagtgtagctgttggataatagatctcaagcctgtg

SEQ ID NO: 56142 - DNA, 1026 bp, Homo sapiens
caaacaaaaaccatagtgatctctcatgcttgcttacccttttatatacttctcagggagtgtttgactttttcccaaaaggtcagtaatctttttccagtgtcattgtattaatcttatcaattcttctcacttctttcagtgacctcttccatcccagtatttgacctccaggatggtggacggaaaatatgtccacgatgtaatgctcaatttcgtgttactgaagctttgagaggtcacatgtgtgtaagtgatatcacctgtgatccagcttaagtggcttctgccatttaccttcattaatattggaagcttgtaagcaggggctctaaaatgactgaagctttttaaagggttactgtttctcttggtctgtttttagaagagctgtgtactttggaatgtgatgggatacatttaaagaccctcaaatagatcagaacatatgtgatcttactttcttagtgtggtagattttgaaaccacacaggagaacaggtttatagataataaggactcaaaccatattggcctcagttcatttttgttaattgtgtcattggatgaatcgggagctcttacttccattttttagcttttcattttttggtattagtccagataaaaaggttggaacttcttctttgccagggagctcagagccaagttatactaatgattaagggacctaagacaggcaggagggagaaatacaaagtatagcgcttgggtggcatatgtggatatactctagaaaaggagtaaaacttggaaacgctaaaaaaaactgaagggtgaaagctgaatgagaatacctgaaaccaaaccgttaacaaggaatggtagtgaagttaaggagttagcacattctagcccccaggataaccagaatgatcagatgtctttctttatagtactgttgcccagaaatggttgaataccagaagaaaggaaagtccctggattcagaacccagtgtcccatcagcagcaaagcccccatcccctgagaaaacagctcctg

SEQ ID NO: 56143 - DNA, 1017 bp, Homo sapiens
tgcctgtattcccagctgctcgggaggctgagacacaagaattgcttgaacctggaaggcagaggttgtggtgagtcgagattgtgccactgcactccagtctgggcaacagagaaagaccccatctcaaaaaaaaaaaaaaaagtaggaaagtaggcaaaggactgaatagacctttctccaaagaaagttattgccaataagctcatgaaaaggtgctcagtgttattaatcattatggaaatgcaaatcaaaaccacaatgaggtaccgtctcactcccattaggatggctactatcaaagaaccataaaataacaaatattgttgaggatgtggagaaagcagaacccttacgcactgttggtggaaatgtaaaattatgcagccactttggaaacagtatggtggttcctcaaaaagttaaaaatgatagaattgttgtatgctccaggaattccattctatacccaaaagaattgaaagcagggactagaacaggtatttgtacacctatgttcattgcaacattattcacaatagctgaaaggtgaaagcaacacagaggtccatcaactgataaagggataaataaaatgtggtattcacatacaatggtatattgttcaggcttaagaaaggaaattctgctacaacatgtgctgcaacatggttgaaccttgaggacattatgttaaagtgaaataggctagtcacaaaaggacaagtaccatatgattccacttacttgaggtacctagagtagtcaaattcatagagacaaagttgaattgtggttgccggggtggaggcgaggggagaatggtgaggaggtttttattggatatagcttcagttctgcaagattaaaaaaaacaaaaaccttaacaaaaaaatcacatacaaattattcttagcttatgggccaaacagaaactggtagctgggctggatttgatctgtgtgctgtggtttgctgacccctggcctagagttagaacagtaaaaggaagcctca

SEQ ID NO: 56144 - DNA, 2067 bp, Homo sapiens
agtttttttttttaagattctgctagatagttttttttttttttaagattctgagaaggataatttttttaaaatcttagaattttccattgctctatttagcatgtataagtttactacaattcagaccaaaaaagagtatcttaatttagctatttgtaagggtacctctgtagcttgtcttcctaaggttttgttttttgttctcgtagcccataggggtttaagtctgaccagcttaccctggcatttctttatttttctcagtggaattgtctacagttgagccaggagacattcctctttgggacatcctagtagaatggcatagtctgtcttctgagttgatagaagaggatggaagactcctttagtactctgagaaagactgatttcttttttcaggaccaggtttgccatttggcctatatacacccatattgcttcccactcttttcttccagtaccgaggtcaagccactgattgtattcttagaattaaaaaggcagtgtgataaggtgttttaggaggagttgatgggagtcttatttaacttaatgtttttaggctgcccaggttattttgtcaacatggacaccttgtgctttcttagtctttagaatctatactcctcttggaaacctctgatgatcatccatcagtttggggaaataatctttccagtaaaggcagggagaatgtgttataggtgagctcactgaccaagatctggtactttgtctctcttttaaagccccaggtacccagtttgttaagccgacagttggagttccacaagtgttctcccagatgacccctgtgaggccaggctccacaatgcctgtgaggcccaccaccaacaccttcaccaccgtcatcccggccactcttaccattcgaagcaccgtcccacagtcccagtcccagcagaccaagtccactcccagcacttctaccactcccactgccacacagccaacctcactggggcaactagctgttcagtctccaggccagtcaaaccagaccacgaatcccaagctaggtaaggcttcggaagaggagatggcagagccaggttgggatggtgggtggagaacagatgattatcacttggtcaccgtagctccctccttcccctctccacctgcagtgagcattgccagctttgtcactgtgaagcgacctggtgttacaggcgaaaatagcaatgaagtggccaaattggtgaatacccttaacaccatcccttccctgggccagagtcctgggccagtggtggtgtccaacaacagctctgctcatggctctcaaagaaccagcggacctgagtcttcaatgaaaggtacaataacctgaaagactctgagcagccagtcattcaaaaacattaataaagtgtttgttgtatcagagctttatactcagaaatagaaaaataaaataaaatacagctgctgtagtttgttcttacagaaactttagtaaggagaaagccacttacaaaaagtgtaactgaatcagctccaagaaattatgtgtgtaattgtgctttggagattagtgaaattgattgattaaagatgggtgagataatgaaagataacttcatggaagagatggatttctgagcaaggttttaaagttaggatttggtagagagatcttcaggttgagaatgatgagcatgagggttttcagtggtctagagcaggggtcggcaaatgttttctgtaaagggcctagtagtaaagttgtaggctttgtgcacaatatatagcctctgttgcagctattaactgtgctgttgtggtggggaagcagccacagatacataaacgaatgagcatggctgtgctccactaaaaactatttatggactctgaaatttaagtttcataaaattttcatgtgtcgaaaagttttattcttttatttcaaccatttaaaaataaaaaccgcaaggtatagtggctcacacctcatcccagcattatgggaggccaagacgggaggatcacttgagcctaggagtttgagaccagcctgggcaacatggtgagatc

SEQ ID NO: 56145 - DNA, 1087 bp, Homo sapiens
aggagaaatcacatgaacagttggatttatgaaacaggaaactttttggctatagagacccacaataagatggaaagggaagattagagcagtatcctttagtgtcatctgtccctgtctccaagtgactatgcctccccttccccacagtttctgtgagccagcagccagtctcggctccagtgcccatcgctgcccatgcttctgttgctgggcacctctctacatccaccaccgttagtagcagcggggcacagaacagcgacagtacaaagaagactcttgtcacactaattgccaacaacaatggtaagtgggattattgggaaataataatcctgggctagaggggtgaaagaataaaaaaggtctcagggacagccctacctgtttagttaggtacagatgtggttctactagttggaaaatgaatttagtaatgattctctgatacggaagtgatttctgtagatggtgctattccttctaagttagtgctgactcggtactggtgtttcaagtgagagagcagtagattcttgctattgataatttcttggagagaaaatgtcaacccaaaattcctgttaagatttttttgtttggttggttggttgtttttgtttctttaatgagaaaaattccattagtttggtaagaattttcccagggcagttctgtattttctctggcagattcatttgtttattggttcctgagtatggaagataggatagggttgttgtctacatgaaagaaatggtgaaagactagtgtttttagtgtattttattttattttttttaatagaaaggctatatagtattggtttctatttaatttctaatgtctatttctacactcctaagatgagttgttgaccagttatgtctcaagattcataactgaagtaggcactttcatagagtcattgcatcgctgcgagggactttattttttaattattttatttcctttaaaactaaaacagctttagtactacaaaaataatatatgcattgtagaaaaactataaagtgaaaaaaaaaaggaacaaaaaaatgtttaaccataatcccaccacctg

SEQ ID NO: 56146 - DNA, 1050 bp, Homo sapiens
taaaaggcttgattaaactaaatgtgtcctctttgttaacctttgattgtttgattatatttttcttaaaatttatctttttaaaataattttttaaaaattttaatagatatgaggtctctctctgttgcacaagctggtctcgaactcctgaactcaggtaatcctctcacctcagcctcccgaagtgctaggattgcagatgtgagccaccacacccagccaaaatttcttaactacatataaattatcttaatgatctaggtattttgttaggggaatacatacagtcaggataggataagaggggaagtaatgagtggtttactaaatatataagacaaacatttcaagtaaaaatttcaggagaaaatttttttttaggtttctaagaaatatatttgtggatgtggaatttttctgtcagatgacgtaagagcaaagttgaagatagctaatacttggggattcatatggaggtaattttttatttaaaatgagcaagaaggaccctagccttttattgtggtcttggaaactcattccccaccagtatcattccttgaagaaatggttggttctaggtctggggcaggaaatatatgagataagctgaaacatcttgactatcagcaaagattttatcaaacgatgctagggttgtgtcagaaggactcagcagccaactgaagacgttcccactggccaaaatagggcacattgagtatctgtaaagataactgcatggatcaaaacacatcaaaagctgggcacagtggctcatacctataatcccagcactttgggaatctgaggcaggtgtgttgcttgagtccaggagtttgagaccagcctgggaaacatggtaagaccccctctctaccaaaaaaaaaaaaaaaaaaaaaaaaaaattagccagacatggtggctcttggttatcccaagagttagttagctctttgtcccaagagttactcaagaggttgaggtgggaggatttcttgagcctgggaggtggaggttgcagtgagctgagattgtgccactgta

SEQ ID NO: 56147 - DNA, 1012 bp, Homo sapiens
attctggttcctgcagaggtaggtgaaggacagaaagggccctggccggcgattcccttggagtaaacgggaggcaggaggctgttttctagcagagcccagaagatgctctggccgacggctcccgggatcttggccggcggtcactcgcgaccatccgcgacgcccccaaaatggcctccgcgcccctcgccgccccgccccgacgctccgcagcccgtgggtccacgtgacctggcccgcccttcgcggctggagaccccgggtcccggtccccgcaccggaggccccgccccctacgggaagcggaccaaccggagcggggaaaggcggggcgggcactgacggcccgcgggggtggagctccgcagcggagtaacaggttggtgggagggagagaaaggagggagctccgaggacgagggggagggccggagctgcgcgtgctgctttgcccgagcccgagcccgagcccgagcccgagcccgagcccgagcccgaacgcaagcctgggagcgcggagcccggctagggtgagtggacccggtgcgggccagggcacccgagaggaaagcgagccttcaggggtacctttgaggggcaggcatcgaggcggtgtgagatgcccctctccagggcaccggtgccgagtgggagacgggaggaggggagattggggcggggtggggtactgattaagagccgacccctaccctgaggtgccagatgcaggtggctaggaaggtgccaggcgaggggcacctggggcgaaggctgttcccagcgcatgaaagcgtttcagcgccagatgtctctggaggtcagacgccagccctaggggcagaatttctcttggagacagcggtggcgcggggaaggagttagttccagctgagtcgggaactgctgctgcctgaggtgcagactcgccaggggagggcatctgcaggtgctgctcgcctgagggtctttcctgcgtcctgcggtctcagctggccgttgtcagcaccct

SEQ ID NO: 56148 - DNA, 1052 bp, Homo sapiens
tggaggagaaaacagaagagtgcagccgactgcaggagctgctggagaggaggaagggggaggcccagcagagcaacaaggagtgagtgcagctggtggcgcacctcgggctgcttgggggcctaggccaggtttagaggccactccctctttgcccctagggttgaaggagacagaaggaaatctccagaagctgaaaggggcagtgttggtttaaggacaggatagggcctttctctctaccttctttatcaataatggtggtagtgcatgatttggagttaagctacctgggtttgcctctgtctcagattcttaagctataaaatagacttaataatagtacctacctcacaggatcattgtaaggattcagtcatccattcagcagatgtttcatcaagaatgctgtgacaggcattaatctaggttcccaagacacatcagtgaaccctatagatgaagggctcgctctccagaagcttagtttctactgagagggaacagacagtaaacaaacatattttgcaagtaaatttgtaacacacgagaaggcagtaaatacaacagggtaaggcagatcaggagggccaggttgtagcggggcaggttgcaaaaatcaggggaggcctcatcaagatttgaaggaaggaagtttaaatgcattaataaatatgaattaaaatatatgatgcgtttagagaactgcctgacacatagtgtgcaataatgttatctattattaggctccagaacatgaagcgcctcttggaccagggtgaagatttacgacatgggctggagacccaggtgatggagctgcagaacaagctgaaacatgtccagggtcctgagcctgctaaggaggtgttactgaaggtagggtctggggtcatatgccccagcctctgctttttctcagttggagcatcctcaagtctgctcatccatggtttccccaaagtatgaggagtgggtggctgattacaggtactcagtgtgctttcaggtagattcaatggtgtgttgggactagagttaggataaaggaa

SEQ ID NO: 56149 - DNA, 1096 bp, Homo sapiens
tgtaggcacatgccaccacacctgactaaaattttttttttttttttctgttggtagagatgggatttcaccatgttgcccaggctagtctcgaactcctgggctcaagcagtctgcccaccttggcctcccaaaggcttgggattacaggcatgagccactacatctggccccttttactctttcttgatgtttttgctctttgtctggtggggcagaaaaaattactaagagaaaataatggacaaggaattcagatggtctccatcataggttagtttgaagctaaccagagacctctagagcaagggagagacagaaattcccttttattccttttttctaggctgaacttgagacttattttactccagagctgggaatgaagtaatcattgcccagatctgatcttggagacattcctgggcccttaagggaggggaggagatggtgaacagtcgggacacaggccttgtcctggattcctcttctctgagccaacttgcagacagaatttatggctctggacaacccccaggaatctgtcatatattcacaccactgaatgggtgctcaattcatgtgcaaagtgagtcaataaataaatgaacagatgtttcttccggagtcagaatgtagacagttgaactgattagagatcctactgggagtgagggccctgggactctgttggtgtttccccactagccaggcagtgtgccttagcgtatcacatgtggacatggacatagggccaatacactctctgggatgtttttattgttggaggcagatgcagcaggtacaaggagccagtgtttttcagaactgcagaccataaccagtagtgggtctgagatcaacttagtaggtcagaccagtattaaaaaagaaatagaattaacactcttagagtgttagtgaggatagacatttttggtagaacttttatttcagttatatatatatgtgtgtgtgtgtgtgtgtgtgtgtgtgtgtgtattatatatgtacgtgtttgtttactgggtcttgatgtgaaatatgtttttgagattgaaaagttttgcaagccactgtggtaagttatattggc

SEQ ID NO: 56150 - DNA, 1103 bp, Homo sapiens
tccctattcacatgagcctgtggtgtgagaactctgcacctctctccttatttccctggggcctccctgtttatctccttatctctgctgtggcgtcttgatctctaacccctcagctatgtgtttaccccctccctgctttgaggagtgagtcagggttggagatttgtttgaacagagtggtgaggctgcctataatttggaggtagctgggcttctcccaaaaatgtttatgaggttagaggctgcttaccttgtgattagtactgctcctttttccctagagaagaaggctccacttctcatcttgccttttagagtacccagtagagacccccctgccggatatttttggggtgttcctaaagctccctggagcctgctcatagtcctgaggaaatgcaagcctgctctagaaaacaactaagtgcaccaggcagagaggagccccaggatttgctccttgactctgggttgggggtgcaggccgaggtctgtggccttgctgactaagatgcattctccagttctggaggatgaggtgccagagagagccctaagtttttcatcagctccattagacaatttacctcatccaccctcttcccttgcagactttccagagctacttgggaaagtaatgctgcttcacccttgtgaagagatgtatggtttgcaaatcacttttacatcattcttgcacatctatctactcttcctaaaatgtcggttgtgaaattatcaccctcattttacagacagaaaactgaggcccagagagattaagtgatttgctcaaggattaatggtcatcaatcaggactcagacatcctgcctctgacttcaagtttagtactttgttttgaaacagagtctcgctctgtcacctgggttggagtgcatggcacagtcttggctcactgccgccttgaccttatgagctcaattgatcctctcacctcagcttccctagtagctgggactgcaggtgtgcaccaccacaccaggctaatttttgtactttttgtagagacagggtctcattatgttgcccaggctggtctcaaactcctggactcaggtgatctgccctcctgggcct

SEQ ID NO: 56151 - DNA, 1182 bp, Homo sapiens
tttcctgggagggataatcctgggatcctgcttttcagtttttccaaaactcgaggacagaaatgtcctcaggagagcagagctgtctctttgtgacttcgccctcatcctttagattctgagttgtatccttgatttgcattttggttcaggcagagtcttgctccagcagcagcccctgccttcattcccttgaggggaacagtggcccagcagctggtgcaaggaaagttctttgtcttgggcatgcacttgtgtggtggaaattacctaatttttgctttggctgaaggtaggtctttcagtgcttgagctcacatctggctggtgggagctactttgtcaggtatcagaagaacctaatgtgtgcagagactggcccaaagtccagcccccttgtttgcacaaaccggctgtcatatgatgaataatcaggctttgggtcagaaataattgaaaaagatcttccctttgtaatttttgctttgtcaaactttatcaggatccctgggggcaagggaagctctttgtttgtggcaggcagctgcatgtattccctggctaagaagaatgggctacacatacttttccatctgctgaaagattttagcctgaggtttttttcatcctccctacaagactttcaaggccctttcaaggccgcataacatctctccaccccctcttgtttctattttctcatggaacgctagaaatcttttcttctttcgcttcgttccttcttcctcttctcctttcttcattccttcctttttctccctccctttctttttctctctccctccccctccctttcaccttcctctccctctccctgtccttctctttctaagatttgagtgttaggagaataatgtttcaaagttggttgctttcatctgttttaactaccaattttatttttctttgaacaggtggtgctagaaaagccaaatggctttagtcagagtcccacagccctgtacagcagcccacctgaggtaggtaacagaggacaccatggtggctccgcttagccaggggcaggattgcctcctccccatccttttgtttattgctttctctctctctctctctctcattaaatacaagagtagtagttgacataaaaattcaaacacagagaaatacaaagagtagaaattctccttccccaatctc

SEQ ID NO: 56152 - DNA, 1030 bp, Homo sapiens
gaacttcggagcaacaatgctgactgccaagcagaacgagaaaagtaagggcttggctcttgttcacggtgaagttgggttgcagggaggggagggcaggccatacagcctgttgctcctgtggtggcctggtctggggaggaagctggtgctgatgtcagatcttccagctctgactcaccgtgagcttgctcagggtggagccccacccaagagataccatttgggaggccgccatctccagggagttcattttccatggggtaataacctaaagaaaaggctttcacagttttagagccaagggcaagcaagagctggtggagcatctgctgttgctgtgtgtcattccacagattagtgcagtggatatgttatgccttcgtttcctccccaccgaaacaaaaattgactgtaaactgtttgagggtaaaattgattaacagtcatgctgatgaaaaatggaatgagcagcttcatgaggagatactgaacttcctgttacttgaagcaatgcagatagaaactgagaaccacctgtcagcagggtcccgtaggtgatcactgagatcctttctacctccaaggtgagagggttttgcaaattccctctgatcagaggaaatcagaggccccagacaaccaatgaagcctacagagcaaagattgtgccttctagaacttcaggaatttggaagttatgctgttggcaattaataaataagacctcaaatggtaaatcacatttaacatcagcatatttggtttgatcttcattgtgtaaggtggaccttttttagttcaacaagacattatctgaagggccttttaaggaattccaagatgaacagacacaattcttgcccttcagggcccctcagtcttggaggcattttctctcctttaggataacctagatttgaccttcctggcatggaaaatacacgtgtcatattgtagcctcctttctgactggactttatatcagaattaatatcagaattagtcagcactccttcctcggtgggta

SEQ ID NO: 56153 - DNA, 1007 bp, Homo sapiens
agcccaattagagtagaacctgttaacacaagcccagggaggtccatgaatggcttctagagatgtatgaaccacctgaaatggtaggaaaaatttagttataatgtttgcatatttctagggagagggtattttgcctctaagagattcagaaaaggacccatgatcttgacaaaatcgagaatcacagctatatccacttctcagttgtttaactgcccctctcttttcttcacccttgctacaagacacatgtatcatgccccaaatcttcccctagttgtcactgataattactgttttaaagcacttggaacccaagtgatcagccagcactgcagtgtaagattccagaggccaatgtgaagattccaggggctctgtgaagggtgggccacaacacagctgttcccagcacaactcagtgtttccaaccttcttttcagtattaggatatccaagccgcctagcccgaagcccatgcctgtcatccgagtggtggaaacctgagctgcctggagatggttgctgccattgctgctgcctctgcctcggagaagcccactgcccctgttggctgttaacactgcctttgacttcctgactgtcccctggctgcacccaggacttcgggctcctgtgtctcaccattcccaagcccctggccactctaagctgggcagacggagcacgagcacctattcaaggcactgcagccctttggaagacattgtcctgcaagcaggagccagggcaatatctatattcctacagtgactatttttctctgtagagagcctcccttctgttgtagactggactctggctgtgccataagccaggccttcatcagattgggagaggtgacaagatttgcctcagccctaaaagctggagacacagatgtccagagtgattggagaatgtcctgggggaatgaagttccttccacaaacacagctcagttcttagcaacaaactgtttgtttttctacttgctccatctg

SEQ ID NO: 56154 - DNA, 1092 bp, Homo sapiens
atggtgtccactcattctgtttcctcacctcttccacctcaagaaatggttggttttaacctgggagagttgattgaaaaaaaaaaaaagaaatagttgctcacctaggccagtgtttggagacagtatacctttcctctgtcctttctgtaaatagatgctttcttgtttcattaatgtcctacatactgtttcctagtattcctagtattgtctgacaatatattctttttttttccttgagatggagttttgatcgtcacccaggctggagtgcagtggcgcgatctcggctcactgcaacctccgcctcccgggttcaagcgattctcctgcctcagcctcctgagtagctgggattacaggcatgtgtcatcatgaccagctaattttgtatttttagtagagacgggtttcaccatgttggccaggctggtctgaaactcctgacctcaggtgatccgcccgcctcggcctcccaaagtgctgggattacaataatgactttcagatttcttatacttgggcacctaattattttctttctagataactcaaaatttgtggctgatgttttcttccaatagaaggtctcagaattgtcactttcctttccctttggaagttaattttggactcagcttcttatttttaaatttaaaactaaagcatttataattataaatttatgatgaagttctacattatttactcttcacaggatctaaaggaactaaaccaaaaagaataattctgtaggagactatagttaatatgatctatctttgcagatacacgcacacatcccaacatacatagttagtggcttcttgcctttattgtggcttctgcccaagagcctaggtataaactgtaaaggagacctcagataatcccctaggaaaggtagaaggacttgccttaggctcaggttccagactaggaagctgggaaatctttgccttctagagaaaaaacattactttttggcacatcctttgtggtaagtagagaactttgtcacttttagtgggcaggggaaaagaatactctgcctagaagacctctctggaaggttgtgataatcagaaa

SEQ ID NO: 56155 - DNA, 1688 bp, Homo sapiens
tcttgaaataaagatggatggttaagaggtagcacaagttaatattaatagttataataatcattttactgctttgcagcgtgtatagtgtgttatagtttgtagttttatttatttatttatttatttatttatttagagacagcgtttcactcttgttgcccaggctggagtgcagtggtgcgatctcggctcactgcaacctccgcctcccgggttcaagcaattcccctgcctcagcttcccaagcagctgggattacaggcatgtgccaccacgcccatctaatttttgtatttttagtagagacggggtttctccatgttggtcaggccaggctggtctcaaactccccacctcaggtgatcagcccgcctcggcctcccaaagtgctgggattacaggcatgagccactgcgcccagtcagtctgtagtgtttttacatctgatcttcacacagtcctgtgagataggaagattataagctcatcaagggcagggactacatcaaatactatgtatttgttgtatccctagccaaatgtctggtggcccatggaaagtattcttcagtaaatacttgccaaatgaatatatgagtattatccctattttataagacaggaaatggaaactgagtgttgtaccaatgaatggcaaccagaattaaatccagatctttggattctagatcttgaatattttctctttttagagctgtttttttttttttttttttttttaaagagataggagtctcactatgttgcccaggctgtacttgaattctgggctcaagtgatcctcccacctcagccttccgagtagctggcactacaggcatgcactaccacacctggctaatttttttgtactttttttttttttttgtagagatggggttgccatgttgcccagtgtggtcttgaacccctggcctcaagtgatctgcccactttggcctcctaaaccgctggcattgcaggcttgagcacctggctgcttaaaattcagttacattcatataaacgtcgatagtggttgaactttggttctactattgtgaaatgtaactattttatatctttatttactcactattacccattgttaaattggatgagagacaggggactaaagcaggcattctttgcctttattattgctatctttaccctgttggttatcagtgaagacagcagaacaatcatttttaaattccttttaatttcacaggtagttgaggttgcaaacaaataaaactaaatttgaaaatagcattaccttcccctcagaaatcacttccacagattgctgtaaccaggaaaatatattttattagtagcataacaatttgtctgggtcttttaacttattgtgaagaacagttctttttccatccaccactgaccagtttttttcagatgagggcctgttaccatgctctcaaagataattatttttctaggtaagtcccattgggaataattcttatgaccttgtagataagcaaagagacttaattgacaagcagacacttaacaatttatgatcactgctcaaaatgctttttgagcataatctttggcaggttcattcattagatgatggcattgctgacaaaaggatattgtggtggtttaggttagagccatttaggttcattcttttcttccacctcagctat

SEQ ID NO: 56156 - DNA, 1059 bp, Homo sapiens
agcttctcagttatcctttctctttctcttctgttttaaatgactatacttactattgtgtttacaattgataactttcatccttgtgtgctacaagcctgttgtgttctagctctactttcctccaagtctgttcctctgatttgaagatgctttttttttttttgtgacagagtcttgctctgtcgcctaggctggagagcagtggcacgatctcggctcactgcaacctcagcctcccaggttcaagcaattctcctgccttagcctcctgagtagctgggattacaggtgtgcaccaccatgcccagctgaattgtttgtatttttagtagagaccgggtttcaccatgctggccaggctggtcttgaactcatgacctcgtagtccacccacctcggcctcccaaagtactgggattacaggcataagccactgcacctggccgaagatgcttcttttaatttaaatcttttattttggcatacagcatgttgggagctgagtggactgaagacgggggggaaacttaatgtggtactaaagtttacacttaatacctaccttcaaaatgaaaattcatgtgaagctccttcaaataagtttaagacctggtggtgatcacaaagtgaattgttgctttctttcataatattcgtactccagggttaaattttgtggtatggtattagtcaaatgctaggtagtatgtgtgtagtctcttgtttattatttattgctccctgccaactaaataaggttctcataatagttgaggaaatgtgcctttctgcaaggtattgagttgctgaataaggagttgtatttgagtactcttatgtgtacttcctcagtgaacttccactgatacgaaaacatcttttaagaaatggtctgtttttgcttaagctgtctgaaactttttagattcttgtgtcaaacctcagagcaagaccagaatgataggcctatgttttctacaggcctgatacacaaggaattagcttacttccctctggaaaagtacaggcagtctgcagagagtcagctgctctggt

SEQ ID NO: 56157 - DNA, 1880 bp, Homo sapiens
aagtttccatcagtgaaaggggctctttatttttttctatagctagcttattgtaaaattactgatttttttgtatataagttagacttgtaggatgtgaaatgtcaggagtgctgaatttactggctagattgttaaaccctaaattaaatcccaggaggctagctggggggtctcctgactgttctgtttatataaatggatatttcagataccagactctgacagagacaatttcagtgactgaaaagtttatggaaggcttgttactaaatttagtatcatttttcaggaaggaaaatccctaatggtttggaacaggactgaaaaagaatttaactctaaagggtagataagctttaaatgttaaattgattagaggtcaggtgtgtatttcctacctctcttgggatagccatgggagggaacctccaggcctgctgcccagtggtttttgctgagagagcagctggatcagcattctggaaggtagtttggtttgctgagggagtcttgtgagactcagcatctttcttgacaaaatacttcatctaaaccttgtactttgtttgccttatttcagccttttgtacacagcaaaacaggaaggaaaattagtaggctgaccatataattataggtgtatattttttagtttggactgattacacaggactctaaatgagatagcatagagcaggaaaaaagttgatggaatcccaagaggttaattgaattggaaactagtgtatgtgaagagtaataccatttagctcccaaagtaatgaaacttggcataaaggaaaattaagttgactgatttgagatatggagagaaattggatgtaaatgtaaaggaattatcttcagtcataactttttttgagtctctatttacaaattaagagaatttattttgtgaaggttcttttaacagaattcctttgaggtttaaaaaggacaaagtacaattcaagtggcagggctgtcaaaagccactttgattgaattgtatacatgcttagttagaatgaggaaattggattgtttgactgaaaaagctttgtttcctcctcagcttcagcctctttccatgtgcgttcctgaagctatgtgtgggatattagtatagaggaaggggaggtcttctcacctctttccatttttccccccgccataagttcacaaagtttttcacattagaaactgttaaaacataaacaacttttctggaaccaaattaatcttttgacttcatggttcataccgtgtgacactggagtttgggcaggagggtggagatacaaggtgtttggacccttctggtttatgggattgtctttttccctttttccccttaggaaccacgtgaatgttgagggggcgacacacaagcaggtggtggacctgattcgagcaggcgagaaggaattgatcttgacagtgttatctgtacctcctcatgaggcagataacctagatcccagtgacgactcgttgggacaatcattttatgattacacagaaaagcaagcagtgcccatatcggtccccagatacaaacatgtggagcagaatggtgagaagtttgtggtgagtgtcagcccaactcgatcctcgaacatctagctttgtttcccctagtcttataattatgaaactattatagtggtagataaaaggctgcaacctaggtcagtttgtctaccaggaggatgagttcacacataaataaaagacactgaccctgatttattgcagggggtgaattacagtagtggaaaagagtcctactcagcttgagtataattccattttatttttagatagtttcaagtttgcattctggtttgtcgtaaacgtgtgagtttttgtttagt

SEQ ID NO: 56158 - DNA, 1007 bp, Homo sapiens
cttaatttttcttttggttgcaatatgctttatttgcctttaattatttgtggagtgttgatataatgagaaatgttcattattcttagtagaaaatgcagtgggttctgttagatgctggcaaacagactacaggttttaaagcttaacagttgactaaagttacagtctctaaaactgagatttatcctctgcataggaacgagctactaaacatttatggtaaattctttttagtgaagagataagaaaagcaaggaagctaaaagagttgcagaggatcaaataatgcttggttgcatctgtaattagctgtagataatggcatataggttttatttcagcatggacttctgtagtcttagaaccacacacagaatttagagttttatgcttcctaagtgctaactttgagtcataaggcatgtaagaagttgaaatcaaggtcacatcctaaaagtagagcagtctggatgttgagaccttttgggaattacctaaaaccttggaaacctgagaaaaggaataatactaccaattgtacctttgtttatttttatttttattatatatattttttaagacgaagtctcactctgtcccccagcctggggtacagtggtgtgatcttggctcactgcaatctctgcctcccgggttcaaacaattctgcctcagcctcccaagtagctgggattacaggtgcgcaccaccatgccctgctaagttttgtatttttagtagagatggtgtttcaccatgttggccaggctagtctcgaactcctgacctcaggtaatccacctgcctcagcctcccaaagtgctgggattacaggtatgagacactgcgcccagcccactaattgtacttttcaaatcaactttattgaacatagtttacctatattaacattcactcatgttaagtctccacttttacaagttttgacaaatgtacatagtcttataaccaccaccaccaccatgaagatttagaatattttc

SEQ ID NO: 56159 - DNA, 1505 bp, Homo sapiens
gtgatgcctaatggacttttttttttagacggagtctcgctctgtcgccaggctggagtgcagtggcacgatctcagctcaactgcatcctctgcctcctgggttcaagtgattctcctgcctcagcctcctgagtagctgggactataggcacatgccaccacgcccagctaatttttgtattttttagtagagacagggtttcaccatgttggccaggatggtctcgatctcttgacctcgtgatccgcccacctcggcctcccaaagtgctgggattacatggacctttatttttagggttatattatctgccagcaaacacatatagactcagcaatatgctgaattgatttgggaactaagtgggcaatattaagacattttaaatatttaagacattttcattaaaatgattcttggcttactgctgtatcctacatgaaaactttattcattttacaggtattcatagataggtttgctgagttgtaggtaatctagagtgcccttgttctaagcaggctaaaggtagatactaatacttctgtattgaattttttgttttgttttgttttgttttgttttgagacagagtctctctctgttgcccaggctggagtgcagtggtgtgaccttggctcactgcaacctctgcctcccaggttcaagcgattctcctgcctcggcctcccgagtagctgggactacagaaacgcaccacatgcccggctgatttttgtatttttagtagagacggggtttctccatgttggccaagctggtctcgaactcctgacctcaggtgatccgcccgtcttcaccttccaaagtgctgggattacaggcatgaaccactgcacctgaccctgtattgaaatttccttgttatctcactgcctccagatgatacatcaggagtctgtggatgtggatggtgaaacatttgtctagaggcgtgagccactgcacctggccctgtattgaaatttacttgttatctcagtgcctccaaatgatacatcaggagtctgtggatgtggatggtgaaacatttgtttgtctaggaaggcagggaaatgacacagatctcctcaataagatagctcatcttctggctcagggaagagacctttccttgctacattataaagttatattatttggtagctgttcagtaggtttttctctaaaatactggcttatagaataacagttttacgtgatatgtagtcattctgtttccttgtaactaactgacctagttgaatattttaaaaacttttgtagggagccttatcgtgaagagaaaccattttccccatagaaggtagtggaacttctttatctgtttttagctttttctaacatggactggcctctctgaacaaagcccttgggaaatgagaaagggtacaatttttaaaaatcaaacgaagtaaagtcaccagtttaatttaccattctcatgagagtgtcaggaaattaactttcttaaatttaga

SEQ ID NO: 56160 - DNA, 1067 bp, Homo sapiens
aaaggaaaaatggatgagactcaggtatccattttttcttttaacaatctcctgattatttcagggttcagaaagaaacttagtatatctcttgatccagtctatatgcctgaccattaataccagagaatatacatcgaaactactgctttcagttgttttctcctctcacttgtgaattctgaatggggaaagggaagcgaatcaaaaatctcatctgtgtttgacctagactgtttcacgcaagtttcctgttttgaaatgtgaacacgttggcttcaacatgtttctttccttcctgcttatcttaaagattaacttctgctgcagccctgaagtcagctttatgacttgtaaatgtattgatttttttcccgttttcattggaactcacttcttctctaccacgttttaggttattgtctagctagcttgttacagggagagtgaagatatactgggccataaattatttctctatgtcttttcccccagaactacaatggtgtgtccgacgtagagctgagagtagcattaccagatggaacaacggttacagtcagggttaaaaagaacagtactacagaccaagtatatcaggtaaattaaatgaacacgtagacttgacattggatggtgtgaagctaaggaagatagattaaataagtcaatacatataaagtgcttagggtgtctggcacataatccgtttattaaatgttagctactattgttattattaatgtgaaagtactttgccctccttaaaagaaaggtacggtaaatatcccaggttgtagtagttgtgattaacgcctcctttttttttggagatggagtgttgctctgtcacccaggctggagtgcagtggcgcaatctccgctcactgcaacctctgcctcctgggttcaagcgattctcctgcctcagcctcctgagtagctgggactacaggtgcccgccaccacacccagctaatttttgtatttttagtagagacacggggtctcaccatgttggccagaatggtcttgatctcctgatctcatgatccacccacctcggc

SEQ ID NO: 56161 - DNA, 2089 bp, Homo sapiens
tagcactattgctttggtattgcctaataactactccatagtcacatttttccaattgtctaaaaatgattttttacatttggtttgttaaaatctgaatctaaacaaggtccttagatcacatttgattttttttttttttttgagacggagtcttgctctgtcgcccagactggagtgcagtggtgcgatcttggctcactgcaagctccacttcctgggttcacgctattctcctgcctcagcctcccgagcagctgggactacaggcgcccaccaccacgcccggctaattttttgtatttttggtagagatggggtttcactgtgttagccaggatggtctgaatctcctgacctcatgatcctcctgcattggcctcccaaagtgctgggattacaggcatgagccaccaccccggcctcacatttgatttttatgtttgttttaatatagaacagtccccacttctccccattttttttttcatgccattgttttgttgcagaaatgggtcagtgtcctgtggaatgacccatattctgaatatatctgtttgttttctggtggtgtcatttaataatgtccttctgtgtctctatattttctataaatggaagtttgctctagaggctcaattagattcaggttctgcttttttgataatacttcataattggtcctgtatactttatattgcttctcaacaacaagtacacaatactgggttatcccattttagtggtactgaggttaaccagtaggtttaggtggtgaaatctgatgttttctttgtaaaattcaccactgatctttgatcaaatgaatcgatccattgatgattattgccttaaccagtgatttcattaaagattacaaagtgctgattttctaatactctcatttcttccaccgattagctagaattcttctgaaaataacttttccttgtcaactaacgctatttaattatcttgaaatagataatttcccagtttgtgggaaagacaggatacatatttaagcttttcctttcattgctgattttcagagtaaatatatcattatatataaatataattatatatattaataacatatgatatgttacatattaaacaatatatactttatatataattatataatatactaaataatataataatatacaaataatatatatttaatatataatgcattatgaaatagtatatattatatataataatttagtctcaggtttttagattcagtgtgatttaatcgataacatatattatctttttgatgctcagattgttccatctttggccaatgaatgctccttcatgtctgctcctgtatgcttttgatgcaacctagtattttcatattatccttgctttttggtacaataagatgtcctggcctcatctttgtatatttcttaccctagatatctagaataggacatttccctaaggagtcctattcttttagtgagaaactgtatttagagatcatgatctgcgtgctgggtgtaatcattgcctgtgtatgccttttcaatggcctttaatcctaacttgatcagaattttcagggagacaagcaggtttctgggtactaatgcttatatttctcttttgtagcaaacattaaaaaacctatcccccatacatttattcattcactgtattttatggcaaatgatatatgcaggatctcaggcatttatgaaattatacaatggtagggaatttcaagaaaagtactatttttacagctttctgatctttttgttttgttttgattgcttttttccagtgttcctctagcaaggcttaggttttttacactttcctcccaactctgttactgagacttctagctataaactattttctaaaccttgaaagcattttaatttctatccagtgcaatatacaatggtaatttagaatgcttataatgtccagttcctctatcacataatggatgaacctaggcctcatatgtgagcagatatgagaagaagggatataatcacatttggcttactgagatactaataatcaacagttttatctttgttttatcaacaaa

SEQ ID NO: 56162 - DNA, 1014 bp, Homo sapiens
ggaggctgaggcaagagaatcgcttgaacctgggaggcggaggtttcagtgagtcgagattgtgccactgcactccagcctgggtgacagagccagactctgtctcaaaacaaacaaaaaaaccccatcagatcttgtgagaactccctcactatcatgagaccagcatggggaaaccagaccatgatccagtcacctcccaccgggtccctccctcgacatatggggactacaatttgagatgagatttgagtggaggcacagagccagaccatatccctggacatgtggcagagttcactggtaatgatggtggtccaagtggataagagattttctgaaaatgcgtctgtgtctgttttcatcgagaatgtacataataatgatttttacactcctttctgctctacttctgttttggtgataggcagtcgatgatgtgaagaaaggttacatcaaagcagaagaaaagtcctatcaattacagaagctatacgaacaaagaaaaatggtcatggtaagtttatgtccccataatccctttaaaaatgccccttcctacctttaaaacctatagtcctagtcatttttgaaaggattacaacctggttagtggcttaactaattttaaaaaaggaggggaatagggaccttgatgcaaagtccattgtgtttctccatttaacacacaaagatcttgaattactgtgtattagtacataattttattattattttggggggtggggtgggggagggacagagtcttgctctgttgcccaggctgaagtgcagtgtcgcgatctaggctcactgcaacctttgcctcctgggttcaagcgattctcctgcctcagcttcccgagtagctgggactacaggcatgtgccaccacacccagctaatttttgtatttgtagtagagacagggttttgccatgttggccaggctggtctcgaactcttgacctcaggtgatccacctgcctcgacctcccaaagtgctgggattac

SEQ ID NO: 56163 - DNA, 1009 bp, Homo sapiens
catgcctgtaacccttgcactttcggtggctgaggtgggaggattagttgagcccaggagttcaagaccagcgtgcgtaacatagggagaccctgtctctatagaaaatcaaaaaattagctgggtatggtggtgtgtgcctgtggtcccagctacttgggaggctgaggcaggaggatcactggaggctaaggtgggaggattgcttgagccctggaggttgaggtttcagtgagccaagatcatgctactgcactccagcctaagtgacagagcaagacctggtctcaaaaaataaaaagaaaagaattgtctcagagtcctttcccaacttagagatgggtgtgagaccagaggccaggtcttcaggttgttgggtgagaatactctttgttctttttcttgcaccacatctcaatagctctttattgtgtttaataccatagtaaccctgtttcctgtttctccttccttttttttttttttttttttttttttagtacctcaacatgctaaggacttgtgagggctacaatgaaatcatctttccccactgtgcctgtgactccaggaggaaggggcacgttatcacagccatcagcatcacgcactttaaactgcatgcctgcactgaagaaggacagctggaggtgagttttcagcatagggctctggctgcgaggactggagatactttgatgctcacttgcttgtgacgttttaattccattttagggggaaatgaaatcaaaactgtattttgactggggcaaataaacaggcatggaatccacactgatcctcaacttcattggctgcttccactgatttgtattcttctatcacagtcctttctctgaagcgatgcagacatccattcatttctcttctgtctcctggttcagaaccccctacctcagttccccagcactctgaaacacagactgtaccttactcccttgtcttggttgtccagaaccaggtaattgcatttgaatgggatgagatg

SEQ ID NO: 56164 - DNA, 1733 bp, Homo sapiens
tttctttaaaatttataggcctgtggccaaatacctgggaccctcacctccatctctgtctttctaggaatattagttagagactgattatctcatgtgagccaggacattcttccagcaaggttggcctctggatggtgaacgggctgtgcaaaaaagccctgcttcttcccttgtctagagggtggacattggctacaggctcttccatctctcatgacttcatggaccctcctctgccagttttttaaatcagatcaccctccatgttgttcctgacccacaggggaagctgtcctcagttgtagccgtcttgactggatgagtcctggcagtctttctaggcgaaccaagaatgtttgtgtgagggaaggtgtttgctgttgctttactgctgtctgtatgtgccagtgctggaacagaatttggaagattctgaataattagttacttattctcaaagaaaatctttgaaagaatcaggaggtcaagtcaagaacatgaaaatttatattttagtacagtagaaagaacattgggctctgggaattttatctgggttttctcctggcttttttttccctctgtgtaattttgggtaaatcagcctccctagctttcagttttctcttctgtgaaacaggaagactgaaccacgtaattaatatccaaggtcccttccggctctaaaaggctatgattctagatgagaagttatatcaagaaagatgtggccaatcagattgagtcatccaggcatacctttttagcttctgtttgtggagttgtctccagataagaggagatgtgccttcccaataactctttttttttttcctttcagaacattttccagatggcgaggtcacagcagagagatgtggccacctagcctttccttatccccttcccttcccttcacccccatcctcttactcctttcatgtcccatttcagacagagtaaccattaacaaaaaagaagagaaaaagttaaagtcgttatattcaaaagccctaaactaaatattattaataaccccctctgaatttcatgtctctggaattgaggtggtagtgaacagcagatcggtcagcaccagaagtcaactgagttaaggcaggaaaagaaataagcccaaccaacttgccaaaggtatctttgtcctttcacctgggcctcataccaacagcctctccttgtactatatttttaaaactggaactatgaacttcatccatttgcactgttcagacatatatatgtatgtatgtaaaaattatatatacacaaattagctgcacgtatatacatatatatatttctttttaaatttcatattgatggcagtaccttttttagcttgtgtttttacacacctttcactagaatccatgacctccctcgtgctctctttcttttgaaacaaactttaaaaaggaaaaaaaagcattttacagggaaaaatacctctcctcatgaaggacttgaaaagtttacaacctgcttggatttttgcccctttttttgtattgagtatagattccggctcatgggttgccatagagtctaggaacaaggagtatagtttctttatcttccaagagggtgctggggaggagaaagaggtgtgtttctcaaggttaacaggctgtagttctgcagggagagcctgaagtcctggtatgggctcttgattctgtgacaatttttttgatccatctatttctctc

SEQ ID NO: 56165 - DNA, 2078 bp, Homo sapiens
aggtagttggcctgttggcagaatttatttaggaacagcccttttgaaagtgtcccagtaacaacgcacccagctgcagcaaggaggtggggaaggagggcaccccaaaggacagcgccttcttctcttccacccatgcacggccttgggtgatggaggcgggttccctgtggctgcgtggatcccataggatcaagcccttctttgcatgaagcagtgttgtgactcttctctctccccttcctctgcacttcctttctgtaatccctactgttcttcttagtcccagcttctgcccagggaggcttctacccagacttcttttgcaatttgtccctgggaagagggggtctcccagtgcccccagcttcatcccagcagaaccagcaggatcctcctggtctctcactggccttcctccacacttggtttctatcctcaggggtagaagctcagagctttttatggcccaggagaaaatgtagaccctgagaaacctgtccctgcagaaaggttcccttgggccatgctttgggccctctgctctttatatgtttattctattctccatttttccaccccgtccttaccctaggcctaaacacaggtacagatatgtgcatgctcagggcagctcctaggcctggactgagctctcaggggggaattagataaatattccaacatcctcatgcctggcccatttagtttcatcctttagttacccaggccagtagctttgggttatcccttcctgtagctccaaacccagcacttggagcagcaaaatagggcactgacaggagatgaaactctctcctatctcagaatttgccaacttctgggctgggctcctaggaggtagttttcttgaaggggactgcatcctagttgacctgaattttccagaccaggagggactgctgtgctctcccttctcgccatcatactgtttggctagattcattcagcagtagaagctgtttgatctgttgaccccagcatactgctgtttcttcaccagcttcattgtgtcacagtagcttcctttgggaggatgatgtgatagaacactcagagagagggagggagaagagagatagtgggtatgcttctctagctccccatcttccaggtccacctcttgacttcctgttcccctaaacctgagcacatcacgccaggcctctttgctgccaggacagcatcagctcactcctcagcaataatctagggtatgtgggaaggtcagggctgtggtaaggaatagaatcaaagaggggagtgatacggggtgggggcacttggccgcctgctaaacttggacattaattttatatcatgacccccttttaagccagtgagctgggcttcagtttttcccaggccatgcacatttaatttatttcagagaaactctaattgtattttcactgcagtatcttgtattttttatttgtgatttaagaaatgtgaagagaaaatacacagacacaataatggctaacattgtttctttcattccttgttctagagctaaccactctaaaattgtttggtaatgtcacttagtgtaattaattgtaacatattcttttaaataaattgatttattgatcaaacacttctttggtttcctagactacaaatcctttgggttgtgtgggaagaagtgaactgggacctttgagatttgagtcagagtggtcagtctgaaaagaagaaacatctaaccagttttcccaggtaactagtgtggcagttttttgagtgcagggaatggagaagggtgaggaaagaagccacaggaggcccttggtttgcagttctcttcccagtggctcctttgaaaattccttcttctccttcagatctcagaggtgattgagcttacccctcccatctgcaagcttgcacaaaaatcctttgaagaatcacaggattcctttctctgccatgcagatagagcctggcagagcctttggtacagatcttagcaatggaccctcctctccacccccagcaacaggtatatactttttcaggtaaatcgggaaagtttttctctttgggatctg

SEQ ID NO: 56166 - DNA, 1059 bp, Homo sapiens
gaggctgagacaggaggatcccctgaaccaggagttcaaggttgcagtgagctatgatctcaccatcacactccagcttgagtgacagagtgagaccctgtttcaaagtaaataagtaaaataaataaactatagcctgcctcacaaggttgttaggaggtaaaatgaggaaatgcacaataaggacttggaacagaatcacatatggagcagtggttagtaaatggtggtgtcacaactggctcccagtatccacactggcctctgtgcagaaatggaggtccagatgtgagactgcaagtcctcagccttcagagggacagagctggatacaggggagagcccccgacaggggagatctccttgtgccgaactctgcaggacattccagaattaagccccaaagaagggctgaaggacaggatcatgaagccatgaacaaggcctggatgctgctcaaaagcaagggcccggccttccctgatgggattttctctctcaaacctcattctctacctccctcccccttcccagtgtgggtagggaacaatcccctaccctcaaccttccaagactcttatttgatgcttttaaacttttttctttatttagacagaaaagaccaactctttaaaagtaaaatgcaataaataaataagttaagcatagagaactgtctgaaactgactccccggtctccccttaccacccccacccccaccccattttcttttccctaaaacctcttcctaaagaaaatgatcaggtaataaaccccttgacccctccccacacccctcctcccaatacccaattaccccccaaagcaaagggagaaattaagagagagaaaaaaatccaagggcaacattgtctaaactcccagaaagagagatggcagcgtccgggccaggccgggcgggctggataacgcacgggtggtagtggtatttacacagagggaaccagcagagactgtaaacatttttaggggttcaggggaaggtcttttcctcgtgaaaggaggagggtctctgtggctgactggcagagaggcag

SEQ ID NO: 56167 - DNA, 1044 bp, Homo sapiens
tacaggcacacgccaccgtgcctggctaatttttgtattttagtagagacagggtttccccatgttggccaggctggtctcaaactcctgacctcaggtgatccacctgcctcagcctcccaaagtgctgggattacaggcataagccactgtgcccagccctagctctcctttttctgactgggagaaaagtcagggtgaaaagctgggattaggtggtgctaaatcttacttacctgactgatctctgagaattcccattgttttgtgtgcaggtaaatgggcttgatactgtgagagtgcctatgtctgtcgtgaactttgagaagcccaagaccaaaagatataagtactggttagcccagcaagctgccaaggctatggcccccaccagcccccagatctaaatctactctccctccaaggcagcaaagcagaatcgggagcagtggagcagaaatgtgcaagcaccctgatctcactcccagctctgaccaaatacagaattttagagaacatctgaagacatcagactgcactgcgtatacatgttgaattcttcatttttgccatctttaactgtcatcactggggcagggaagtcctgttccagaagtaccaggctgtagatttgataagctagatgcagtagaccgaaaccatccaaaacctgtttagcttcttcctccattggagtttattgggacaaacaggagagccagccattgtctccagtacttgcctcattctcatcatccaaactgaacatttgtatcccaagcagaaataaagagaatatgttctttttaagtaagtgttgcttactggtcttgagtagatgagacaggacatccaactgagatttccttgagtcacagaggtttgctgctaaaaaggaaagaagagaatatcttagactgcatcccacagttactgtggtatgaacaaattgtgctgaacaagttgatgatgtgtttggtcttaacacttactcttcttagatacattgatgtagtcatcaatgtgaataagcacaatggattc

SEQ ID NO: 56168 - DNA, 1100 bp, Homo sapiens
ttggagagaacatggacacatgagaagataatcagtacaggcacccgccaccatgcccggctaactgttgtatttttggtagagacagggtttcgccatgttggccaggctggtttcaaactcctgggctgaagtgacccactttgggagacccaccttggcctcccaaagtgctgggattacaggcatgagccatcttgcttggcttgcataccctgtgaccctgacatgtttcctctcctttgactcaaactcataattcctttcagacagtgaaatttctaaaaagctgtcgcctggaggtagggatgaagaacaatgtcaaatgggagctgaaccctgaaatagttgcccgccacttctttaagaatgtgagtgagtgttcccaaaaaccactctacccctgaggtggaagctgcctctggaaaggaggcctgggattgatccctttgttaggaaggggtgtgatcatccagttgtagttaaggaaagtattcttggttagtttgcaggaatatgggaaggaaatggctaaggactaaggatggtcacatagaatttgaagactgataggaaaaggtggtggtttccatttatttcctgtctacctagggaaatgctggggatttgtgactcactggagaattgttacttttgtggatgaagtggttttggcctcaagccctgtttctctttgtgaatctacctccctttctgagaaatcagaattgaatttctctactaccgtctatgaaggtgtatgcccttctctcccatggaatcagccagagtagacaccccagttttattcatccctgtgcagggaatcctgtaaccctctttatgaggttccctagagtggcagtcatgaaaacagagttcatttgagctgagatttttttttttttttttttttttgcagcttggtgttgtggttgccccacatacattaaagttaccagaagagcctatcacacggtggggcgagtattggtgtgaggtgacggtgagtgttttgcatactttcttttttcttttctttctccttttcccccactttttcctttttttcctttctcttaaagacagggttttgtttc

SEQ ID NO: 56169 - DNA, 1027 bp, Homo sapiens
atggataaggggtcagcccttatgtcacctcaggactccactctgctgcttatctaccctaatcccttatccaaggctcatattcgactagtatgcatgttatggctgtatgaatgattaaaaaatagaacttgaagacttctgtactggttggccaaaagccctgcctgagcacttgtgcccacccaccctgctcctctgtggacactccccttcccccaaaatccagcaagtaaagagttggtatctgactcttccaaggctctgatccagtggtgacctgattagttggttcccagttcataccagttgagtatttttattatcatccctacccttaataacccaggatccttgtagggtaggaattgcaaactaattgtctaggccccttcaggggcctagacagcttatggaaattagtggagtggcagggtagggctgtagcaaaataggaaagctcacacgttatctaaaggaagtccacacaactcaattccatccagttccatgcaagaatgcagacttgatggtgctgtatcgtatgatttttgaacagaaactggaaagacagttttgtagtaaatctcaccaattttaaaaaatatcgactactgggccgggcacggtggctcacgtctgtaatcccagcgctttgggaggccgaggcgggcggatcacgaggtcaggagatcgagaccatcctggctaacacgatgaaactctgtctgtactaaaaatacaaaaaattagccgggcgtggtggcaggcgcctgtattcccagctacacgggaggctgaggcaggagaatggcgtgaacccaggaggcggagcttgcagtgagctgagatcgtgccactgcactccagcctgggcaacatagcgagactccaactcaaaaaaaaaaaaaaatcaactactaaaaaattgttgataaaaaaacaacattgtaagcaaaatttggttctgggactgccactttgagacctctgcatatttatccattcaacaaatatttattgaggg

SEQ ID NO: 56170 - DNA, 1184 bp, Homo sapiens
gaggcctgtggttgactgctgggccagagcccgagttcccactgcggcttggcctaatctccctcccgcttacttttttgggtggcccacgttggtttctcccatctctggtcttaggccactgaaaagagagatgccacagtgttggagggggaggtgttgggcaagaacagagtccacagggcccgagtgctcctctcagccttgccaggcccactggtcttctcagcctgacctctgctcaggagtaacttgaatacacagtgctttccattggtgatatcatttcattactctctgttacctacaatcaccccatggacaggcaataatacttttatcctgatcttgctgacaagaaaacgtaggtctagagggagaatctaagtgactagaagtatgggggccccaacgttttctgcccctgttccagacacccagtgccctcttattctctcttcccctccatgtattaaaatctgctcttaatttactggaaagaacctggaaaactcacttaccgcctggtcctggggggaccacagcttacagtgtgagcactggaagcttgctgctgggcaggcacgtgtggctgggggttgggtgaggaattgagtgctaatgaagggatttcagatacccatgtgccctgtccccgtcagggtcagctactgcctctgactcacctcaagtctggcctgagggatgatggtttaagaatgatggaaataatattttggggaatggcgggcaagccatggtctccctgcccacttcacatcaacaggccctacatgtgaccagtgtccaggccagggactggaggtgagatcacagcaatgtgcattcgccctccagagaggctgccacttcttttgcccctttggtgggagacacgtcatagattaaaaggggctttggcccttctcttcacttttctggcctgtcccgccccagggctccccactcagaggggaggcagcaggtcagtgatggtggaaaagagacccatgtgctctgggaaatgctaaaaacacctacagtaaccagggatcccaagctttgcccagctacctttcaaggaagagctgggagaaggcctcctgtggtcccatgaagctcagcagagagtcgtgggcattgacaggaacagggcaaagcagagatgagcttagggccagcag

SEQ ID NO: 56171 - DNA, 1223 bp, Homo sapiens
caagaaaacttacagtcatggcagaaggcaaagcaggagcaggcacttcacatggacacagcaagagcaagagtgcaaggcacaaggtactatacacttttaaacaaccagatctcatgagaactcactatcatgaggacagtaccgaggaggatggtgctaaaccgtccatgagaaattcacccccatgatccattcacctcccaccagggcccacctccaactttggggattacatttcaatatgagatttgagcgggaacacacatccaaactatattccagtgttttttttttttttcctgtaatactttttccagctggctaatttctgcttatctaatcaatattcaagtcaaagaaccccttcctgaacccctaatcctagatgagtacttctcccttatcccctaacttcctgtgcatagccactggaagcactttcaacatggaagataatgcctgttcttaacctccatctccagtgtgctgggcttacctgtgcttgattaaagtctggaaaaaaagaatggaatcagcagacctgagcataatcctggctctgtcaatagctcgctgggtgatgttgagcaaatcattttccctctctcagtctctcattttcccaaggaggttggaccagatgatccctgaaattcccttccattttgaagtgacaagcttatggggagaagaaaagcagcaagataatcttagaaattgggagaatatgttatgaaatagaatgcacctcccattacttacttttctttttcttctgtcttttagaggtcattttcttctgaggaagtcattcttaaggactgttctgtccccaaccccagctggaacaaggacctaagactgctctttgaccagtttatgaagaaatgtgaagacggctcctggaaacgtttgccttcatataaacgtacacctactgaatggattcaagacttcaaaacccattttcttggtagaaacagccactttcccattaatatatctgagcatcaaatataaagctaagaacagattgaagtactagttactacctgaaaaaaagaaagaatataatgcaggattatggttctatagtcaccaattttatagaccagaaatcacaataaattttgcagattggagagcataaagcctattgtcaagaataagactgctcccaccctggcattcttatcaccattagcaagagtgaagaaagg

SEQ ID NO: 56172 - DNA, 1032 bp, Homo sapiens
agttcgctcctccctgataagagttgtcccaaagggtcgcttaaggaatctgccccacagcttcccccatagaaggatttcatgagcagatcaggacacttagcaaatgtaaaaataaaatctaactctcatttgacaagcagagaaagaaaagttaaataccagataagcttttgatttttgtattgtttgcatccccttgccctcaataaataaagttcttttttagttccaaatttgagacagaatgtttgttgttccctcagaaattcttgttccccaagaggcagcttgcccttgggcagccagcacacagcagagcttttcttacacagcagagcttttctcacagaactggcaaaatgagaaaacactcttcattcaggcttggagtctgacttctctaattgttctgcccttgtagctgtgtctatatgaaggactcaaacttgaaggattaggagaaggctctacaggaatagatggtaagtttataattactgggcacagttttgcccagttaaatcagtgcttttctagccagcactttgcatgcctgcaatgtctgaatccaattttcatagcaaagtgtcagcaaacctaaggcagaactaggagaaccaatcaggagagggtgtagcttgacaccttggtaataacatcacattagcatctattaagtcaactcccagatgtcaggaaatatggtaggcatgacttatacacggggcagtacacttttgttgaaaatgaagtgtcagtactgatgtcttgataatcaatgcaaaatgttcctcctagcccttttttgtgcctgttagaagcttcagggtatatgtgcatcaatgctatatgcttattaataacacagtactctatgcttttatggagaggtgatatatgaattccatgaattggcacatagcattgttccaagtaaataggtcaaagaagatggaatatttactttttttttttttttttgagacggaggcttgctctgtcacccaggctggagtgcagtggtgcaat

SEQ ID NO: 56173 - DNA, 1030 bp, Homo sapiens
ctgctgagggagggaggtccacttgttttctttctacagcagtttggctggggtttgtgggagagggccctgtgtgacgtggtttctctactgaaagggttcccttgctgtcttaataagtggaaccagaaagagatggaggaagagcaggcttgatgaaggatcttccaatcatagattaatttggcccggtgcagtgaaacagacagacgtgcctttggtacttggttcaccacctgtgctttggccgaaggaatggcgctgcccctagccgtggacactgctgcctgtccagcctcagtccagctctgcctaagtgaaaccaggagctctgccttgttggctggggtggaatgcagagcgctccaagccaggccagcacaggggagccctaagccagattctgggatgcattaagcccaccccgttttctgcccccacccagttccgtctctgcgggagcttctgcagggcgtggttagcacaaagggctccaggattctcccagtggtctgaggcctgtgactcagctgtgagaccatgtgggtgtggccggttgcagatactctcggtggatggtttggacagaacactccctgaaggaaaaggagaactgtgccatctcagagggcattttccaagaggaagtgagtcacacctggtctggctgccagtctgcaggagaggtttctcgactgaactgccggtgagggcagtaattagatctgcagggccttggcgagaccgcttttcgttatcggccagtatgcgcctggcagcctgcctcagccttacttgggaggtagcttttcccgctaagaggtttgcagttgttgcggatatttttccccagaagcttgagtttcagtctccaggaatggagttttatgttgtgcgttttaggtgaggccaggctcatggaaacacccagtcggtgatctttgcctccaacatgtttcagcaaattgcaaaagataatgccaggggttggagtgggaatgagttcatataacttattggaagtttcttc

SEQ ID NO: 56174 - DNA, 1085 bp, Homo sapiens
ggccgccgagacccccagacggacctcctagggctaatctgatagtgcctctgaggtcgataggactccacgtgccactccctgcagggtcatccagcaagtaattcctagacccgtaggtggccgcagagccggttacctctggttctgcgccagcgtgccccacccgcaggacggccgggttctttgatttgtacactttctaaaaccaaacccgagaggaagggcaggctcagggtggggatgccctgaaatattcgagagcaggaccgtttctactgaagagaagtttacaagaacgctctgtctggggcgggcgaggcctctgcgaggcgggtccgggagcgagggcagggcgtgggccgcgcgcccggggtcgggggagtcgggggcaggaagagggggaggagacagggctgggggagcgccctgccgagcgcccgccaggctcctcccgctcccgcgccgcctccctctacccacccgccgcacgtactaaggaaggcgcacagcccgccgcgctcgcctctccgccccgcgtccagctcgcccagctcgcccagcgtccgccgcgcctcggccaaggtgagctccgcccggcccacgcgcccctcctgggtagtccccaggcccggacctgctgcccggggaaaaccctgcacccggcttcgcggggcgtccggagcaccgcggggctgggcggggagcggctggtggggaatccgctgctcagtgctccgggccacacccaaacgaggccagcagcgcccctccccggcccgggcgcggccgcccccagacccacgcggaccagaggagggggcacttgttctttaggaggggaccgtggtattggtgcgcctgaacctcttccctcctccctttatgtttgcgttgctttactcccacctttcctactttcccactcgtctctcgggttaccgaatccctcctacacgcccctgccctggctggcgtgtttcttggtgggttccgctcgcaggccgggtctgcatgttcgtagcctgctcccggctgtaccgcccaagtaggcgcgggtaggacgagtaggcagctggggcgtc

SEQ ID NO: 56175 - DNA, 1034 bp, Homo sapiens
aatgcaagagaacagcagcaaacaagacaaacaaaatccttgttcttatgggccttacattccagtagggagaaaaagataataaatgagtagcataaaaacaaggtatcaaacatgaaaagtgttaagaacattggcagcacaaatgaggaatatatggtagaggctgattggggtgatacttttttaaaataaatgccagagaaagcttctgtcacgaggtgactttttaactgagacctgaatgaaataaggattgagccacaccaagatcgagaagaagactattctgatcaaaagaaatagctggttcaaaggtctcccggtggggatcagcttgtcctgctagaatcatggaaagaaggccagagtgattagaaaacagtgatgcagaggacaatggtgaaagatgagactttgcagggccccatcctataggaaggtcctgagaacaaagctggattttattctcaatgtggagggaaactactgggaatttcatgtagggagtggcacaatgtggtctacctttttgaaagggatggggagtcccatcaggaagctgtgttctaggagaggtgacctggactgggatgacaggagtagagatgaaaagaatcatggatttgggctgttttgtattttgagatagaaaaaaaaaaaaaggatttagcatgtagatgatgcactgaatgttgagcagcttccagattttgaattctttcaccctgattctccaccttctcatttagtttgctggagagagtttaaattatagagaatatttgtgaaggagactcatcttacacatgaacacatatgtcatataaacagcagccaacatatgggcgttcctgttgatcttgaggcccaggacaagccatggccctttgcatttctctctcccccaggatcacagtcctagcttagatgcctttcttctaagtccgtcttaggactctttctcagtccttctaggtatagctacttactcccttggtgtcataacagtaatttttttgtacttatgactt

SEQ ID NO: 56176 - DNA, 1567 bp, Homo sapiens
tccctttgtgacaaagtggtctttcttgttggatttgtgctaagagtttgtgttggtgatgttggctatcctcttcaggctcccatacctggtggccgttctgctgtgagtccctagactggaatccctgtccctggttttggtacccttcctgtcctggagtctgttgacttagcctccctgatcttcctgattgttcaacataagaggcttttcttgttccttcagtcccttggaagtacttattttgcccttgtatttccccagtctgtgattgaatatagtgggaactctggccttgtctgtctgtctgaccataatgatagctctggccttgtctgtctgtctgaccgtagtgggaactctggccttgtctgtctgtctgaccatagtgggaactctggccttgtctgtccatctgactgtagtgggaactctggccttgtctgtctggctgaccatagtggaaactctggccttgtctgtctgtctgaccatagtgggaactttggccttgtccgtctggctgaccataatgataactctggtcttgtctgtctatcttaccatagtgggaactctggccttgtttgtctggctgactgtagtgggaactctggccttgtctgtctgtctgaccatagtgggaactctggccttgtctgtctgtctgaccatagtgggaattctggccttgtctgtctggctgaccatagtgggaactctggccttgtctgtctgtctgaccgtagtgagaaccctggccttgtcggtccatctgactgtagtgggaactctggccttgtctctctgtctgaccatagtgagaactttggtcttgtctgtctgtctgaccatagtgagaactctgatcttgtgtgtctggctgaccatagtgggaactctgaccttgtctgtttggttgactgtagtgggaaccctggccttgtctgtttgtctgatcataatgataacactggccttttctgtccatttgaccatagtgggaactctgaccttgtctgtctggctgactgtagtgggaactctggccttgtctgtccgtctgactgtagtgggaactctggccttgtctgtctgtctgaccataatgataactctggtcttgtctgtccgtctgaccgtagtgggaactctggccttgtctgtctgtctgaccacagcctaattcctgacctagcctctcagactgtccacaataagagcctgatttctgttgatttgtctggttaaagtgagaggcttgtccaagtgtttcagattgttgtgtatgtctttcagactgaccataatgagaatcctgaattggtttttcacaccgatttaaggcaaagatatgtccctgccatttagcctggccactggtagatttgtgactcacttttttaccagagctggagtcttgactttgtctctctgactgatcaaagctgaaatccttgtcttgtctctcagactgattgtggtgagaatctctgtcttgtctctcaggctgactgtggtgggaatctctgtcttgtttctcagactgaccatggtgggaatc

SEQ ID NO: 56177 - DNA, 1049 bp, Homo sapiens
ttcatccttaatatatgtcacttgccaatactaatagagggcaacagtcagctcatactgaagaatgctatctatgtggtcacttacaaacatatgtcaaagttggaactagagattctatttatttggccagaatatagttcctggaagaggtttcttttagactaacctttttcttgtgctggtagatatttggctattaacctattaacttattttgaattactattattttttcatttaacagctccacaggctagttgggagaagtagatacatggtcagttttggggatgaggggctccaatggtgcaacttctaccacttaagccttctaagacttactactaaaaagtttgaattgagggacatcatggaagtttatgatatctgtgagagagaaatgctgctagagaccccagcttctgttcacttcccatctccgtgcccttggatgccagcacagtgtcttgagcatgggaaattcttagtgaatatttttggggtaaaggaattattggattatggaagcactgaagaattgtatgtaaggtgcaaaaagctgtagactcacctgtatttctacgtttgtctcacatctagatccctgtttggactttttcctatgtatccatcagccaatccattattattaataacactaactattacttactatgtgttcaggattctacaagggaatcacaacagtgcagaaagattttagtttagttggaataaagaagcttcacatagaaaaatattttgaactccagggataggacatgctaagtgctgagtattagaaacctaggcgcatgtggagtcctcatggctgggcctggacgtcccttaggaggtgagcttcatgttgttcctgaaaggattcaggtgggcagagaagaaagcaaagaacttctgagtggggagaagggaagaatcaaaggtactaaggtgagagtttggattcgagtgagctggtaagtctgtgttgagcagagggatttaaaagagcagagggatttaaaagagtagacttagaaaatttt

SEQ ID NO: 56178 - DNA, 1031 bp, Homo sapiens
ttcctcactatgaaggaaagatttctcctcctttctctctctgtctcctataagctctctttgtcgtcctcaaggtaggtgttctttaaatgtgagactgactggctctctctagctccaatgcctgtggtagactgagattctaaaacatataactaggcttttatttcttgtggctctttagcactctctgttgttgcctatgtataattcttgcctctgaattagatgacgaattctctgagggaagagtccttgatttctccttctgattctcccatgagccctgccatagtgctgggaccccagtaggtgactgaactggatgatgtttcacctccacaagtccatgccccctgagcagtattcttttgggatttagaacttatttgcaacttgttggctcttggaaataaaaaagaataatgtgtgaaaattctagagccttacagagtatggggcaggaagatggtgttggtagatgaaccagtggtgggctgtgataatttcaggaggtttgggagatggctgctggtatcttgaagagtttacatgcagaaataacagaggaactgctttagtttctccagaaatatctggatgctaaagtttccaggccaaactgagaggtgggacttgaggcacagcccaagagccccagctgtcaccagcagggaagctgaatgtggtcatgtgtaccgggagcagcaggcaagttgaaagcagtgattggtcagaagcagattcatcagggcttctaaagatcatcttgccctgcttctgacccaggtaggtcagtgcccagtccattctttgtaggtgtcaattcaaagactccccagaggagcagatggcccactgtccccaagaagctcatgcctgtgtcttattcccttagctgtcaggcatagtaggatgccagatccaggcatctggcagggatgagaaagcaggcagagagagcagggagagaaaatcaggtaatgccagggagctttcatgagggattgagtaaggaaagtaatccttct

SEQ ID NO: 56179 - DNA, 1063 bp, Homo sapiens
acacaagcatatgacatgtatacttgtcccaggactctatgttctatgttttcctcttgtcacatttatggatccagtccaaggcagagagaacatgactctgaggtcaggcagatctgcaagggaatagcagttcttctcaggattgttgaagaaattaaatgagctcgaatatgtgagtgcctagcctagtacctggcatggggggttatgcattcagtgtgttgctctccttcccttccaaggtagcctggctgttatctcctttctggaaactcattgagcatcagagatcttgacctccttgggcacactcctgagtttatttaggcctacatttataggatgtgtcaggagctcaagtactttatgaacagagattaattgctcttatgatttaatgcattggccacccacactggtgagatgctccctgaactatgctatttgagaaacaatgaaggaactttgtgaggctaataagatttgtgctgttaatttaagtcttgaggatgtggactacagagagtataacattttatagaatttgtttaaagctacactctcatctttgccataacctggcctttcataatacattcccgtggccacctagcatcatgggtaaggctctcatcaaatgcttcttggagagcaatgcatcttgcagaacaggaggtgggaaatttccacaagggaatgactatgaatggggtgggagaaagacagggaagcaggggaagatcatttccattatttgttcagtggtgattttgggtgaacatctctctttagtccagaatgggcaggaaaatgatatgaattgtaattgttggcaagtgcgaaataatatatttagtgaggaatgtagtgtgaagcacatgaaactgcactgtcaggaagagaagttgaatctggggtcagaagaactggtttccattcctggttctgcaaactgccatcaaacttgaaggactcattctgaggcagagaatgaataaatcattacctttgtgaagcatcagaatcagcagcactttcctgtcccaggagaagagggaag

SEQ ID NO: 56180 - DNA, 1073 bp, Homo sapiens
ccatgactctgtggacctttcagtccaaaaaaaggaaataggtaaatggttattacccaacagtgtgagggatgctgcattaggacatttccagctcagagcagggcattgttcttactagagggtgattaggaaaggcttcccagctgagatggaatcttcagttggagtttgtcttttcttcatttccagtcctttgtccttgtcttctgtccactcctttctttgctgaatatttcctcagatttcaagtcccatctcacatttcttgttgtgttagacatcatgactgatttttccttggcctctacttcccagtttaatgaagataatagctattgccacccacatactcataagaatgcagaagtgttacaggggattaatggcattttaggattaaggacatgatggtagtttaaaagcttttagcgcctcctaaattaggagatctacctgacattgctaagcctctcagatttcgctgtggcaatagttctgtttctccttaggctcacactagctactgtttggaaaatttgggcacaattgtcttgggtgttaagtccttgtcctttggaccccacctctttcccttataggactttgtgataagagagcttagtaatgtggcacttgatgaacttacaagggatgtgacaggtgtcagggaagcttgatgattgtcagccacagccacagtgggaactgatgcagacttctcagtagttctcttgttcttgtgtcacagaccccactgatctgggtggggggggcaccagaggccttagaagcaggacacctttctctatctgggtcttcataatctgtcctgtcttctatttctgactccatctccccttcaaaactcccctgctctacttaaaatgatctctttgcctagccttgggtgcatttccacatctccagtaaggtggtaagtcctctgaagtaggtttcattctcccctcaatctctttaaatctacccatccttcaatgtccactcccaacaaaaccactcgagttctttaatctctctccaacctgcacttggggatcacatcttatctc

SEQ ID NO: 56181 - DNA, 1036 bp, Homo sapiens
ctggcctatacatgttcttttatgatccacctccttcatgaagctttctgtaattcctcaggctcctatttatcttcgtgtctctattaatcacacttttaccaaatatttatcgagctctttaaactatgctatgtactttacatccatcctctcatttgatgcttacaacaagcttatgagatagataatattatcactctcattttatacatgaggaaattaaggctaaaagagattaaattatttgtccaaggtcatagaggtagaaaatagtagtggtgagatttatatccaggcagtcagatcccagaacttatgggcctaacagttgcaaccatacagagctcctatttggtatggagacagccacactttgtatcatttacccacagattccttcacccaatatttcctagatactgactatattcaaaagaccttaaacagttttaaaagtttatgttaaaattgccccatcttcctagtgtccctgtgtggaaatctaatcttgtcaacttgactgcaagctccttgagggtagcttctttattcctatctctcttttaccctctgcccttttatcctgtcccagtatgctggatgtagatgctcacccaactgatggtcttgattggattatagcacctatagtctgtgacatgtgcaacagattctcaaattgggggagaagttagaagtcttctggtgaacttccctgattccaagtagccccaactacagctacaactaaaccatttaaggcaacacaataatttaattcaggggttggcaaatgatggcccatgggaccaatcaagcctgctgtttttgtaaggcccacgagctaagaatggtttcacatttttcactgattgaaaaaaatcaaaagaagaatactactttgtgacactaaaaattatatgaaattcaaatcttagtgtctataaataaagttgtattgaaacacagctttgcttattcattacataatattgtatatggctgctttcatgggacaacacctgctcaatgt

SEQ ID NO: 56182 - DNA, 1026 bp, Homo sapiens
attccagagaagggaagggactttgataaactaaggttgcgagctgtgaaggggttgagtcacgacactggatatgctgatttggctgccaagctccttcaacattccaccacaatgcccttttccaggaagagtgagcagtgggagtgctttagaacctggcatccaagggacctggtgggaagggggagtgaagaagtaaagctacagcaatatgcccagtgaataggtcctagggtgagccctcagcactttggatactggagtcaagccctctttcttctgctgtcctccttgaagctccactcagtgtcagagagggaagactatttaagatcacccaccatattagtaggatttctcagaaacagaaccaacagcatgtgtatttatagaaagagatttattacaaggaattggctgatgtgaatatggaagctggagagtctaaaatctgcagtgtaggacagcaggctagaaacttgggagagctgattatacacaatcctaaggcagtctgctggagaattttctcttgctcagggatgctagtctttttgttctattcaggccttgaactgattggatgaggcccaccccattagggagggcaatctgctttacccaaagtttactgatttaaatgttaatcccatctaaaaatatcctctgaaatgtgaaagggaagttcactatgccaaaagaaaaaaattaagcagaaggtaagtcatgcaagcaacggcctttccttttgttcctaggcccatagctactgataaaagattaaatatctccactctatgttcaccctaccttgtgtaaagcaccgatttactgagcatgagacggaaacataattgactattcccttaccttcttctccttttatcttgcaatatgtggatttagtaatgtgaccctaccctccctatttcttctccaccctgctttcaccctttaaatattgaagtcctaaaaaattatcattggggaaagcacagacctgtttctggagtggtccttaac

SEQ ID NO: 56183 - DNA, 1065 bp, Homo sapiens
cagaagggtttggtggttttatcagactgtttaaccataaaacgtttttcatccctgtgttcctgtgccccaccatttcaggcacttggtatttttactgcctcacccccatcaacagagaaaaggtggatttgatgtcatttattatatactttaaagtaattttattttgctgaatttgtaaatacatgcaaatgaaatattttagagctacaaaaacaaccatggccagatatgtatgaacgaggtctttcccagtccccctctgggttttgcacagatttattctgagggtcccttagtccaaactgggggatccgcagacaaagagatcaatatttttctcttctaaattcaaaaggcaaggtgcaggtatgagacattaaagtttgaaagaagacgctactgggaacatttttttccttctactccacccctatccagaatagaaaaaagaccatctaaacaagagtggagaggagtttggagaaaaagtagagtaggttgtagtgtatgggctgggcctgtgctcttcccttgccccagactgagtgtgaggagtggtgaataagaacaccacaaacctgtctgtacgtatgggaatcccagagctgagaggacacgtgtctccttttcttagtgtcaccaagatgactgcaaaccctgtagagaggcccttcagtgctgtggagtggaaaacttggtttcacatgtttggccttgcttgttggagaaattcagacccctgagtttctcttagccctaaaatggcatgagaggacatctgaaattatcaattattcttgttcccttcttagattcttgcttgtcttccttttcatcattctgatctatctttaagagaggtcacttttcaaattctatctttaagaggttttaggtctcaatatattgggttttcccttcaatatgggtccattttggactctaaacctcaagtttccttttatgtggttccctctttacatttattccttgatactttcccagacctgtttccagaaccaaaaccatctcttcatttaaaatattctgaaatttctt

SEQ ID NO: 56184 - DNA, 1787 bp, Homo sapiens
cactggagcagtaagaacactcatttatcgattaaactctctgtttcatataggaaaggtttgtggtgccctcaacaattacaagtgtaacagcaaagatcacttattacagatcaccatagcagatataataatagtgaaaaagtttgaaatattgtgagaattaccacaatgtgacacagaaacatgaagggagcacatgctgttggaaaaatggtgccgatggacttgccagacagggttgcctcaaaccttcaatttgtacaacacacagtctgtgaagcacaataaagtggagcacaataaaatgaagtatgtctgcatgcaaactcctctgaggtatacgagtaggagtagaactgctggtagacagggtatgcacatttcaaagaaatctgttccttatcctgtctctattttttcagtctgccagtccccttcctgccttctttcatatctatctaggattccatcatcacacttttgaagttgtgggcctcaatcatgttataatgcattgtgattgttgtcagcaattggtaagcatctcaaaaaagaacaaaccaagtcacccagatcactccccaaagtgggcagaagagaaaaggattgggttaaaggttgcaataacagtgaccccctcctgccaggcatgatgaatcttcctatctagacaaacttgctttaatctccttttgtttcccactctacttcctttgagagatgtcagagataatgatggtgagtgggctaaattcactttcttcctctcacttccttctccacttggctcttagcttcacctccactactccccatgcacacatgccttcagatataatatttacagctacttattgccttttatttgctgtgctctcactgctaattatcctacattatgtttcattctctttggttttgttgccaagaaatatccctatatccttactccctgccatcccttgctcttagaaatctggttttcctttaatgatgctgttttcctttttctgtgaagtggagcctggctgttctggtgaagtcactgtgggctagtagattgagaatgagttcatagtcacacttgagttcaaatctgaactacatcataggtgagctgtgtgtccttggatttataacctcaatttgcatactgaggagaagtttaaggatctctgcatcaaagagttattgtgaaggcaaaaaaggggtaagtaatgagacattggtacatagctcctagtatattccatattgttagttttattttacctgaaaagttgctactgctaacaaggcccatctttcctacaataatggagtcgagagtgtaaggtcttgcctaggggaaatttggctataaaattatccgtcccttcacacacatatagtttgggccaaggagggggcctgtaagggagcaattcccaacctttttggcagcagggactggtttcatggaagtcaactattccatggatgggagaacagtgggggtgggatggtttagggatgaaactgttccatcttggattatcaggcattagattctcataaggcacatgcaacctagatccctcctggtgtagttcacaatagggttcgtgttcctatgagaatctaatgcagctgctgatctgacaggaggcgaagttcaggcagtaatgcacggtgggctgccactcacctactgctgtgtggcctggttactaacaggccacagactagtactagtctgtagcccaggggttggggacccctgctgtaagggtttctggtttttc

SEQ ID NO: 56185 - DNA, 1022 bp, Homo sapiens
atttttgctgaattttaatctcctttttgtttcaagagtatatgaggtattcttttcctttccaagactgatttctctatgtgtatatttgattcaatttctgtcattccttctaggtccttgatccaacaacgattcctttctctgtatcaacagattcttactttctataaatcaccttccacttgacttagaactgttattcacattcagtaaatttttattgcatgctgcctgtgtttccagcatatattttaatttcttcctttataaaggatttttctttcttccttgcctactctcttatttcctctttactacaaactttttaaagaatcttttcacactgatatttaataagaattataacaacaagtagtaataaagatagccactaatatttattagatgattactgtggaccagacacttttctaagtacactatatatattaactatgtagcagacagttcacaaattaattaaaaatatatatattaggatctgtttctgggctatttattgttatattgatctgtattatctactcttctgccaatatgctatctggcagaagagtatttataataactttataaaatgcattttatcttccattacttagtgaaattccctctctttgggttctagaacaccattttctctgcctctcctccaactttgattcatctttatcagtgtccttcactgacctttcttctccgcctccttcatgtgattctatttaaagccctttacagcctgcctccaacttgcttttccagctgcagttcctgatactggtttttctacatgcttcagccaaagacatatactctttgatccctgagaacactatttcctcagtgtctttgcacatggagttcacttctctgcttgtgaagtctatgaatattgcatggctgatttgtcacaattttaagtcttcaacatctggagtgttctggcaagaatttgtaggtaaggacaaaccaaggtgggtggtgatgctcaggagccc

SEQ ID NO: 56186 - DNA, 1057 bp, Homo sapiens
ccaaagacttgaaacaaatgtgttacagtcaaattaaggaactatgtagcagtgacagatactcttccttttcatctgggcatggatgatattttttcaggtggaaacgttattgaactacagtagtaggtggaaagcattgtatttccatggaataactcctcaatatatttcccaatattgagcagcctcttagaaatagggagcaagatctttctgctgaaaacaagctaaagcccacatttgaatgtttttttttttcctgaaatgataaatccctattctttatgaaataatgctcttgctcactggcttgggaaaagaccctgatgctacttttttatgccactaattaacttactgattaaatatatacccaagaaaaaggacttgatggttttgataagtaaagacactaccgctgctgcatctttgctttcagagccttcaccttctgccacaataccaaaaattgggacacaccaaacttggggcacactaaaaattagggtacactaattgctgtaaaacaaagctttgtatctaggactggtaatgcatttgtaatattttgcttctaagaaatgtaaggttagctttggcaccatctataaatgaatgatgagctctcaaaaagacaactccaactaaacccaaagctctttaaaagcttttcattattcctcaaagtttaaccctcattctaacaagttattccactcagtattttctaacaaagtagcacaaatgcctaacagtctttggaaggaaccccataacaagatatatgctacagttttaggctctaaagaaagagacagaaatgcattgattcacttttagaacgaatttcatgatggattgcttgtctttcatgatgaattcatagatgactttcctatttcttaaattgctacttgagtaaattgcatttatgtttattattcactgataaaagtagcacctctgctcttggacatattcatagggtgaagtgctactaggaaaactgagaaaatatgagccagaacttcccccatcatggttacttcctcct

SEQ ID NO: 56187 - DNA, 1006 bp, Homo sapiens
aatatgtttttatacctacattaattatatcaactttatttatccaattaaattaactagctacttaatttactcactgaacaaagatttattattttactagttgcctaccattatgtcatatgagagtataaagaagtgaacaagtttgcttcctgaaaaaaaatggaatttaaagtttagttggccagatatacaaacttaaaattataatttattgtggtaaggtttctacaagagtacatcagagaggaaacattgggggtcctagaaaggttaatgagaggaaatgatgccttttgaaggatggattaggattagccaaatgaagaagtaggaagagaaagagaaggggaaaagattgttctaggcagagggaattatatgaacaaagggctagaggtgagagaagttatggagcattcaaggaactgaaggaaattcaggattgctagatttagagtttgaagagtcaagaaatgtggatagagagacaaatagggactagattatgacttttaagttatgttaaggaactttgtacttcattttaagagcaattgggaactattgaaggatttttagctgaggagtgaaatgattatatttgcatccaatgctgagagtagaagtagtaggtggcctgaaccagaggactaataatagtgatgaagagaaatgggttgttttgagagattattgatgagttagatggaggttagaaggtagtggtgtctgctgagagagagacaataaaaaatgacaccaggtttttgctttgggcaaaaagatgaaggaaaaaggttagtggggaagattatgagattcatagctgacacactgaatatctgacatctgatatctgaatatcatatctgaaatccacagaaatccaaatttaaggaattgaaactcaggagtctgatataaggtcccaaatatctaagctatcaaatctagacctgacagttttaaggtggtggacacattcttttgtgattcagga

SEQ ID NO: 56188 - DNA, 1049 bp, Homo sapiens
tgtaaacaaatgagcatggctatgtttcagtaaaacttatttatcaatactgatctttgaatgtcatataatttcacatatcatatattttttcaaccgcttacaaatgtagaaaacctttttatcctgtaggctacacaaaaatggatgacaagctagctatgaactgcaggctgtagtttaccactctttgctcctcttctgtatttgcttttcaggaagattctctgggagaggaggatctgagagaaaagaagggctgaaaagtgtgggacatcagaaccactaactcttgcatgagagaacaagagtgaaggtgaatttgtaaatatcagcatgtgtggggtggtggggaaagggaacagaacaagggacctttggctgctcgtaaaagggagataaattttgatttgatgtaagggagaaatatttaatatttgcattgactgaaaatgcagtgagctctttgtgaagtaactgaatttattgtcaagtatcatatgaatagttttttactattaaagaaaaaattaattctttcattacgttgttttctggatatgctcaccaactagaattttgttgggctttttttcctcgtttgtatcatgaaaataagaagcatattacatatgcgtcttggtctcttctctccccattgagaattacttattaagagtaggactagattatcacaaaagtcactttcaaaacagtttcttgttttttttagagtgtgtgctccatagtaacagagttggacatgaagattcctccatcatgggtttggttagtggtttttccacttggagatgataggtttcaggagaaaagcttttctatggtatgtgccatgttctaggtttttgagtgcctttctctgtgtgttggcagaagaatgaaaattacattcctttttatgacaagcacagtgctttgtgtgtgggtgtacattgtttcattaattcttacaacaaccctgttatctagatattatatttccattttgcagatgagaaaactgaggctcagatgaaatctgtaacttg

SEQ ID NO: 56189 - DNA, 1041 bp, Homo sapiens
acagctggatcagacaacttttggtgacatctcacagtgtggattatcaagccagtgtatcagtctggagcctaggttttttgcctttagctttgctcaggatgacttctgctcttctatggcaatacttgagaaggtaaggtagtttttttctcattttttgtttcatcattttaatccatatttcccagaatctacctctttctttacctcattctatcatttttctaatcaggccatcagttagttactcttgcaacgtgtactctaacagcatttcatgtatatgcttaaactaattcatagaacatggttactattaatatttgcatttcttttcacagtatgcatctagaaatcctcagctattttttgttttcttcatgaaatttttaattctaggaacttttcatatgagatatgaaaaatggttaaattcaaataacaccatgtccaccatattggccccctaattagagccaagatcacaaaatccatggtgtagtgttgagagcacaatctcacacacctcacagacttgcctttgactactggctcctccagttgccagctctatgactttgagcaaatttcttaacctttctgggtctgtttcctcatctatagagtaaagataataatacttcattttgatagttcttcagtatattaaatgaattatatgtcaatggtctgacactttgcctagcatgatagcaaggtattcagtaaatggtaattattagttttatataactatgaagtcttacagaattggtaaactcaatatgagacacttattgcaattgaatttttgcatgtgtgtttgtttccatcaagagagaagagcaagaaacatacatcttttcctttttcttttccaagaattttttttaattgagtccctctctgtgtgattatggaggtttttaaatgtcctttagggttcagtgtgatcatctctagaagatcggggagaaggttttcatctgttttaggaaaagagtagcttcaggagaatattgaatgttgaatacaaat

SEQ ID NO: 56190 - DNA, 1036 bp, Homo sapiens
tgtatcatttcataattaaaatcaatttttaaaacgttttttatttgcggcatgtttttgttgaatgaatgcatggtatgaactaataatgatgtgttcagtaattttcatgcatataattaataggagaatagttttgatgacaattttatttatttacagtaatatattggcttattttactagcaggcttgcatgtctgtttgtttgtatttagagactgggtctcactctgttgcccaagctggagaacagtggcaccatcatagctcactgcagccttcaacttctgggctcaagtgcttctcccacctcagcctcccaagtagctgggacaacaggtacagtccaccaaacccagctaatttttttatttttttgtgtgtgtatagacaggttctcacttcattgcccagactggtctcaaactcctgccctcaaggaatccttctgccatggcctctgagccaccatacctggtgcatgtttatgtaacgtgtctatattaaaaaataagaaaaaacattgataacacttaaaaagatgggctctcatattaagtcctcctttaacttccgctacacctacactaacccatttccctttggttctatttccaaaagacaacatgaggtggtaggaaaagccctggtctgggatatggtatgcagtgttgttctgattaacagttgacatctattggttgtgtgacactggaattcacttttttcagatgaaatataaagggaatatcatggggttcctaacctggcaatatctatgagtgtactttgaaaggtctgtaaagtccctgaaattataaggaaacatttgtaagtgggtctccgcatttttttgaggggaagggcatttaggagagggatgctcaaatagttccggaacaagaaaacagcaaaaggttaagagccattgacctagatgatcttcagtgacctttcagctgtgaacttctgttaaaagtaatccttgaggcttgaggctctttttttgccctgtcctgtttctctttccattt

SEQ ID NO: 56191 - DNA, 1063 bp, Homo sapiens
tcctaacaggaggagggattttctaacaggaagagtggtgctctaacaggaggagggggtgggtctaactggaggaggggtgcactagcaggaggaggggtgccctaacagaaggaggggtgccctacagggtgaaggtggtgccctaagagtagaagcggtgccctactagaaggaggggtgcctccacaggaagaggattctctaaaaaggaggagaggtgtcatgacaggaggaggggtgctctgtaacaggaggagagttgtcataaagggtgaaggtggtgccctaagaggaggaagtgtgccctaacagaaggaggggtgtcctaacatgaggaggaatgccttaccaggaggaggaatgccctaccaagatgaagggtgccctaacaggaggagtgagtactctaacagcaggagggtgtcctaacaggaggcagggtgcgttaacaggatgaggggtgccttaacaggagaagaggtgccttaacaggatgaggggttccccaacagaaggaagggtgccaaaacaggtcaagggatgccctcacatgagaaggggtgctctaacaatgccctgaaccttgggtgggagtttccattgagaatgtggaggtcccttgggcctagcctggtgatgagctgtagaagaggacgtggctgtagtaggagcagaggcactgagtctgtggctgcttcctcccgcctgtcctccaagacaggctttcagttagagaaggatttaatttcagggttgccccccaccttctctgaaacacagctgggacagctggggtacactcctggtctgactccgaagcactacccctggctatccttaactggagtcctggtgcccgctcatcccagtgccactctgagtagaacaggtaagctacggtatcatccacctacactggcacctacccctctctactggggatgaaaggctggctcagcgtttccaattcaggaaagggaatttctgtgactctggcctgtatggttaccagataactctcacttagaaaagtctggaagaaaagatgagcccatgggac

SEQ ID NO: 56192 - DNA, 1749 bp, Homo sapiens
ggaggttgggttgttaatttgagatctttctattaatatcttctttatatatatatattttttattatactttaagttctagggtacatgtgcacaatgtgcaggtttgttacatatgtatacatgtgccatgttggtgtgctgcacccattaactcgtcatttacattaggtatatctcctaatgctatctctcccccctcctcccaccccgcttgatataggcatttagcgctataaaattccctcttgggaggatagaggagcgaggctggcgggcacaccggtgagcgggccggaagccggagcagccgaggagtctgcagcagccgcgtggcggagtctgggcgaggaggtcaacgctcctggaaacttgggctcgtcctcgcgcctctgctccaggagcaatgacgatggtcacgccctggtcgcaccctggatgcggttctactccaacagctgctgcctgtgcctccatgtccgcaccagcaccatcctgttaggtgtctggtacctgatcatcaacgccgtggtactcctgattttgttgagtgccctggctgatccggatcagtatcacttttcaagttctgaactgggaggtgattttgagttcatggatgacgccaatacgtgcattgccattgcgatttctcttctcatgatactgatatcatgagaattaaggctaattacgtaattaaggctaattacgaagcatacaggcaacacgcattctggatcatcccattcttctgttaccagatttttttttttttccgagacggagtctcgctctgtcgcccgggctggagtgcagtggtgcgatctcagttcattgcaagctccacctcccgggttcacgccattctcctgcctcagcctctccgagtaactgggactacaggcgccagccaccacgcccggctaattttttgtatttttagtagagacggggtttcaccgtggtctccatctcctgacctcctgatccacccccttcggcctcccaaagtgctgggattacaagcgtgagccaccgcacctggccctgttaccagatctttgattttgctctgaacaccttggttgcaatcactgtgcttgtttatccaaactccattcaggaatacatacgacaactgcctcctaattttccctacagagatgatgtcatgtcagtgaatccacctgtttggtccttattattcttctgtttattagcattatcttaacttttaagggttacttgattagctgtgtttggaactgctgcagatagatgaacggcaggaactcctccgatgtcctggtttatgttaccagcaatgacactaaggtgctcctaccccggtatgatgataccactgtgaatggtgctgccaaggagccgccgccaccctaggtgctgccaaggagccgccgccaccctaggtgtctgcctaagcctttgagtgggcggagctgggggcagcagcttgacttttcagatatctgagcaatagtcatgttatttcacttttcaggtgagctctctgcgcttgtttgttgccgaagtgctactttttaagatttagatgttaggttgaaacctgtagttttcctcaacatatgctttgttagaacactgtgatagattggctgtagaatactttctgtaggattgggggtgtaacaggcttcactaaccctccctaggaatgtaaacttcccccaaatctagatggacctagagtcagagaagtctgct

SEQ ID NO: 56193 - DNA, 1549 bp, Homo sapiens
gctcccccgctggagggatagtcaggagcagcagtgctgtgccaggcaggccttgggctaagggatcgcaatggggtgtgctcttttggggtgcggaagggagtgccctgggtgtgtcattgccaccatgtgtggccctgtgaagctgtgtttaagctgcctttgcagcctccattcccctcccctgcccagccatactcctcaacttctggatcccctgaaggacagttctcagctgtgcccaaagctactgttcctatatgcttcttagaatccttaagccacctctcttgccttggccctagtgtgctctctccttccccttcaagccctgggctgtctcctgatgccattgtgtgtggcctgagactgggtggttccaaaggaggcggggctagtgcaggcagcattattggggtgtgtgggtgagaagtccttgctcccatggcactgactaggccctctgctgccagctccaagcccagccctcagccatggcatgccccctggatcaggccattggcctcctcgtggccatcttccacaagtactccggcagggagggtgacaagcacaccctgagcaagaaggagctgaaggagctgatccagaaggagctcaccattggctcggtgagtggcctcctccccaggaccccttttcccacccttgtcctttggaagcaggattaggggagagagaggtgccaggtgcatctgactcacatttacccacattctgaggccctggtccacatgtagaccctgagctgtagacccactctcccagcgggtaggggatgcttccagccggatatccatctctccaaatgaggaccagtaactgagaagtagctgaggagaagcaatgccaaagtgacatgggtccttggtgatgagggagcacagagccacttgcagagaggattgcctgggagggggaaggggaagaatccagggttgtcatcaccactgagtatggatttcacattctaacacattagaagctgcaggatgctgaaattgcaaggctgatggaagacttggaccggaacaaggaccaggaggtgaacttccaggagtatgtcaccttcctgggggccttggctttgatctacaatgaagccctcaagggctgaaaataaatagggaagatggagacaccctctgggggtcctctctgagtcaaatccagtggtgggtaattgtacaataaattttttttggtcaaatttacccttgcgtcctggcttccgaatgatttctgttcctccttggcttagtgggacaccagccattggaagatttgctcacggtcaacctctgaaaatgactcattgactcgccaggccagaggacccaccctgacaaggctgcctctagcacataaggtgcctttatgtgaatgaggagagatgcccctcttggcaacgccatcctaaggaaaggctcaagtggtttccagtagagagagtcctgggatgagcttggagatggaaatggtccctgggccgggatgtgatggggtttgggggcctggaagtgaggca

SEQ ID NO: 56194 - DNA, 1053 bp, Homo sapiens
ggggggttttgggcatgggccgtgactcacagagtagatccagatccgcctgctcccctcatatcctgttattcagaaggctgtatccgcttagaaagtgtcttttgtcctggggtgagagggtgacgcatgtgccctctggcagtctgctgctgtgtccagagtccgactccagctgggctgtaactgggcttggcccccgccttaggtaacgatgtgtgggtgggggtgttcttgggtcctgctgtgtatttagggatgggaataagggaggagaggctagcagggtgtggcggggtgtgttgggagagctgcacaaaatctgatccaattgatctggaccttgtcctttcccataaggggcagccaggttctgagacccgggactcactgtcctggagcccggcaagggattggggaaggcctacatcttcctttctgctttgttgcctggggctggggtctcagccagtcctgggagtgggaggcagtagcctctgcccctaacctccatggctcatcccagctgtcccagccatgcttggccccgggagaggtgggccagctgtggagcagggtgggagaacaggtggactcttctcttcccatgagagcctcttgccccgtagggctctgacactagggatcttgctccctagggctggaacctggtgcctggggctggggcagggcctggagaacctgttgaggcggttgagctggggagcacctggattagaggagccgcatagttctcattccagggctcactctcccccacccactctgttccccttttcctgccaccttcttctccagggaccagaaacaaggcaggaggagggacccagggcctagggtgggtgtggaggaggaggaggtatggcctgtgggtgtctcttctcatctcccctcctcctggtgtccaggccccgccagcaggcgaagcagggagatgtcagactgctacacggagctggagaaggcagtcattgtcctggtggaaaacttctacaaatatgtgtctaagtacagcctggtcaagaacaagat

SEQ ID NO: 56195 - DNA, 1039 bp, Homo sapiens
aacctccgcctcccaggttcaagcaattctcctgtctcagcctaccgagtagctgggattacaggctcccaccaccatatctggctaatttttgtatttttagtagaggcagggtttcaccatgttggccaggctggtctcaaactcctgacctcaagtgatccgcccacctcagcctcccaaagcgttgagattacaggcgtgagccaccgcacccttcctgcttcttctttcttaatacttatttatttctctttactgattgaatgcacccccaatataatgttacagtagccatccttgccttccactggcagtgcttatagtattttataattaaacgtggttgtaacttaaaaaaaagtcttttttagttcttctgtgaatcagctttgttccctttagagattcagtgagtcttctctgtctgcatccaaatgttggttcaaaccttgagcctcacaccctgcctgaggcacccttctctggtttgatgttgaactattgttcaacagtcaactttttggttgtgcttgtttatctggcaacaggtccttcgatcaggacatccagtttactgttgccattgatttcacaggcctatgagagataccctgtcaagggcccctaaaaacccagatactccatgcccttgccattcccctgatctagtgacccagctggataaatgaaaagacacaagggttgtgcaaatgagcagctaagtactgggagcttctccagctttctgagaaagaggagggtggccccagaaggctctgactgggtccaaccctgcagcatctccctgagatgctggcattccttgggccgatcccacagcagctgcagtggtgtgctggtgagagaagattgtgtggatttctttccagctttgtattcagcgacaacctgtttgtggtttgtaagcagccatcgtggaagtatttacacaacggcaagcactaggactcaggcccccccacctttctctgctggtgctccttggagaggcaccccgtggcggtgcagttttggg

SEQ ID NO: 56196 - DNA, 1567 bp, Homo sapiens
tgggctcccaggtccctcccccagagccagctcagacaggaattcaggaaggagctttggatgatcgagcaacagcgcgtgcaggagtgtgtgacggggtggacagaaaagagaatgcctcttccagccccacccgccgcaccccagggggttgtgagtgcctgtactaaacccgtcctggagcagggagtcagagacgccccgttccaggacccttgtcaccgggagacaggagcggggaggatctgtggggtcctgggttcagcactctgccctgctgccgctgaggagaggtaagggtggagcggggcagagaaaatgggtctgttcagacggagccagctctgaccacaggggacatttgccagaccctgtgcttctctgctgggaggagcggttagagtgtgtgtgggcggatgcgagtggccggagaccagggcccaacataaacaagctttggagacaaacaaccttatgacctgtgagtctgggtgagacaagaagggattcttgagacagacacgccacagaggggccaccagacttgaaggactccaagaaggaccttcaactgaagacctcctctcaagtagaggggtctccagatcgagggatcaccacagaggggtccctaagccacagacatttaaaaaggatcccggattgtgagacctacagaagagggggtttctggagctgaatctcctgcccccaccaaaactgagatgccgttgcctggtctgctgccccaagctcaacccctgtcctctccctctttccccatatgccccctccaggctgagactgatgtgataacaccaaggcagggaccttctgaaccattcctgcatcttggggctccctgactctccctctctgctccttctctcttccacaggtcagccctgacaaaggtcagctagccccttgaggacatcagctttggcctcagggtcctaatggcagcagaaccactgacagagctagaggagtccattgagaccgtggtcaccaccttcttcacctttgcaaggcaggagggccggaaggatagcctcagcgtcaacgagttcaaagagctggttacccagcagttgccccatctgctcaaggtaggcagaagtctgggactgagattttgtgagatgatgattatgggacactgtgtttaggacgtgatggtgccgagtacggtgaggtgaccacaagaaagggtgtgggtggctgcatgtgtcaatggttgcaggttttcttttgttttttcgagacaaagtctcactctgttgcccaggccggagtgcagtggtgtgatcttggctcactgcaacctccatctccggggttcaagtgattctcctgcctcagcctcctgagtagctgggattacaggtgtgtgccaccacgccgagcctatttctgtatttttagtagagacagggtttcaccaggttggccaggctggtctcgaactcctgacctcaggtgatccacccgcctcggcctcccaaagtgctgtggttacaggcgcaagccactgcgcctgacccggttgtgagttttcttgcct

SEQ ID NO: 56197 - DNA, 3984 bp, Homo sapiens
tagctaggacaacaggtgctggccaccatgcaccgctaatttttttttttttttttcttagtagagactgggtctcgctttgttacccaggctggtctctaactcctggcttcaaaccatcctgtgcccttgccctcccaaagtgttagggttacaggcggtgaaccaccatacccagccaccttgaagttataataatctgaggtaattgccatagaaacttaagaacttttgctgggcgttgggtcccagtgatcccaacactgggaggccaaggtgggaaaatcctttgaggccaggagattacggctgcagtggccactgcattccagcctgagtgacagagcgagaccctgtctcaaaaaaaaaaaaaaaagaaatttaagcacttgaaatgtgccctcgtgtgctctttagtcatcagtgataaggcctttttatttatttttggcttgggccttgccacttatagaaatgatgtcactattgtgatttgctcattttacgtattgttctttgtagattctcgggattcgaagatggctgcacagtcagcgccgaaagttgtgctaaaaagcaccaccaagatgtctctaaatgagcggtgaggcagccaacagcaacttcaactccttcctaagaaaacattacttaacttggccctggggtccaatgcacaaagccaattttaagctaaataccaacagaaggctacagacctctgttcttagttgcatctcatgtggtacacaaaacaaattgggcggttgtttcaaaaccccttatcagtagacttttatgttaagctgtctgaagtatttatttggtgggatgtattttaaaagactcctaacactcttccttttcacatttttttacgttgatactggggtcgtgcagcacggtagcatggtaccctggctacagtaggcttgctgcccagtccaaggccagcagtgttgtgtctggcctgtaagaggcaggtagcaagccatgaatatgtccaaaggcccttgaatgtcattcttgggccttgtaagaggcactcgctttgctccatttcactttctttccattctgcttttagtttggttttgttttggattcttctacagttaagtgttcttctcttccattccattatacttccttgacagaaataatgagtctcttcacaggctcataaatgatcaaactgatgtaactttgaaaagtaactacttggagtcagaaaaagtgatgattggagactaagaaaagtaaagatattcaaaggcagtttctatctctgacaactttgttcattaagagtgcctttgtttaggcgcggtggctcatgcctgtaatcccagcactttggcaggctgaggcgggcggatcacgaggtcaggagtttgagatcagcctgcccaacatggtgaaaccctgtctctactaaaaatagaaaaattagctgggcgtggtggcgtgtgcctataatcccagctactcaggaggctgaggtaggagaatcacttgaacccgtgaggcgaaggttgcagtgagccaagatcctgccactgcactccagccagggcaacagaggacagagtgaggctccgtttcaaaaaaaagaatgcctttgatcagtgatttcattaagttgactttcgaccactgaaatttacttaatgtctatttttgcctcttctgaggcatatgtgcttctctccttatctctttggctatgataagctaattatttatgtttgcataatatttatgtttgcatgttagtgacatatattttaaaatgtgatacactcctgtaatttatgagagtatgttcattgctgtgagctttgaaggtgctctaatccttcctcatatttggccttagaatgcacctcggatcccccaaggtttaggctttcttcatttgtctttgaaactatatcttctgtctcttgtcatatctgcttattgcgtgtttttcataccttccacctctctaaaagccgttacctgagccctcgttatcacttttggttgaatgtgctgcacttagctgcatttctaagtttctgattcttgcaagtttgtggaaacagaggagtctttaacccacatcagccttgatctaagtgtaccactttacttaaaagttcgtgggatctggagctcctggtctagcaagccatgaaaatgccaataaatgtttgtaataaagcttttatttaaacatccattttgttcgaccttgaagctttactaatatgctgaagaacaaacagccgacgccagtgaatattcgggcttcgatgcagcaacaacagcagctagccagtgccagaaacagaagactggcccagcagatggagaatagaccctctgtccaggcagcattaaaacttaagcaggtgagagaatgggtcttaatgctccagaagcagctggtgatctctgtgagggagtccactgaggctgtcaggacgtgatggatgattgcaaagtggctcagggcaaaaagctgaaacttctctggaagaaagagaagttcagagaattccaattttggcaggtaccaataagtaactttttactgtctttctcttttagggagtttgccatctatgtggcctgtttctgttaccaatgagtattaatcttttgttttctgatccttaacccttaacatagattaatggcttattccacaaagaaactttatttcagctttagataatctcacagcatcctttactctctgttaaatgatttacccaacagggaaataattttattctttttcccatagtgcagggagtttgcatggccttagtcaaaggttttctttttttttttttttttagacggagtcttgctctgtcgcccaggctggagtgcagtggcacgatctcggctcactgcaagctccgcctcccgggtccataccattctcctgcctcagcctcccgaacagctgggactaaaggtgcccgccaccacacccagctaatttttttgtatatttaatagagacagggtttcaccatactagccaggatggtctcgatctcctgacctcgtgatccacccgcctcggcctcccaaagtgctgggattacaggcttgagccaccgcgcccagcagtcaaaggttttcaatgctaaaatatacagagtagagtgaccctcatttccacagcacctaaagttttaccagtaaagtggagcaagaatactgagtaatttgagttaggggttctctttttcaaatttacagtgagagataatcctattcagacctgaaataaaacctgctctttattattcatagaatttatatgcaagtccggacagtggctgtggaaggatatgtccaagctgtggctgggcgtctggagggcagtgccatgcaactgtaagggctttggtagcattgcatggctatgcataaattcagcagttaaatataacacccttacacccccaccctgaaccattgggctcactgaccaaaaataaacaagggtgtctgcttcggctaccttaagccttggagtgactggattcctccctgactcaggaaagcagcaaaaggcaccattttccaagagtaaatggaagttgctgaagatgaatctctgacagatcattccaaaggacctttcaacaagaagctttaagtataggctctgcaggaagtagtccctatccagagtagtactattaaatagaatttttttatgtttttggtttggtttggtttggtttgttttgagacggagtcttgctctgtcacccaggctgtagtgcagtggtgcaatctcaactcactgcagcctccgcctcccgggttcaagcgattctcctgtctcagctacaggcgcccgccaccacacccggctaatttttgtatttttagtagagacggagttttgtcatgttggccagactggtcttgaactcctgacctcaagtgatctgcctgcctcagtatccc

SEQ ID NO: 56198 - DNA, 5592 bp, Homo sapiens
ggcaacagagcgagactgtatctcaaaataaaaataattgaaatagccacatgtagctatagaggctgccttacacagcacacctctagaagggaaactaagtggtatagttgacatccttaacttccctgttaatattaaaggccggtattggtggcacttaaggattggaatgggtaaagaacttcccagcactgtacagttcttttaaagcacaaagcttgggagaattaatatatgcaggataactgaacgcaagagacttgtggaatgcagttctaacctgataattgtgtgttaatcgggagtaacaggacaggccgttacggttggttacacctacttatgctagatgcataatgtttggagccttccccactgatgagaagcaatttatgatcttgtgctagaaagttaataatgcttcacagcatctttttgagaggttgattagaaaacacacacatacacgttggtagtcacttgtgggtgaagcctgaaggggctatacaatttattttctttcagattgactgatggctttatggacagccaggcttactaggagcttggttgtgttcagggctattgctgtccctttttcctttgaaggaatttaattctctgagatgtagtcttaatggttttcttttgagaacagattcttaaaaataccctatctctgtagtgtgtccttgttcttatatatggccctgagttttgtgatcacctgaataattctaacatacgtttggctggctgactgtggagatacatttgagttacatgtttatttttaatttaaggtcatcattgttttaaaggagctgtttgcaagtgcaggcatggaattagggatttttaagaaatgtaaggaaaggagatttgactttcttgtgtttatttacatcttaaggtaaaaagtggaccgtctggaaatagattctcagaggaaaaatggagcacacgggcctttttgagaaatcaatcttgttcttaagtcacaagaactcaagtgaacttgtaatttaagttttgcccagagtgtgatgaacttcctatggtgtttgagtaagcctttgaagacagtggtagtccatgggcaggtatgaatcaagtcatataattgtcaacctgtagttcaaaagcagtacaatccaggattgaactatagaatgttcttacgaaaacttaagtttcaactggcagtgtatgacttctgtagccaaactagtgaggtaatttgtggagatgcccatttcatgggaccacacttgagcttcttggagtttctgctctggatcaaaattctgctgcttgtataacatgttctgaggcaaaggcttgcttctggtttgggatccttttgacacccacaacaggtttatctcccttcacaccagcatctcacttgcttctttttctctgcactttgagttgccaaatcctgttggattgcttttttgatctcaatcccctaacaccttttcttccagaagagcttaaagcagcgcctgggtaagagtaacatccaggcacggttaggccgacccataggggccctggccaggggagcaatcggaggacgaggcctacccataatccagagaggcttgcccagaggaggactacgtgggggacgtgccaccagaaccctacttaggggcgggatgtcactccgaggtcagtgctgtgtaccctgataattgtcgggccctactcccttcccttttctcttgggctgcttatggacacgtttgtttaacatctttaagcctgaatttgtattaatataataacttctgaaatcacatatttttaatagtgctgcatgtcttttatcaataccattccttttctgataatgtgcaatggtgagaggctatgacctgcgtaacaacaggtaattcatgtcatctccattccattttaaaacaccctgctgttgcttgaatcaaagcacattcaagttctagaaacaagtcaaacataagaaatttataggtcttttggcctatatctctttgttcctggtgctagtaaaacactgatacagctggaaaaagaggacaagttgacccacagcacttacctatatatgttcatttggggcactattactctgttccctgtatagttcttgttccctagaagaatctgttgagatcaggaaccatagcatttatttttaaatttaccataatgctaggcatctatctgattattcagtagatatttattaaatgtatgtacttactaattgaattaactcccaacttccaaaaatggatttgtggtcagacttgttgaattgattgaataaagagtagcttaatctgttcacagtatgcagcttgccccagccaacctaaaaactaactgaattaccttcatttaaccctcaccgccttcctttggttagaatctactttgtgtctcttggatttacctgcatatacattgtatgcctcctctctaaggtcaaaacctgctccgaggtggacgagccgtagctccccgaatgggcttaagaagaggtggtgttcgaggtcgtggaggtcctgggagagggggcctagggcgtggagctatgggtcgtggcggaatcggtggtagaggttagtcagctaccaacttcagagagtagctcccccttactttcctcccttaaaaactcagagccacctttctgcacagcttcaagtcataggcaggcttctttgtttgtcttgttttgttatttgaaactggcttatttttcaaattaccatgctggtagtgcaaaagtctcatgatttttccaagaatcaatcaagtgcatattatagagccagattatatgccatcttcctccaagctcttgcaaatttaaattgtatagttgaaaataccccccaaaatggtcagtttagggttttgcctttctctgcccctgtcccaccaccatcaccaccacataccaccctgtagctccaaatcctggtttgagtcacatgagaatatagaagagagagagagatacaaagatgaagtagagttaagagggtggtgagacttggagctgggcattggctctgaaaccaaataaattcaatgtcacatttggtgcctgtggagaaccagagatgactttttttgcttaaggtagagagcaagatggaattattatcagttaactaactggctcttattgataatcttgcctttgaaatttattgatgtttgtcttgtgacctcatgacccagattgggaaagagtttaatgatgttgctgctgttaatactaaatctcatgggagccttctggtttagagcttagtggaaaactcccaacacctgtccagaaaaaaaacactattgaagcccctgtgtatatttgctttggttctcttaaaaggtgtcttgggtcttccataacttatgaccttgaagttgccaaggaataataactgttaggaaagaaaagttgataaccaagggcttgttttcttctctcccattatatgatacttactgagtgaagtgcaagctagtttgggtttcaggatgaaataacatgtttccaaattatcttgacttggatcctgagagacatcacgagggtgggagagactaaaatagcttttcaaaaagctgagtttgttttgttaactgaattcacactgcttctcagataaccacaattgtcagttgtcataaggtaactagaattaaaggtagaaatagctaggacaactcaaaatattttttcaaatctcccctacattgttcctgtgtcagaaaaactcagtctcctgacacatgaggtcagctagctcattagacttgataagtttaaggacaggtgagatgactttccagaagggtctccaataaacttaatttgaaaactgtcttgtcttcacacccctgatgctctgtgctcttgttaccacctccctatcttaccaaatggggttatctgtcatgtattttaattatgaacttagtgaatctcaaatgttaggtaattttatcttaggattgattaaggttttttaaaattatagttgccagttaattattttcctttattgatagaataaaatttgttaaaatagcatttagagatgatcatgtgatagaggattcattatgtgtgctttccatgtgttgctttctacccattgtgtttcctttttttccagatttctcctctttgccctgcccttcagcttttctcagctaggccccactgctctaaggggcatttactacagcacctattaaacttacttgtaactgtctctttttttttttttttcccctttgggccaggtcggggtatgataggtcggggaagagggggctttggaggccgaggccgaggccgtggacgagggagaggtgcccttgctcgccctgtattgaccaaggagcagctggacaaccaattggatgcatatatgtcgaaaacaaaaggacacctggatgctgagttggatgcctacatggcgcagacagatcccgaaaccaatgattgaagcctgcccatcctcccatgagagactcttgttagtcaacacatctgtaaataaccttgagataacagatgagaagaaatctgattgatgctggatggacctatcacaataggctgtggacttacttgccaccagcttgtgcatttagtgtgttccttttactttttgatactgtgttgtatgaaacccttttgtcctttgatttggttttttgtttttgtttttttaggggggagggggggtttcccctcctttgcccagacttctctttgaacacaaatgcattagccttgtggctagaacaccctcttcctacctctgtctcccctcacttgtcatatgctctgacatgctaacatttcttttgttcatccctgttgcccccacagaaacatcccagaaaaaccggtcagtgttccttcctccctgatccttaggtttctgaaatagggttctgttacatcctcttcgatagcctgtttaaaatgtttagaaggtctggagctcaaaaatgcgttcttccacattgataatttagtaaactgagaacattgacatcactacagggcagcataagaggttgcttacatgtggtagcagctctggtttgattcaagttgctaccatgtacattgacagcacatataccataaccagcgtgttgggttgaattgcactttctacctttgtatgagatttacagactttccttctgggtttgtatcatgaccagaggggtactatagggttggtttatactgcaatatagaggatcagaagccatttgatttggtaggtgtgtcagaagggagaatgatggcagacgaactgctggaagaggtcagaagatagccatgctaaaatgcaattatatcctcatgtttatcccaaactaatcttggacttttccactcattagctttgttttgcccttgtttcccttgaaggtttaagttcaaccatattctgtcaactgttcagtttcagtggaatcttgtatttctggttcattataacaaactgttcgcttaaatccacccaggactctctttatttgaggtgcctcaaa

SEQ ID NO: 56199 - DNA, 1049 bp, Homo sapiens
tgtcttggtggagacagcatttcccgggcgccccctcacggggcggggcagtgcggcgcggctccggttcccggcggccctcgcggcaggtttcgggcttcaggacaattcgtgatggcgggggctggttccgccgctgtatcgggggcagggaccccggtggcggggcccacaggccgcgaccttttcgccgaagggctgctggagttcctgcgacccgctgtgcagcagctcgactctcacgtacacgccgtcaggtgcccgggagggaagttgggggcggggcctgtctctctggctttgtaggggcggggccaagaaagtgttctggctgggagtgggcataaatttaggaaactgattcgaggcggggaggacaggcgggaaggccgcaggtggagggttcagcggaggccggcttctctcagtacttggtaaatacgtaggggagttcgtttcctgagctccggtaactgcctgaccttgtaggccttgtacctctttgcagagagagccaggtagagctccgggaacaaattgacaacctagccacaggtgagtgagcatccctgtgtacccggaattcttcagcccactttcaggaccttaggtttttgccaacccctgggctgagtttctgtcacttgcttccagggcatcagggctgccaaaggactcctcctttcagggatgtcttaaatctctaatggctgtggcccgtttgggtgcaagtgttttccatcccattaccagcctgctttccctcagaacaagagataagccgttagatcttagctgcaccttacttccatccccagaactgtgccgcataaatgaggatcagaaggtggccctggatcttgacccctatgttaagaagctacttaatgcccggcgacgcgttgtcttggttaacaacattctacagaatgctcaggtaaaagaatatcttaccaacagtgattctttgcccttttttgtaagtcctcaacacagtgaaagccactgtaattttaaaattctttggggaaagggaaattcacttctcc

SEQ ID NO: 56200 - DNA, 1228 bp, Homo sapiens
atcttcctgccacttcctcctaaatggtgctgggataggcatgagcaccatgcctggcctacatttttttttttttttgagatggagttctccctctgtcacccaggctagagtgcagtggcacgatctcatttcattgcaacctccacctcccggtttcaagcgattctcctgcctcagattacaagcacccgccaccatgcccagctaatttttttgtattttttagtagagacgggttttaccatgttggtcaggctggtcttgaactcctgacctcaggtaatccacccgcctcagcctcccaaagtgctgggattacaagtgtgagccaccatgcccggcctacattcttatatatacttttgaagactgactttgaggtagatcacgcccggtatttttcagcacctagttcacttacactctcaagcctttcacagtggttaagattccaaaccttccttgtcttgtaggaacgactgagacggctaaaccacagtgttgccaaggaaacagcccgcaggagagcaatgctggattcgggaatttacccccctggctccccaggcaaataacagatgagcctatggactcagtagcacaagtactgttccccagctgccttgtttcaacagacatgcaaagatcctaggagacagtccccatagaccttcagacattaaaaagggagccgtacagtttgtttgaagcacttcgtcttacccatttatgtaggggccccaggaaacctacacacagccagaatgaggttcccaaaggacttacattaattatggctcttgcttcctttcacaaatgagctgaggcctctacttttttttttaagctgcatacgtgaggcttaccttcttcaggactagttaaccagaggggcttcctttgtatgttacatgcctggttacatgggcctggacagcatgtcctctacctgtgacttctcattttcctgtttacactggggatttggagggggcaggcaaagtcaaagtgaatgacctctgtccacccacttttttattgcactggcttgaatacagtagcagtgttgatagaatcattttattcaataaatacttaaaatgatattctagtttactctggtatatggaaaggttccaggagtttgtcctttaattcaaagacagcttcaaattgtgatctgagtatttataattaaatgactcaattatcattttcaacaaaa

SEQ ID NO: 56201 - DNA, 1969 bp, Homo sapiens
cctgggcaaaatagcgagactctgtctctacaagagaaaaaaaaaaaaattagccagttgtagtggcttgaacttatagtcctagcttctcaggaggctgagtcaggagggttgcttgagcccaggagttcgcggttacagtgaactatgattgcgccactgcactccagcctggatgacaaagtgaggccctgtctctaaaaaataaagttctagttatcagaagtgccattttgatggcacacctactggatttattatttttcagggccattatgctgtgatgaacaaccccaccagacagcctttggccctaaacgttgcatacaggtacagcatgctttgggtttagggttggttgtaaactattttgtgcattcctttaatacctcatacctccctgtgttctaggcgctgcttgcagattctggctgcaggactgttcctgccaggttcagtgggtatcactgacccctgtgagagtggcaactttagagtacacacagtcatgaccctagaacagcaggtattgggacagatatgaactgagttgttttgccccactcttttgaatactgctgctcagcaggcaaagcggaatatggtctttacgggtcaggaatttggggattctgaaagactttggtcctgagatttaaaaagctgtcttaatctctgttttcagaagggtattactcaaataaggtcctttgattttccttgcttactctcactttgctttccttcaggacatggtctgctatacagctcagactctcgtccgaatcctctcacatggtggctttaggaagatccttggccaggagggtgatgccagctgtgagtgaccactgtgggtcaggggttttgtattgtaatctggtacagagaagctgtacactacttaaatgtctttaatatttccacagtgtaagtaatgacttttatgctgggctactcgtctaaatcacctttttctctttcctagatcttgcttctgaaatatctacctgggatggagtgatagtaacaccttcagaaaaggcttatgagaagccaccagagaagaaggaaggagaggaagaagaggagaatacagaagaaccacctcaaggagaggaagaagaaagcatggaaactcaggagtgacattcccttcactccttttcctacccaagggggaagactggagcctaagctgcctgctactgggctttacatggtgacagacatttccgtgggatagggaagatagcaggaagaaaagtaaactccatagaagtgtcattccactgggttttgatattggcttagctgccagtctcccatttgtgacctatgccatccatctataatggaggataccaacatttcttcctaatattctataatctccaactcctgaaaacccctctctcaactaatactttgctgttgaaatgttgtgaaatgttaagtgtctggaaatttttttttctaagaaaaactattaaagtacttcctagtagggctcttggtctttctggttggtgttttttgtttgtttgtttttttgcatgtggcaaccttttttgcttttggctttgtgtactcttttgttgaaaatgataattgagtcatttaattataaatactcagatcacaatttgaagctgtctttgaattaaaggacaaactcctggaacctttccatataccagagtaaactagaatatcattttaagtatttattgaataaaatgattctatcaacactgctactgtattcaagccagtgcaataaaaaagtgggtggacagaggtcattcactttgactttgcctgccccctccaaatccccagtgtaaacaggaaaatgagaagtcacaggtagaggacatgctgtccaggcccatgtaaccaggcatgtaacatacaaaggaagcccctctggttaactagtcctgaagaaggtaagcctcacgtatgc

SEQ ID NO: 56202 - DNA, 2179 bp, Homo sapiens
tcattttctgtcaattagtggaagctgttgctgccctggggaacaaagtcgtggaaagcctaagagcacaggatccttctgaaggtttgcatttgttgctgattctgtatttagtagccataggaaccaggtcttgtaattgtaagtacactttcaacaaaatcagatcagaccagatggaagagtaaatgcagagttttatgttgtgggagtttttggcaggggcttcaggtgttcaaggtgttcaagggagatctgtttgatctcccttctaaagctctgtattctaaattctcattctggactttgtgctgttttaaaaaatccacctgttcccccccaccctggatttaactttgatcatctaatggaaatgtgagttatagtttttgtttattctgttttttcagttttaaccatgctgaccaacgaaactggctttgaaatcagttcttctgatgctacagtgaagattctcattacaacagtgccacccaatcttcgaaaactggatccagaactccattgttagttcttttttttccattgctggaaaatttaggggatattcaaaacatggtattgttgctgtttagtttacttagcttgttgctattccacatgcagcttcctgggaattgaagaacttaggtttattctgaactttgctctctccctctgtaatttggaaatagtttatcagcttgctagtggaattttcagatggggtgaccaagaaagcatttggaggacttaaaaaggactgagaaaatatttatggagggggataggcttttgaagaaaacagatcttgcatgtttctagtgatttttagacaagtgatttgctgatatgagaaacacagggtggcttaaagaattgcagagttggtcgggtgcggtggctcacgcctgtaatcccagcactttgggaggctgaggcaggcagatcacctgaggtcaggagttggagaccatcctggccaacatgatgaaaccccgtctctactaaaataaaaaattagtggggcatgatggcggttacctgtaatcccagctactcaggaggctgaggcaggagaattgctcgaacccgggaggcggaggttgcagtgagctgagatcacgccactgtacgcaatccagcctggacaacagagcgagactccgtctatcctgccctccttccaagtttttaagactgtagcagtggtaatgagtagcttgtttaatgaaaatgtttcatcctggcatatcatgcttgtctttttagtggatatcaaagtattgcagagtgccttagcagccatccgacatgcccgctggttcgaggaaaatgcttctcagtccacgtgagtccctctctaaccatttggattaagataaactttttaactgcagtgaatagcaggatacccccatacttcctctgacagaactattttgcctgtgacctcgtgtctggatttttatttttaccttaaggaagcaaattaagatttagagaaagcagagaatgtatagttctggaaatagcatagtcagcttcaattctaccttaggcatggaaatacatgatcgtattgattttaatgtttgggtcactattactttcagagttaaagttctcatcagactactgaaggacttgaggattcgttttcctggctttgagcccctcacaccctggatccttgacctactagtaagtaaagatgggcaattggagttcctcatcatccttatttactagtagtagtagtagtagtagtagtagtagtagtagtagtaactctgaaattcaccagagtctgaaatttggtgaagcttaaaagaaattttattggtagacaagtaatccaataaaaattcaacatttacatgactcagagacatttgtttaaaaaaaaagaaaaaattcaaagtttttttttttttttgtatattcaatgaaatgagtagttactgagttatagtgtcccgttttcttctcatgactgctaccatttaatcatggtagtagagagaaatgagtgagcagccatttcagaattgcttctgaacatgaaaattttggctagacttagaccttaatgaccagttttcctcgtgatcatttaaggttttagtttgatgcctgtaatcccagcactttgggaggctgaggccagaggatcact

SEQ ID NO: 56203 - DNA, 1431 bp, Homo sapiens
ctgatgaaacttccttcagtgaggccttgctgaagaggaatcaggacctggctcccaattctgctgaacaggtatgttcttttggctgtcttccagaaatgtctctaaagcagttaaaagtattggtaaagagtaactgttggtaaggttaagaatggtgttaacagagcctgaaatccacaaagggtttaattgttctccttatttctcattgtgggtggagatagccaggtggatatataaacaaattacatatgcattcttatttttactggggacaaagagttgttctcttcccatatattcaaggccagaatgaagtgtttttaaagccctatgtcagtattgagtcagcttgtatggaagggattaggagaaaatattcaaattctgagaaattgcttataatttttcattttcaagtattgtttcatactgtttttcaggcatctatcctttctctggtgacaaaaataaacaatgtgattgataatctgattgtggctccagggacatttgaagtggtgagtttttgatgatttagttttaggaaagggcagctttggtagtgtggaaattgccttggctcttgacttttaattttcagttgtctattatccaaagccaagcctaaaatgagaaagtacagtggaatttctttgtagtactgatcttggggacaagacttgtatcattgttatgctagctgtgatgtatcaggctttcatgtggtggttttgggggtgatttcacctctgctacttcttaatttgggtaacaggtagctgtgttgtaacagttctgggaggacctaggcacctttttttcttctaaattgtttttccccgaaatcctttttccaacagcaaattgaagaagttcgacaggtgggatcctataaaaaggggacaatgactacaggacacaatgtggctgacctggtggtgatactcaagattctgccaacgtgtgagtgtgcctgtttctggtcatgggaacagaacatagcacttggattaggggtttaggtatctttttttgttttgagacaaattctccctccgttggccaggctggagtgcagtggtaccattgtagctcactgcagccttgacctccactacagcaagtgatcttcccgccttagcctcccgagtagctgggactacagatgtgtgctaccacacccagctaatttttgtattttttgtagatacagggtttcaccgtgttgctcgggctggtctcaaactcctgagctcaagcaatctgcccacctcagcctcccaaagtgctgggattacaggcgtgagccactgtgcccagcccttacggatcttgaaagctcaaatttcttgtgagaaaggatgtttgtaagacaaatgtttctagtttttgtttttgagacggatctcactctgttgccctggc

SEQ ID NO: 56204 - DNA, 1052 bp, Homo sapiens
ctcactcagtttcctgccaggatcccaaaccagcacacctttccctcttcccccgaggagaccaggtaggaggcgagggaaaaggtggggcgcaagtgggccccggttgcttccacacacaccctccgttcagccgtcctttccatcccggcgagggcgcaccttcagagggtcctgtcctccaaagaggtaggcgtggggcggccgagaccggggaagatggtccacggggaagcgcgcgggctgggcggcggggaggaaggagttaaagatcctggattggctcttctgtcactgagtctgggaggggaagcggctgggagggagggttcggagcttggctcgggtcctccacggttccctccggatagccggagacttgggccggccggacgccccttctggcacactccctggggcaggcgctcacgcacgctacaaacacacactcctctttcctccctcgcgcgccctctctcatccttcttcacgaagcgctcactcgcaccctttctctctctctctctctctctctaacacgcacgcacactcccagttgttcacactcgggtcctctccagcccgacgttctcctggcacccacctgctccgcggcgccctgcgcgcccccctcggtcgcgccccttgcgctctcggcccagaccgtcgcagctacagggggcctcgagccccggggtgagcgtccccgtcccgctcctgctccttcccatagggacgcgcctgatgcctgggaccggccgctgagcccaaggggaccgaggaggccatggtaggagcgctcgcctgctgcggtgcccgctgaggccatgccggggccccggcgccccgctggctcccgcctgcgcctgctcctgctcctgctgctgccgccgctgctgctgctgctccggggcagccacgcgggcaacctgacggtagccgtggtactgccgctggccaatacctcgtacccctggtcgtgggcgcgcgtgggacccgccgtggagctggccctggcccaggtgaaggcgcgccccgacttgctgccgggc

SEQ ID NO: 56205 - DNA, 1021 bp, Homo sapiens
tttgtttctttatgcactcctggtaactcacagaacagaaaagaggttggtgatgctcactgggaattaggcaatgaagggcaggggactgcccaggggcgcttcgccaccagcaggctaaaaagataagaaaatgggcttgaggcgggaggaggataaagtcccacagcctggacaggacttggagaaggcatcccattggatcccctgctttggaatgggcatcacttcatgcagggcatagggtccagtttgaccttgagctaagcagagacgcagctctgggaggtgggctcccaactgttggggccccacagtactagggaatagtcagctcccaactctctgctctccactgacccctttctcaggctgccaaaatcattacatataaagacccagataatcccgagtacttggaattcctgaagcagttaaaacacctggcctatgagcagttcaacttcaccatggaggatggcctggtaagaaggggtcccgggaccctccagcgtggacctccagcccccactccatgaccctctgccagcctccatccttccctattcccagttctccccttccttccctcccttcccattgttccatgtttctcgtgatgatggaggaggacactggcaagttcagcctctgaaactcaggtcatcatcagtaatatggagacgatacatcctgccctgtctacctagtaggattcaggaagtgatgctaatccaaaggcatcgtttaaatagtaaaatctccctgtgatataggggtgttattttctcccatcctcttccaaaatcccagtgcctcttgttcccttccccacagctcccacctccatgcccttcatatgcccaccccagccgacctctgtttgcccctacaggtgaacaccatcccagcatccttccacgacgggctcctgctctatatccaggcagtgacggagactctggcacatgggggaactgttactgatggggagaacatcactcagcggatgtggaaccga

SEQ ID NO: 56206 - DNA, 1031 bp, Homo sapiens
cacattacacagctctgcaagcgagcagggacaggaaggcgctgaggccaatggccacaagggacaggtcatccagagaaggcctcctggaagacgggcacatggactgggcctgcgaatgtaggctaaggtgaacattaccttctcctgttttctaccaagaaaataagtagagaaaaatcaatgcttggttggtacttcaaccaagattataaactccctgagtgtagagatcgggttctaaatggagttttctttataaaccccttgatagttttcaggtgtttccacttgagtactatgtgtgtggtatgaggtcctgtgtccagttgcagtggggacttggtaagcaggtgacaacccagatatatatgtaggctctagaagcagagctggggtaggtgggaggtgagactgctgcactcacagcatgccttccccgcaggccctggcctagccaccactcctgctctcccttaggttgtactgaactacaatgggacttcccaagagctggtggctgtgtcggggcgcaaactgaactggcccctggggtaccctcctcctgacatccccaaatgtggctttgacaacgaagacccagcatgcaaccaaggtgactgccccttgccttccaggcctccatcccagagatgctgcatccttcccctaagcacagtcgagtaggtgctcctgtcccatgctgagggctttctggagaatgactcctgcctttttcttcccttcatccatcatcccagttcactgatggactattagaaagttcttcctcctgctgtctaacccaaatctctcttgctgcaatatggactctctcctgcagatcacctttccaccctggaggtgctggctttggtgggcagcctctccttgctcggcattctgattgtctccttcttcatatacaggtgagctgtgatgtggggggttgagtgaggctgggggacccggagaaccaatagcagaggaggcggtggggacccagagggaagagggcaggggtgaagggg

SEQ ID NO: 56207 - DNA, 1016 bp, Homo sapiens
tttgtatttttagtagagacggggtttcgccatattggccaggatggtctcgaactcctggcctcaagtgatcctcctgcctcagcctcccaaagtgctgggattacaggtgtgagccacagcacccagcctgaatttttaactgtatttagtttaaattaatttaagttgaaacaggcacatgtgattagtggctactgtattggattacacagctccagagttctaaatgagaggctaatgtggtcacgcactacattcagggggtggggcccctctgagctagagggcttcctggcccaaaagagggagagagggtacctgtccacctgtccacccccacagtccctggtctcttttgcctctactttcctgctctcctctctcacattgctcaccttcccttctcccctgtcctacccagccctgaagatccacttgtcttctgagaccaaggctgtcctggaggagtttggtggtttcgagctggagcttcgaggggatgtagaaatgaaggtagagggagaagcctctgccctccccaccttttggggtcctagagggagttacccttctcaagcagccaatgccactcccatccctaaggctctcatctgactggggaaagggcatgtgccactccccagcccatcctcttttttccctccagggcaaaggcaaggttcggacctactggctccttggggagagggggagtagcacccgaggctgacctgcctcctctcctatccctccacacctccctaccctgtgccagaagcaacagaggtgccaggcctcagcctcacccacagcagccccatcgccaaaggatggaagtaatttgaatagctcaggtgtgctgaccccagtgaagacaccagataggacctctgagaggggactggcatggggggatctcagagcttacaggctgagccaagcccacggccatgcacagggacactcacacaggcacacgcacctgctctccacctggactcaggccgggctgg

SEQ ID NO: 56208 - DNA, 1029 bp, Homo sapiens
ccaccccccgcccttccactatggccgcttctgtgtggtgtggggagacgctggtcctccccgtcctcccatagcgcttattgcctcaccctcaccccctaggggccggatccaaaggcgctgcactccccaagccttggggcatcagccaggaaggtttcctacctcctaattcaggggcaggactcctcttttccccccacggggaaaagaggcagaaacttaggggtttccctcctttcttagggtcagacgctcttagggtccacttcttcaggggcggaagcctctcctacccttcccatagggacacaggcctttaccccactgtacttcggagccaacgcctttccctcagcactgccaccccagagtcaggacccagaggactgtgccttcgcccccaacgcaggcgcggccttttggagaggagggaggagtggagaggacaggggcccttgctctcccctccccaacttgttcctcttgccccccagtccctggcaatccagagatcccgatatctaggactgtccatccatccactccctgaccttttcccggctcctggctgcagccatggagttgcagaagggaaaaggggcggcagcagcagcagctgcttcgggagcagcgggaggtggaggaggaggagcgggagcaggagccccaggaggggggaggctgctactttcaaccagtttggatgccaaggatgagttagaggaggtaggtgtggggggagggaagggagttaagaaattgggttttggagggatactggagcggataccgggtgggaggacggggggtgggggcgggggtggaggctttcaagttttttgtgaagtaacacaaacactgctccagcttcctgctcctgagggaagaaatgtgggccaacttcctggacaggttgtcatagtaacagcagccactagtatgaaaatgggtggggggtgttggtgaaggaagggatacaacatccaggtttaccgaatttatttttgacattcctttcgacataca

SEQ ID NO: 56209 - DNA, 1336 bp, Homo sapiens
cctgcctcagcctcccgagcagcagggactacaggtgcccgccaccgtgcccggctaatttttttgtatttttagtagagacggggtttcaccgtgttagccaggatggtctcgatctcctgacctcgtgatccacccgccttggcctcccaaagtgctgggattacaggcgtgagccactgcacctggctgcccagcaggcttttctgcctcattaaaggataaccagtaccttttccccactctgtgtgacagaacaagggataggttgggaatgcaggacccctgtggaaagaaagtgtccagaatgaaaagtatttcattgctactcggtgtcttattggtgttatttaagtttaagggattagagggcaaggggtccactgtgggtggggtgaggaccttatcctcagcttgctggctgatcacaaactttacttctcacagtgttaccgggacttagctctggtgagtcgtgatggcatgaatattgtcctgaataaaatcaaccagatacttatggagaagtacctgaagctgcaggatacctgccgtactcaggtaaggccagaaagaaaagacaagatccagctcaaagagagaggatggatcttctctctgtcaggaacgggaaagaggaatcagggctaacacacccctatcattgtgtgtctaaattgtaatgtgctcctttcagttgtaattgaattagctcccttctcaaactcacagttcctgctcttcatctgtttttccctctttcctttagttggtgtggttggtacgggaactggtgaagagtggggttctgggagccgatggtgtttgtatgacgtttatgaagcagattgcaggtgagtttgatggcaggagcataaagaagaaaggaggagagcccagagactacatagagacaatggagaatgattaagtgccaaagggatggaattcttggattgcttagactgtttccttctgatacagacatcttctggccacatatgttgtagaaataaattgattgaaaaatcatggggggccttttaaagcagtaagtcttgcctcattttctttcctgctaaacccagggcttgacagaatatttggcctattttagccagtcttcactctgagattttatagcatttcagagcaggaagaaatggggagagaagtgagggcaattaatttgttctcaagtccctgtgctttcagaaacctagacatcttccctggctccacccccattatctgaacgcttgctccctaataattaagccctttactggggccagaatgagggacaaactatgtcacagaacagaccctgacattt

SEQ ID NO: 56210 - DNA, 1045 bp, Homo sapiens
ttggatggtgttggtctggaagtatctttttgtttgtttttttacctttttgctttatcttggttgatttcttctgacagttgggggaatataagaagagggaaaccagatccttttccttatttagtgttactatttgtgatcacttagggtctgtttgaggaaaaactttccacaagaaggtttggagagtctaggctttggataatggtcctgctaggtcagcaccaggaaattctcagttgatgttgagtggtgaacagacccagctcttactcttgaagaacatttcttgctgttcaccagtggctcaagaaaatgagaaaaggttatacttctgactggagagtcagtgaccagtgcaaggagtaaagagccaaaaactggactgaagttgcagttgggggtaaatgtagcctgaggtcagtggcaagaatgactgtaacatcagaatgcagggcaagctagaaattttcagcattttttttttaatcaagaagttctcctaaaggaggggagacttacgagacagtatgagctaatgaatgaattgtggagaaatagaggtctagggcaaacctagagttaagtggtgctcgttttcctctggccaaggaccccacactgtcttctaaggtctttttcttgcttcccctttccccaggtgcgatttggtcaacaaaagcgataccaagattggttccagcgccagtacctgtcaactccagatagtcagtctctgcgctgtgacctcattcgctacatctgtggggtagtccacccttctaatgaagtactgagttcagatatcttgccccggtgggccatcattggttggctcctgacaacgtgcacggtgagggcaaaagatactgggtggtgaagggtgcctcttccatggtgttcccatgtttccattcttcttcctgactccagggccacttgacccctaagggcccttctttcactctggtcttccagagtgtctcagccttcacttccctttgtgtctctagaaatttacttacactcattattttccatc

SEQ ID NO: 56211 - DNA, 1050 bp, Homo sapiens
tgctgggcatatgtcttcttggctcttagaggaatttctctcctgccatcgtattacaaaggtcttcaaatgccttcatgttccctgttgacccccttcagggatctgagtatggtccagttagactgattgtgcttagacctatctcaactccatgttgagttagaaatgagaagctctggccagacacagtggctcatgcctgtaatcccagcactttgggaggccaaggtgggcagatcacctgaggttaggaatttgagacctgcctggccaacatggcaaaacccgtgtctactaaaaatacaaaaattagccaggtgtgatggtgcacacctgtaatcctagctacttgagaggctgaggcacaagaatcgcttgaatccgggaggtggaggttgcagtgagccgagattgtgccactgcactccagcctaggtgatgagagtgacactctgtctcaaaaaaaaataaaaataagagaagctctgatattgaccttcatcatgttccccatttagacacctagctcccctgtttgacaaccctaagttggataaggagctgcgggcaatgctgagagagaagtttcctgagttctgcagctcaccctccccacctgtggaaggtatgaggcccgcccattccatcacctgtgtcaaaagaggggcaagacaaccaggccttcaggccagagcccctttcaggatgtcccacacagttctccacttccgtgacactgtccatcacagtttttccttcctcagtttatcttttttattcatttttgtgttgtctgtcttgattctcttgctttatctaatcttatttgacttgctcatctttcttgttctcttaactcttttctcctagtaactcctgctcagtagttagaaggctttcatgtaatatttacaatatttatctcactttaacttgcccatctctcttcccagctctaggccctggcctctgatgacagtttgtcatgttgggcctcaaaccttactctcaatacaactgccatctccttaccacacatacacactt

SEQ ID NO: 56212 - DNA, 1731 bp, Homo sapiens
tcaagtagtattttccaacttggttttaaattaaagagcacttggaggctgggcatggtggctcatgcctgtaatcccagtactttgggaggctgaggcgggtggatcacttgaggtcaggagttcaagaccagcctggccaacatcatgaaactccgtctctactaaaatacaaaaaaatttgtatttggcgggcacctgtagtcccagctactcagaaggctgagacatgagaattacgtgaacctgggacggggaggttgcagtgagccgagatggcgccactgcactccagcccaggcgacaagagtgagactagcacttcggactgtccctgatcttactctagttaccaatcctaatgagctgagcatagaggagtcatgtccagtgttgctcttattcctggcaacatccctctgcaggtcatggagggttgtgaggacaagaggtttgtcaagaggtttgtcctcccagggtcagtattccatttagatgataaactccttattctctcacttgccctccattctcccttcctagaagcatggggcatgttagaggacccaggaggccattaaatgccttatctttttttactcccaagtcaaaattgaggagccagtttccatggagatggacaaccatatgtcggataaggatgagagttgctatgacaatgcagaggcagccttcagtgacgatgaagaggatctcaacagcaaaggtgaggccatcagcaagggctagttcagggttgtgtcagccctgagaggaccagttcccagaagcagcctctctgcactcttcctgtcacccttattcctgtgagttaaagttttgttcacagggtatctggatgagactccagaatgcagagccctgtacttaacactcaaggcaggaaggaaaaaagaagtggttcctgcccttgtttgcttgtaagagctagtacatgtgcacagtcagggagatgcttcaggcactcacacagcattgaggaaacaggtgcacacttagggcatgtgaggaaggggataagtcattgaggggactgtctctgttgctggcatctgggcaaactgacttctttcccaaatcactccctttaggaaagaagagggagtttcgcttccaccctatcaaggagacagttgtggaggagccagttgatatcaccccttaccttgaccagttggatgagtccctgagggacaaagtactccagctacagaaggggaggtgggtacagaccttgttctcaacttcaggaggttcagccccaggctctctacctggtgcttaatgggtatagcaggagatgggggttggaggcaaacatgataggagtgtgtggagaggtagctgaagcttcatgagggagttcttctgcactttacgttagggagtatgagctgggagtggggcagcctcattccgtaacaccttgagttcccactctgcagattcttgggagaagaacctctgagaaccaaggcaggattggtggggattttccttttctttgggcctctgcccagagagcagccaattctgccctaaagcctccccatccaagctgggattttacacagagctcctttgttttgtctctgtgcatgtgagtgtgcttgtgcactgttctgggtgtgtgtcctgccctctgctatcatttatgtccctgggatttcctctcatttctgtcctgcagtgatacggaggcccagtgtg

SEQ ID NO: 56213 - DNA, 1746 bp, Homo sapiens
agtggcgcgagctccactcactgcaacctccgcatgctaggttccagcaattctcctgcctcagcctgctgagtagctgaaattacaggcgcacaccaccacgcccggctaactttttgtgtgtgtatttttagtagagacagggtttcaccatgttggccaggctggttggccaggctggtcttgaacttctgacctcaggtgatccgcccttctctgcctcccaaagcgctgggattacaggcatgagccaccatacccggccaactttcaagaatgtttttaagattttgttgcataccaaaagtgttctttatatattctggatgcaagtctcagacataatgatttgcaaatattttttcttccattctgcgagttttaacttttttgatagcatcttttgaacaaaaagtgctaactttttatgaagctaaatttgtctatttttttcttttaccacttgtgtttttgttgtcatgaagatttactcctgttttctcttctacaagttgtgtggctttaattcttacatttaggcctacaagccattttgagctaagtttgtatatgctgtgaggtgtcactgccctcatggttagagcccagaaagcaagagagaaagccttctccagcctgacctgagccctccctcttctgttcctgactctcatccggcagtagcttcactcactgatcgtggttggagcccttttgagctctggggaaggatggacagaaagaagagtatcccctggttcccctgagttatcaagcccctgtgggaggcagttgggagggacatgaggcagattagcacagggcatctggagccagcaaagcagttttagagcgggagcctgcttcggggatgcttgaaggtgggcactggggtcaggctgctggctcaggcccagctggtcttgcagcaaagccgccgcagggaagatgaacctgtacgagtcatttgcccaggctacccagctgggcgatctgcacacctgcctgatgatggacatgaaggcctgccaggaggacgatgtgcggctcctgtgccacctcacgccctccatctacacagaggtcagtgcctgcatccgtatctgtgccggggggctcacaggaacacacctcagtgaacactctgagtacacacaaccctgaaccctcttttgttcatccccactaacctaggtgggccattgcttcccacactcacagctgtcccctccttccacttctctttattagtggttgaaacatttctaaaactccctgaattcctatactttggtgtaactgatgtgcgttggggtctgagcctatatacttggcttctcagattgggccccatcatctggacccaggacagatcccacaaaccagatccatgttcatatgtcccaggccctcttgtcctctgatggctcacccttgcttggattctctctgatagttcctgatgaccagggcttctgtagtggagactcactttcatttcccctggttcactcacactctaggaactgggacataacaggtatcggccctttctcctcttggtagaagttcccaggaagagggaaataaggacccagggcatgacaggaggaactgtgatctcagccgagtactggagggaggaggggtgcagatcctggacacagggtactttcctcccccttctctagatgaggccctgcctaccccacacacctccagacataaactctctacaccacctct

SEQ ID NO: 56214 - DNA, 1023 bp, Homo sapiens
agatatgacacttcctatacagttagggcaaggctgaggcctctaggcttctaggatgagcccagatccattgtcctccttcccaccaaagtgcacaagggcaggctctctgtcagccacttttgttctttaggtgagtcctgtgggcccaccatgagccaggctctgggctggggctcaggtggctcagggactgataggagtggggtaggggattcttcctggctcctcatcaaagactgtccttattccctccagtggctgttgggggatgagagaggtccccagattccatcctggaatcataccttccccctgaacagcctctgcccttccctcacagagcacccagaggccctgtcctgcctactgcttcaactccgaagagaaaagtgagttccacttctggggctctttagccctcaattttaacatcccaagagctgctgtggtctaaagggcttctgtcctcctccttattgccatattttttcctgtcgttaacatctgcttattctgcccttcccccaacgtgacttacaaatgagcagctcccctgggatctgggcttcctctcgactttacccccctgcccaccaggagctgccctcggaggtggggaggtggggaccggacatccctgtttcctgctgccacagcagttctaatccctggtggctcctgctccccgccgcgccccccccaccgccccatgctcctgctggccaccgcacagctaatccaagaggagggagggtcagggtagaggggtcacgcaccatcctctccctcaccctgtgcagagcagagccagctggacctactgtgccttgacagggtggggcagagagggagagggtggcagccccctcttcccgcaaagccctttagcaacatcccccgataaatggggcagcagctgtgtatcttatccttcctacctttctgccttccttccaccctttctgctctcttgcctgagagactataaatggtacagagtgtcctagaggaagtgggaag

SEQ ID NO: 56215 - DNA, 1029 bp, Homo sapiens
atgcagcccctagccccttccctcctcctggggcctccagcccctcacactgctgttcccagtgatatttgggatctgactgaagccagaggctctgtaaaatcagaccatagtggaagtcctcagccccctggccccttccgcaatctcctcccccagtctcccaaagagccatttcaacagagaagggaaatgacaaaggggcagctggccagataagctaggatgagagcagagactcagtgtgtgggtgtcccttcctgcttccccttcaggtcttggtttgttctgaagggacgttttatagtcactatccacatgccagtgtgaaatgggcatctatgacgtggtcagggtgtccattcctaatcatggggcagatgccacaagcattcagaaaggagtctgaaagggtggccacagccccacgtggtgtgccctggaggcttaggttggtctgaggttggcacctcaatctacaccagagcccagggagtcccagaggcaagtttcacagaattgtcaaatgatcccatttccttgagtctgtttttttttttgtttttttttgttttttttttggcagagataatcgtgtcttaaaagttgtttttaaatgacaataaaacaagccagaatgtcttttgtgctggagtgtctgctggcatttgccccgtgcatgtatagcttggtcttgatttgattggcacccctacttgtaaccgcagaacatccccctttcccttcctgttctgcccccacttttgtctagagcagaagggacttggctttggccactacccatccttcctgctgccactggaggtgggagccaggcactgatctgtctatgcagaaccatcccccgtaggatgaggcctgtccttactcatttctcaagaaacaagatgcttccaaaaggtctgtcatcctccagttgaagtctgtgtgcctaccaagaatggccggaggactcgctgcttgacgggagggatgctccagcttggtctccagggacaactgtacctg

SEQ ID NO: 56216 - DNA, 1039 bp, Homo sapiens
ccgattcctcaggctccaggtaaccggccacttcccccgccggcccctcaccccatatatcctcaccccacatatccaccccgtgtatcaacttaggagtttgatggctcccaaactccacaaagggacccccaacgtaatacactccgtgaagagaaaaaacacggagacacaagctcttcaccccacttctttccttatccctgccttcttctggcctggctctttctcctccctgtcacctcctcccctaaaccttgacctcacactccctttcccaagacttgctccttaacaaaattcaggcaactcccctgaaccacgtgggcagagtccccttccctccaaatccctgaccctcctgtccccaggagtctttggccaccacagagaccttcaaacagcagaaagttcggatggcaaatgagggcttcgaccccagcaccctgtctgacccactgtacgttctggaccaggctgtaggtgcctacctgcccctcacaactgcccggtacagcgccctcctggcaggaaaccttcgaatctgagaacttccacacctgaggcacctgagagaggaactctgtggggtgggggccgttgcaggtgtactgggctgtcagggatcttttctataccagaactgcggtcactattttgtaataaatgtggctggagctgatccagctgtctctgacctacagtatctgtcattatctctctgtggaactgctttttccttgagagttttctcctggcgtggagccacaggccccacattcctgccctgactggctgtgggccagagccccgtatctggaccttggtgttttcctctcaggagaccctgtgtgaccttcgtccttggagaacctctggtgactgatgtttgtctgtgctcctgtgtagctcgccccagttttactctccgagtgccaggctcccactgctctgtcttgggaactggaggacccgaggggtcggctcaaagggcagaggtggacagaagcacacagaaatgccacctccggcagccagc

SEQ ID NO: 56217 - DNA, 1790 bp, Homo sapiens
ttgttcaaccgctgaggtttgatttcttaccctttcttctccccattttcatactcttcccagggattagtgatggaggtgaggtctccctaatcatggtaaagtgttaaccttccacctcctcccttccctcctccttcctcatccttctgtcttcctcaattctccgtctcttttttttcatcactgattgccttgtgtccctccaagtctacttgttactatccatctccaggctctgggccgtgtagacactaaacctcatgccctaaggacaggaggaaagaccctctgtttggagcattattagtagagtgaggatcccaccagttctgcctggcttcctccatccccagaggcactaaaagcagtattttaaggttggtgtcttactccctggaagcctgaaatgggtggaatagcggtaaggcttgagtaaaactaggggacagaggttcttatttgtcgattttattttataatttgaccacagcatctgaactccctctctccctggaataagtatttttcccacatttttggatatatgtatggtagacaatttttttttaagacacagagataaatgttttcctgctttggttacctttcctttcccctttaaaaggaattagctatagaactgctttgtaaagatgcttcttgatattttacttttgttccttttccctaatcattcccttttctccccactcctccagaaggcataacccttctctccacaccccctacccccacccccgtcctaggctcccatcctttccatcaagaccttcattagcttatgatatttgctgccgagatgttataacaaggactcgttcatgtatataagctatttcttgatccatttaaaaggaattgtacattgtgtagaaaaaaaaaaaaacctgaaaaagagaaaaaaaagccctagccatggatattgtgaaactgtgttatgtcattttgtaatgtgcccgtttgtgtatgatccgtgcaaaagggtttctggggaaggggagggggtagggaggcagggctgtggagggtgggtaggggagtgggccgggcccagcacactgagactggcagctgctccaaccccatccctccttagagatgccacctcccccaccacccacccctaatttgtgccttgcctccccaccctggagtagtccctccgggtcaccagcactgccttggcagagcccactccctaccctaacctgcccaccctccctatcccccagcattaggttgatactgtggggaagtgctgggggctgggaggtagccgaggaatggggcagttcccgggggcatcgaaaccaagtattattatgaattgtaattgtatttgcactgtttttttcctctgattgcatcagcatatatacaatatacctatataacaaaattcagtgtcaagctttcttatgcaagggatttcccccaccccacctcctcaaaaaagaaagaacctagtcttatgggcctttgagggtggattgtcaggggatgatagaaaggattttaataagtcatcctgaggaaatttcacctagtgagagccacatccatctgcacagccttaggctgcgtgaaccgaggtgaggctgagctcctgtgaaagccaagacctcctggtccaggactttgtagagtaaaaagaaccaccaacacaaaaggggttgagggggctacaatctggagacctggggtctcctactaacttgctatatgatctttggtagagttaattttctgagtatcaattttcttat

SEQ ID NO: 56218 - DNA, 2194 bp, Homo sapiens
aatagccgggcagtagtggcacgcgcctataattccagctactctggaggctgaggcaggagaattgcttgagtctgggaggcagaggtgagcggagatcacaccactgcactccagcctgggtgacagaatgagactgcatctcaaaaaagaaaaagaaagttgctgttgaaataaagctaaccaagtgtgaccagatactggtaaattctgcttcctttccatctccaactctgcagcccgagggtagagtggaagggaatgttatttcctcttttaatacctgccctccacttttgtctcctgggtccaggtgtcaacattgcatacttgaatactggcatcggaggacacaaaggccccagtttggcagaccgacagcgtgaataccttttagacatgatccctccccggtctatatcgcagtccatcagtggacagaaataacgcctgttccacttgtactgccccatccttgaatcctttatccctttcctctttcattcccccaacttctgtcgcatgcagtgcctgtactggtgcctaccatacacggaaagcaaaacagaaaaacagaagacaaaaaatagagatcagcaagaaaacacacgccctgccctgccacctcccctttatttcacactgctgcgatctgttcttctgccgctctgtcttctctcttcagttttctttaacagtgaggtggatctttacctctgatagaggtcagaatgaggtcctggggagaatctaagccctccgatgtgtgtttctaaagttgttttatgctataattattaccatttttaatgatgttgtgtgtcctccctttgttcagtggacggttaaaccttcccccactcaaccaatctttttctttttccttttcttccttttttttttttttttttgtaaacacaaatgacattcagttcaatgatacgagcattgcagattgcagtaggggtcccagctgccaagtaggacatgactaggagtgttaggggcagaagttttgaatgcacttaaccggaggagggcgcagggtggggggtatcaaagaaggacgaatagcaccctacctgtgggtgtttgggggctggacaatttgggtggcagtgtttggtactgaagttgggctctaagaatgaggggaaagagcctggggaggagcttaaaactcaaccactctggaatttacccatagaagacgggaagaaagaggtatgaagatgggctcaattatgagccagggaggattgaaactaggtcctgcctttctgtatcttggggaaataagaccgatctcctgaccccattgggaacacggaagtctattccaggccaaccagcccaaaattatttcatcttgtattctttgtaaaattctccctcaccccaccctgcttttaaaaattctaatctatcccctctaaccatagccccatctataatacagaggaacggctgttccaaggctgtttgctgggtgtcccacaagttgggtggacataaatgagtcaagtgacaacaggaggaaatagacttagacgaaagaaaggatttctcttccaacagttgagattcgcatatttgcctattctttcaccctctgagtgccaggagatgagaggctgggggtacacaatcaggttggagtcctgtccttactctgctgcaccagctgcagaaccaactgctcaaagccaaacagctcatggcaaaaccagcttaggacctctgctgtacaaatagttgcttcccactgccccccgcccgcccccagaatgatattaattttgccttttttttttttttttttttaagcgctactaatgtagagaatgaattgaattgtgcaatgttgctgttctggggactggggagattagcatcccatttgcccacactgtgggaagacggagtggaccaggctgtttttgaagtaagggaagccccttaaaggtacgggtttctgctcttctcatagtgtacacccacctgcctctctggctccagaagctgccagagtgcactggggggaatgttctcagcagagaagaatgaggagaagtttaatattttgcccttgaaagtcacctgaggaagtttccccacttttattttttaaaattaagtaattttttaaagaaggcacttttaaaattaacacacacatgaactgcacaccttc

SEQ ID NO: 56219 - DNA, 1899 bp, Homo sapiens
ctgggattacaggcgcgtgccaccacgcccgcctaatttttttgtatttttagtaaagacgggttttcactatgttggtcaggctgttcttgaactcctgacctcgttagccgtccacctcagcctcccaaagtgctgggactgtaggggtgagccaccgcacccagccagaagctacatttcttcgacttctgtcctcatttgtaaatgaggatggtactgtctgaattccctaaagtgatactgttataatcagatgaaataaaagtattttgtaaattatagaatatcctttttgtaaagtctctttctttaattcaacagaataaactcctggaaaagatctatttgattaagagaaacagaggagataggaaatgtaaagccactgactatttttgttggtatctaggcaaaagctgtgcctcacttctgcgggttgaaccctttgtatgtgcccagtgccgcacagatttcacccctcactggaagcaagaaaagaatggtaagattctatgtgagcagtgtatgacctccaaccagaaaaaggctctaaaagctgaacacaccaaccggctgaaaaatgcatttgtgaaagccctacagcaggaacaggtaagaattctgactgctcactggccacctgtcccagtttgttttttccaaagggtcgcgccttctagtttgcaggagtggttcatgtgatccctacaggtccacaggttccctttttgtctccttatcattgtgtcctatttccatttgagcgagtattctgattaagaacatggtaaaatataatggctgaggttaacagaaagggacagaaagcttgggactcttggcttttccatagcactctattctcatcttcattttttcctaaaacaaataatagattttggtgggaggaatttatatttgtgctataaatctctttgaaacagttatttgcagtgcgtgtttgataagaaatgacgaaagaaagagtgaattatgaagtagcccagtgaagagtagtggttctagagtatgtgaacatctcatgtagcagttataggatgagaatatcttagagaaggaaaaatgtgttgggaaactcagatccttttcttcctatttcccactccacccatcagagtcccttgtttgagtagcatcatggactttttggaagatcgggtaggcaggagtcaaaaataaaaccccatttatgctctaggactggtggtaaaaaataaataaataaaaatttttaaaaagagaaaagaaaaagtgataaaataaaaccccagtaattcatcagccttaattatatcagttggttcatcacctccagccaacttcttagagccagctttcctggagaaagagaggaggatcccttgatcattgaagcaagttagctgcttatacccagaaatctcagtgtaccacccccaccaaactcttttgccttttccatattccaccaactagccaacaacattagaggtaagaacacctccaggttttctggttaggaaattgggtgggccaggtgcagtgattcatgcctgtaatcccagcactttggggaggctaaggtgagaggattgcttgagcccaggagtgccagaccagcctgggcaacaaagtcagattgtgtctctgtttaaaaaaaaaaaaaaaaaaggaaattgggtattgggtgctgtcctgctcaatcacctgatgtgatgactcccaacaggaaattgaacagcgattacagcagcaggcagccctctcccccactacggctccagctgtgtccagtgtcagtaaacaagagaccatcatgagacatcatacgcttcggcaggtaaggaactttttgcctgatcctgatttctttagaagatttatcagccatttatc

SEQ ID NO: 56220 - DNA, 1050 bp, Homo sapiens
tataggattagatagtttataccaaaaaaagccaaggacttcccagccactaatcagggtttacaatgatggtagatttatcccatagaccattaaatgaaattaccaagtctggctgtgttcctgtgtttctacttagctatgtattataggcagtgttttcccttttgcattttgtgctgtattatacacagcgtacaacctgtgattagttcttttcctcttcttcccctccagggtcacagtgtcatccgttcagctaccaataccacccttccacacatgttgatgtctcaacgtgttattgcaccaaacccagcccagctacagggtcagcggggcccgcctaagcctggccttgtacgcaccacaacacccaacatgaatcccgccatcaattatcaaccggtaagagagagctgagccctaatgtggaaacagagaaatccctttgtttgctttgcttgtcgaaagggccataggttttaagtttttatacatagataaactctaggacaaaaatggttattttggtagggatttaattgagagcagtcccaaaagtagaagctttgaggaattatattaaaatagtagtggaggagagaggttatacagcagagcagcagtaagctaaaaatctgcctagaagagagtgatctagggaataagaagcacaaggatgtgtgacagaaagcaaaatcttatttctgtctcttttttgtttgtttgtttgtttgttttttgagctggaatctcactgtgttgcccaggctagagtgcagtggcatgatcttggctcactgcaacctctgcctcctgggttcaaggaatttccagctaattttgtgtatttttcgtagagacagagtttgaccatgttggccaggctggtctcaaactcctcacctcaagtgatctgcctacctcggcctcccaaagtgctgagattataggcgtgagccaccacgcgtggcctttatttctctcttagcaatgttagctcatggtcatcatcattctcctttcctatgtgtcagagttcttttt

SEQ ID NO: 56221 - DNA, 1021 bp, Homo sapiens
aaaattagccgggcgtagcggcacatgcctgtagtcccagttactcaggaggctgaggtgggaggatcgcttgagctcaggaggtcaaggctgcagtgagctgtgatcgggccactggactccagcctgggtgacagagtgagaccctgtctcaagagggaaaaaaaaaaggaccaaagaacaattgccctcgacctatatactaccaactacgctgacaatctcaaggaaagtaggatctgggaatgtatctttgaaattagaggagaattagaagatacagtcacggatttgggaacctgaggcagttagagtttccggaattcttgttacctaggtcttaagcagtatgtgccattttttatcatcttacacaaataagcatgatgcttttaaggctaaccccagaatgacctaaatgagagttatctagtaaataggattaggagtaagaggagtcagtgcaggagatttagatttcaaagtaatttctagactctttttgaggtaagatgctggataaaactctggtaagtagatgcaagttcaatatatttggttctggaggtttaatccttttctgtaaggctgtagacaatattcttggcactattccctcaaattattaatacttccttcttttgtgtactcttcagtacctactcttgacaggatagactattcttttttttttttttttttgagacgggaacctcgctctgttgcccaggctggagtgcagtggtgcaatcttggctcactgcaacctctgcctcccaggttcaagagattctcctgcctcagcttcctgagtagctgggactacaggtgcgcgccgccatgcgcagctaattttttatttttagtagagacggggtttcaccatgtcggtcaggctggtctcgaactcctgaccccaggtgttccacccgcctcggtctcccaaagtgctaggattacaggagtgagccaccgcacccggccccccttggatttttttaattcagcatagaagttttct

SEQ ID NO: 56222 - DNA, 1048 bp, Homo sapiens
gcccacctctgcctcccaaagtgctgggattataggcatgagccatcacacccagccaaccctagcttttaaaacattcagtttaggctgggtgcggtggctcacgcctgtaatcccagcactttgagaggccgaggcgggtggatcatgaggcgggtggatcacgaggtcaggagatcgagaccatcctggctaacaccgtgaaaccccgtctctactaaaaatacaaaaaatttgccaggcatggtggcaggtgcctgtagtccccgctacttgggaggctgaggcaggagaatggtgtgaacccgggaggtggaggttgcagtgagccgcgattgctccactgcactccagcctgggcgacagagcgagacttcgtctgaaaaaaaaaaaaaaagtcagtttataaatagttcagaaacagctgatagctgtgagaattagtcttcagtgttgagttgccctccaaatgaccttgctgagtttgttgtaggactcatccaaagcagaatctctaagaagctggactggtggagaatgaagaagaaagaaatggttataactttacacatgttactttctctaccttttgatgtctacttactggtcttgtcccaggattattttttaaaaccatgctccataagcaaacattattcttggtagtaacattaaaaactcttagtaagcggtggctcacacctgtaatcccagcactttgaggccgaggcgggtggatcacctgaggtcaggagtttgagaccagcctggccaacatggtgaaaccttgtctctactaaaaatatgaaaaaattagccaggtgtggtggcacacacctgtgttcctagctacttgagaggctgaagcgtgagaattgcttgaacccagatggtagaggttgcagtgagctgagatcgtgccactgcactccaacctgggcaacagagtgagactcttgtctccattttaaaaaaaagcaaaaacaaccacaaaaaaacctcttaggaaacctcaggcagattccctagaggtcctggaagaggagaa

SEQ ID NO: 56223 - DNA, 1240 bp, Homo sapiens
gcacctgagttcttcattttaaaaagcatcttaaatgtcttcagattttgaatctgctaaccctggtgacatgcagtttacctatataacaaacctgcacatgtacccttgaacataaaataaaagccaaaaaaaaaaaaagattttcaatctgtatccatgtagaattaagggcacgtgtcaacaggccttgcttatgtagatttaagtttacttaaattgctgggttgaatgcccagaaatctcctttaatataaatgttctaggacaatatcaggtaggacatagcttagttaactttgaactttgtgtgtgtgtgtgtgtgtgtgtgtgtgtgtgtgtgtatgtgtgagagagagattcttgttaataacttcaccattccacctttttaaaaatggactatttaagggactttattctgatcttacttgtatttttctttccataggatggatagaatgacagaagatgctcttcgcttgaatctgttgaagcggagcttggacccagcagatgagcgagatgatgtcctggcaaagcgactcaaaatggaggggcatgaggccatggaacgtctgaaaatgttggcattgctcaaaaggaaggatttggcaaatcttgaggtgccacatgagttacccaccaaacaggatggcagtggtgtcaagggctatgaagaaaaacttaacgggaatctcaggcctcatggagacaacaggactgctggaaggccaggcaaagaaaacatcaatgatgagcctgtggatatgagtgctagacggaggtatggctcagttcagctgcctccagggatagggtcgtctcataaagcctgtgaaaatggaatgaattccaatgagaggagggtgtttttcatcctaaagattcttaaaagaagatatatcatcgagtttgaccataaattcattttatttccaaatgaaaccaggtgcctcaaaaactgcttagcctacagagaatcgtagttcttactcttaagagaaaaaatggtcatttctagataaagggggcactagagagctgataggccaaatggaagtgagttaatatataccttcattctaatcttcatggccgtcttaggaggagaaaaatagtctttttgtcagataattccaggagttttaggatgtatttattgtggagtcccagcttttattacatccaaaaacatgggcctagcttttcttgtgtcagaaagcaaattatcttcatg

SEQ ID NO: 56224 - DNA, 1014 bp, Homo sapiens
gagaattagatacttggttttttgttgttgctttctttctttccttttcctccctccctctctttcatctctttcttttcttcttctctttctttctttcacagggttttgctttgtcacccaagctagactgcagtggcacaatcatagctcactgaagcctcgacctcctaggtttaattgatcctcctgtctcagcattccaagtagctgggactataggcatgcgccattgtactcagctaatttttaaattttttgtagagacaaggtctccctatattgcccaggttggtctagcatttctgagcttaggctctcctcccgcctccacctcccaaagtgctgaaattacacatgtgaacctaaatactgtttttttggttcttagctctcaccattccgataatcagcattcattcagatgttaatccttctcctgtatcccctctcaccaagcccccaatacataccttgttacttgtcttccttttggagtgcactttctcccaactgtcctcagacttgtgtgatgaatgtatcacttacaacatgttttgtctgggaagaagaggctctcaagtatgtgtgtgtgtacaaatttgagatcatgcttttcagagcattgtgaaggatctctgttcaaaactctgctcccctagtgcctattattattacttccatggtataaaggataaaaagaattttttgtttttctttcatataaaaaatattcctaaggaaagcctacatccgttctactttgcatgaagaaaaacaggatttttaggccgggcgtggtggctcataacctgtaatcccagcactttgtgagatcgaggcaggtggatcacaaggtcaagagatcaaggccatcctggccaacatggtgaaaccttgtctctactaaaaatacaaaaaaattacccaggcattgtggcacgtgcctgtagtcccagctactcaggaggctgaggcaggagaattgcttgaacttgggaggcggaggttgca

SEQ ID NO: 56225 - DNA, 1102 bp, Homo sapiens
aaatttttaaattgcagtaaaatatacataacaaaggcctaagctgtttttaaagaatgcatgggtactgtcttgactactttgctgtgaaaccttgctatgctttgtgttaggtgcggattcagctgccctgaacggtgtcaatggatcgggttaaatcagatgtcctatctgtgggacagcttcaggaaaaaagaaaaattagtgaatacacctgctgtcttattagtacctgttccctagcactagcaatagggataaagaaaagaagtttggtgggcagtatgtcttcattttgttataatttggggtgtgctttggtattgatgctgtgatttcctatcttggatgttggctttggaaactaaacagttaaagcatcatgatttgagaggaaactagctctcattcatgaagacaaagtttggcactaggctgcaatgatggggggatagttagggtggggagactaacagacttttttgtaccacaaatgacttttaaaaattaagagataattccatgtcctgaggttataaaccggctacaactggtttttctctccctccctcctgtccccgctaggcatcatgggtaaaagtaagcatccccctgtttcttttgtttaatataacagtacaccatgtgattggcagggcagtgcccgcttggagaccgggtttgtgcagggctctcaagggggctggcacgcatgggggccacctctgtgctacagaaagagcttctcttacggtagaaaagagacgatagaacagagaaagaaaggggaccctccacacacacacgaccctccacacacacacacacacacgaaaaaaacctaaacccatctcattattttcctcctttttctgttctctttctctatttcttatctctctcacttttctggaagctagaggaaggaacggaaaaatgtatacctctaagtagttttaactgtcttgccctccccaatccttatttttctttgctaaaagcagaaactcgaaatctcttctgagttctttctagtagtttttggctatgtgtagaaggtaatatgctgaggtttctaatgggattgaagtaataaacactg

SEQ ID NO: 56226 - DNA, 1035 bp, Homo sapiens
agctatatatttttttcttttttgcattgtttatgatttcagaggataaagataagagcaaccttcacaacagaagtgaaagatgagaagcttaatgtagagtaaaatgtctgaagctctaagtgaaactgttgataagctgggatttctactcttggaacgctagagaggaagagacacttagatacttagtaacagcaaaaagccaggccaaaaagtagaactcaagtgcttagaaactctgtggcaaaagagataaacgtgactactaaaactactttctctttcgtctgtggcacttagttgataacagttgttagcacatttagatgttcaagtttaatttttgttgtcagaaaagtatgaacatttgtgacttgcctaaaaagaacttggtccccctgcaaagatagagggaaggtacagatcggagtgaatgaaaataatcagcaatcaagtattaagaaatgaagtatttgcacacctcatcactgggaatcaatagcatgctgctgatacaggatgagaataagttagggatttaggactattctagttaggtactatcttgtagacactactagagatactttgtcttttggaagacagaaattattctgtaggtattaaatactaatataatgctccatatgattttcatggttttttttccaaggataggcagtggaatcccccagttgccttaggaaaatgtataccacccttacagaagagattggcctagacacatcttgtgctgtatgataaatgaaaaagttgatctgtttattttctctgttcctgtatgatgattaagtcattgagtagtgtatggcagtaattttttttttttttttgagatagagcctcactgtgttgcccaggctggagtgcagtggcgcgatctcagctcactgcaacctccgcctcccaggttcaagtgattctcctgccttaacctcctgattagctgggattacaggtgcctgccaccatgcccggctaatttttgtatttttagtagagacagggttt

SEQ ID NO: 56227 - DNA, 1028 bp, Homo sapiens
cttattttgggatattgccttgatcgcttacacatctgtttatagtcttactctctttttcttttttttttttttttcttgaggtggagtctcactctgtcactggagtgcagtggtgcaatcttagcttactgcaacctccacctcctgggttcaagtgattgttctgcttcagcctcctgagtagctgggattacaggtgtctgccactacacccagataatttttgtatttttagtggagacgaggtttcaccatgttgccccaggctggtctcaaactcctgacctcaagtgatccgcccacctgggcctcccaaagtactgggattacaggcgtgagccaccgcacccggctgtcttattctcttgtaaactctctatcatcgtgccttcaaaatagtctaacacttactgattattctactttcctcatcttaaaagtatttagtagtttccagttattaaaagattaaaatgtaaactttgagtggtattcaaggccctttatgttgttggtgtttgccttcctatccagccctacttctgtaccttatagttaatgtgtgagcaaatacagtggtttttcttttcttttttttttttttttttttatatagacaagttctggctctgttgcccaggctccatggagcacagtggcacgatctcggctcactgcaacctccacctcctgagttcaagtgatcctcttacctcagcctcctcagtagctgggtctataggcctgtgccactttgcccagctaatttttgaaatacagttctttttaattacaggtagcttctgaatctcataaagaatgccacttcttctgggaaaccttccctgacttgcccaaagagagttagatacattttcttctttgccctcataatttttattaagtttatttttatttatttattttttgggatagagtctcgctctgtcacccaggctggagtgcaatggtgcagtcttggctcactgcaacctccgcctcccaggttcaagtgattctcctgc

SEQ ID NO: 56228 - DNA, 2222 bp, Homo sapiens
tggggattttggtggctccagaatccttgaagcagcaacctcctttctttgtgtagcagtgatgaaagcttctgaagaataggtctgatttgaaacagacccctcctcatgttccatcttttaccttctcccttgtggatatatgaaatattcctgtatagcttgaattcatccagtaagaagggagtgtcccagggtcattagggcttttaacctgtctgaggtatttagatggtggcttggtaatgtttgctgtctctcacaaaatcccccttacctttgccatttacctaggttgccatcagctggcaagaaactatcaacagttttgggttatagtacaaaaagcagcagattactaagaacacatcattcgttacttttgagatatgaagtggtcagatccagacctcaaagaatcatagtaactgcagaagcatctttgacaatgtgtgaacttgttattaataataactagtaaactgctaaagaaattaagggaaattatagcaattccatattcctgagccattctcttactgtttttcacacctggctagttccattttattttattttattttatattttttgagatggagttttgctcttgttgcccaggctggagtgcagtggtgtgatctcagctcagtgcaacctctgcctcctgggttcaagtgattctcctgcctcaacctcccaagtagctgggattacagtcacctgtcaccatgcctggctaatttttgtatttttagtagagacggtttcaccatgttggccaggctggtctcgaactcctgacctcaggtgatctgcccacctcagcctcccaaagtgctgggattacaggcatggagccattgtgcccggccttagtatccatttaaaaaaataattcaggttactgttacctaaagctgagagtcgtactttaaatcttttgatcaaagctttcttcggcttgtctcatttcaagggagggtggaatttataatctttaaaaatacatgctggaatgttagtaggatttagattagacaccaggattaataaattctcattataattgtgaaggattgcaaatgttaactgaaagacttgtgcatctcttgcccagaggatttttataatgttagcatttttagagtatttaaactcaaacttgctgaaagagaggggatgaactaatatgtggcagattggactagtggaacacaggttgtggagagccttgaagtcctgggttgaattctagctttgtgatttattagctaactgattttgggtaatgctactaatttttgaattctcatttcttgcagacagagtaatgccagtccttgcaatagcctttaaggctttacatggtttgccctccccaacctcttccatttttgatcggctgtcatcttccctcttgctctctccattccagccacactgacttgctccttgaatgctgatcagtcacactctatcttagaaccttggcaggttcctaagaccaagtgattccttctagtgggaaaacagctaggtttccccacagagaatggctgattgcctcacctccttaacgtctttgcttaaatgtcacctttttaatgaagtcttatccttcctttctttaaaattgtattgtcagttcccatccctcatgcttatccttgcctgctctattttctttttcataggacttaacacttttataatatatttatttgttacatttattgcctattggttctctttctatgatgtaggtcttagaaggcatggatttgttttggtaatttgtttagtgcctagtacagtgcctggcatgtagttaataataaatgtttgttggccggggttggtggctcatgcctgtaatcccagcactttgggaggctgaggcgggcggatcacatgaggtcaggagttcgagaccagcctagccaacatggtgaaaccccgtgtctactaaaaatacaaaaattagctgggcgtggcagtgggcacctgtaatcccagctacttgagaggccgaggcaggagaatagcttgaacctgggaggtggaggttgcagtgagtcgagattgcaccattgcactccagcctgggtgatagcgtgagactcagtttcaaaaaaaaaaaaagatatgtggggcatggtggctcacacctgaaatcccagcactttgggaggccgaggcgggtgtatcatgaggtcagg

SEQ ID NO: 56229 - DNA, 2652 bp, Homo sapiens
tggtggcggaggtgggggaagggaaaggtggaggggcggggggaggggaagcgcccgcgagccgacgcccgcccgcgcgcccccgccttgcgtccccctccccccaccccggcacggcgcgcccccgcctcgcgctccttcttcacctcatcctctccccccttggcgcgcgcgacccggtctttcacttcggcctcgcgcgcccccagctcgtgtcccttcatttcgtctccttgtactctttctcccctccctcacgccccgtttcccccgccatccccgctttcactccctgcctcatgcccgccatgctcccctcctttcctctctagcgcgcccccccctttttttttttaactctctccacccccagtggtgccctcagggtgcgggggccgctccctgctcagtcttgtgtttgcgggcggatgggacgaatggggaatctaagggtaaaggaagcaccagataattatctttatttagggaaagggatcaggagcgcataaccttacccctttatttcgtcgtccaccgttcgctcgccctcccgtaggggaagagaattgtctcaggctatgtgggcacttagcttctacagcgactgggcttgtgggacacactggatctgtcttccagttcagttcctgagggtcggtggaacttacccttccctaaccacaccgggacttagagtacttttggcctccctgctctcaattacattgaggagcgagccactcatgcgagtgcagaggttcaggtgccattcgcgcgcccggtacagctttcccgtttcataaaggtatggtagcctctttggattcttccccagcatcaacttccaaacacaagatgttagctcatagggctggcagtgaggtggagatggaggcttggtggtgggtggcatgtggatgctaactgagctagctagcaaccttttctctgttgtcccctggaaaatcaggtagcctcctgagaaccagttttctcatttctgataaatgcttatttggggggcgtgtgtgtgtgcgtgtgtgtgtgtgtaagagagagagagagatggggggatacttaatacatttcagcagaggcgaaggatacttaatatatttcagcaaagggcaagagcagtgttttcaggccagactgcaaaagagggatttggatttgtagctgatggaattaaaacaggtttaacagatctgtgttggagaagagctgatgcttttgtagtttttaggacattttttctaaaaatttatattttgagtagaaaagcatgcatgtggttgtacaaagtgaaaagtaagcttccttcccatctctgtcctccagccatctagtctccttcccctcctagcacagatgactttgatgttttctggcagcagcatggtgcctatatgttgttggtgattatcctgtttgggagtttagtgctaactttattgcttttcatttggtatgctgacctgaactcttccttgcagtctgataacttggattcttattttggtgctggagcagcctttcaagtattgtcctagagtagtatttctgtcagtacttagttgggaaggaggccacttctggaggtgctatggaggagttcagtatattttgagggaaggcccacacttgttggatcgtgctgctttttttgtgacggatatctagtccctggccatttgggaatggactgggtcaaggatcggattcatataagcagatagcttatatgaataactagttgatggtaaggctgtcttcactttttaggggaatagagtttttttagtccagtggcagtgatagtcatcatggaacaaggtagaaaagtactaatcagcaggaatcagaaggctgaatctataggctgagtgacccagtttgagtagaggtgaggcttacagacttttgtcctgcctattattccttacttgagaacactctccatgaggtgagagtgatttgtagttgacagcagcatccatctttatgacactgtggtttgccttccctgaccgtatgtgatgtgtgttaacttcctgtttagaggcagtcccagtagggtctgaatataggctgcactcaaatacttttctaggaacagtgttaaccaggttccctgatcagcccttcaaatctaaattctggcagtaacttttactgctgtgcttagcatagggccacagggtggtggcagagggaagtgtgaggaatttgttctgagcctcacaaccttaaagtactttcaaaagcttgtatgctgtcccccattttggggttttgcccccttctcccctttttttgccagacgggcaaggctggacctccaggttgaattttggggaccattgtgtcagtgaaggtatcctaatcatgtgttgagacctctgaattcatctcacctttaagcagtgagtcttgtgtgttgcatgtaaagcattcctcctgtttcaatttactgattcttcttcctttcctcccccacccaccaagctggaggtgcatgtggaggaaaacagcagctgtgctgtcctgatttctagactctggagcatattccatgttagccaccccattgggagtcatgctgacaagcagcccctctgcgcttaacttagaaggctcatgttgcttggc

SEQ ID NO: 56230 - DNA, 1147 bp, Homo sapiens
tggttcggatccttgccgtttcactttaccactctgagcctcaatttggtcatctgtaaaatggcataagcacctatctcactgggctggtgtgtggacaaccttgtgcagagcctggtacctaaacaaatgattcattcatatttgtctattcgttccaccagtattgagtgctttttatgttccaggcacggttttaggcactaggtatgtagcagattacaaaacagtccctgctctcaagagcttacattcttgtgggggataagaattcctttcccacttctctttggctgtgtcctgtaatggccctctgtctctttggcatcacctgtccgtttcttgtcctctgcctcccattcgttgagcctaactgtctccactatcttggctcccccaggccccatctccttggctaacccctgatccagcctctgttcaggtacggctgctgtgggatgtactgacccctgaccccaatagctgcccacctctctatgtgctctggagggtccacagtgagtctggtatttggcctgggtggggagggtgggtcccatacccagagggctcagtgattctggtggccttctttcctttcatccaggccagatcccccagcgggtggtatggccaggccctgtacctgcatcccttagtttggcactgttggagtcagtgctgcgccatgttggactcaatgaagtgcacaaggctgtggggctcctgctggaaactctagggcccccacccactggcctgcacctgcagaggtatggtgctaccatctgggtgatccctggtctgtccggggctccacaccccttttctctcactcatacacttctgcctccactaaaggggaatctaccgtgagatattattcctgacaatggctgctctgggcaaggaccacgtggacataggtgagattgcaggcaaggggctgaggagtttagggatctggggccaggtgtgggaggctgcggtcctaacatgttgacttccaccttcttccctagtggccttcgataagaagtacaagtctgcctttaacaagctggccagcagcatgggcaaggaggagctgaggcaccggcgggcgcagatgcccactcccaaggccattgactgccgaaaatgtttt

SEQ ID NO: 56231 - DNA, 1589 bp, Homo sapiens
aaggtgctgggattacaagcgttagccaccgcgcctggctttttttttttttttgagatagttttgctctgtctcccaggctggagtgcagtggcgcgatatcggctcactgcaacctccacctcccaggttcaagtgattctcctgcctcagtctcctgagtagctgggattacaggtgtgcaccaatatgcctggctaatttttgtatttttactagagacagggtttcaccatgttggccaggctggtctcgaactcctggcctcaagtaatccgcccacctcggcctcccaaagtgctgggattacaggcgtgagccactgtgtctggcccccagggccattgtaaacacaactctatatcttaactgtgactgggatggcacttctggagttatacagtgcacaacctgtgcagccacacacagctggccccgtacatgtaatgtactgtcctcccgttcctgacgccatcttcccaggctgtgtctctttccttgtggatgagctttcctgggagatgccatcgtctagacaccctggctctgctccatgcccaccatctcaacacttgctctcttaaaatccttctccaggtccacccagagcaggagaagcctgagccgacacccttagtggagctagaggagctgtcaggaagtgagctcactgtctttatcacacctcccgaggagcctgccttaccagagggcagtgaatccactccccagtactggtgagagtctcttagccttcacatgttccagggtcccatagactggtccagtccaactcgcttcgccctgtgctgactgccccgatgttgcttctctctgcccctccagctatgatggattcccagagctacgggctgagttgtttgagtctcttcaagagcaacctggggccctgcctgtgccaggcccttcccgtagcgcccccagcagtcctgctcctcgccgtaccaaacaggtaagcagtgggtggaccgcactgagggacccggatcaggctgaaggctgctgctgcttcagtttcctcatctacaaaatgggtataacaataatacttaacccatgaggttgttaggagtttaaatgtgcttggcacataagcaaccctgtataaacattagttgctattatcactgtcattatcatcatcatcatcacctccgtcttctgagcactctgggaatccaggggctggccatgtcttctagggcacctgcccatgctcaagggccagcctctctgcacggggctccaggcagggctgcagcctgtgaagtacagcatcccttctcctccttagagcacagacccttcctcagagaaggtgctacttcttcccacaccactttagggtctgtcctggtggctcatgcctttaatcccagcattttgggaggctgaggcaggcagatcacttgcgcccaggagtttgtgactagcctgggcaatgtggcaaaaccttgtctttacaaaaagtacaaaacaatcagtcgggcttggtggtgcgtcccagctacttgagactgaggtgggagaatcgcttgagcccaggaggccgagtctgcagtgagcca

SEQ ID NO: 56232 - DNA, 1857 bp, Homo sapiens
gctttgggcagacgcttgccagggtcacggccgccggccgaggaggaggggtgggggtagcggcggcgcccgcggcccggagcgggggttgggggagtagagaaagcggggcgcgcggaggaacgctgggtccccggcgccgcgggagctgggaggaccgagccggccgagcgagcagcgcggcagcacagtccccgcgtggcgcagcgcggcggggacgcggggaccgcccggatctccttccactgcgccccgcgctctgcggtcctcggccgcctcttcttccttcactcactgcccgggcgggagcggcgcccaagtcgggtgcgccatgtctggggccgggtagccccgccgcccgccggcccgccagctcgccctccgagccacccgccagcgggccggccggccgggaagcgcgggacaggcaggtaggggctggaccgggctgggcggcaggcggggacgggcaggagggagcgcgggcggcaggcggggtgggggatggcccccagctgctgtccctcactgcacatctggttccggttcctctctcctggggaagtgaaagtggaggggagggcacctcccgcaattagctcgccgtgcccggcctcctgcacccccttctgctcccgtgggtgccggagtcggagccgccctccctcccgcttgggtcacgcggcggccggcgctgctgccgtcacgtcctcggccgccggcgcgcctgcttctctgccctcctgctccttcctcagcctcctccccctcggcgcgccctctgccccaacccgaacttcccgtcacccggcacgcgggcgtggggacccggagtgggccctgtgcccgttgtcttccctagggagaaagggctgctttctgcaggactcttccctggcttggtgaggggaggccccggtgcgcaggtcctgcggatgggtgccacccacttgcccctcagaaggtcccacctaatggcctctgcctgctgccttgggcatagggctcccattcgccctcagtggatgagggacaggtctgtgccccagaattaaatcaagaggctgacgctgactcctggctttacctcccagaagtggagtctaaatttagctggggttggtgtgtgtacgtgtgtgcgtgtgtgtgtgcgtgtgtgtgtgtgtgtgtgtgtccagaggccaggtgatgaagaaagccagcctggctctatgagattccttattccctgttctctgggggaacagcaggaggttagcaggactgcacatcctggaaccattctgagcctcctctgccttgctcaggatcctatagtctgagattccaacttggcgtaatgctgtgctggcaccttcaatggtaaccccaccaccgccaccgccaccacacacacccataggctgacttcctctgagttgcagcttcccctccactgtttcaggaagtaacctcccttcccctctgaagcaccccccacgcttctgggcccctgctgcgagctacccaccaggctttttcccagcttctgcaccctggggcgcctcaggacccttggggctcctactccccggggttgggccatggaggcaggtgagaactaggctgttgtgggcctgtttctgtctctgggctccatggtggagggtgtgggatggccgggacttgtctctcacaactgctttggatctaacgagctacctaaggatcctggaggtgtgagaacactggattttgggccagattggtggagttaagctaggagaaaggacacttgggttcgttgaaaagactcttaaagcttgggttttgtgggctttctcagaaacccatggggtcctcttaaaaacctaggag

SEQ ID NO: 56233 - DNA, 2056 bp, Homo sapiens
aggtaggtttgagcacctgagatcctgctgtgatcacccacaccgcctgtcacctctgcaccccaggattccctcacggcagttctcagccagtgataactggtaggtgtggtgtttcctagaaagaagaggaagggcagtccccagatgggcagtgctgtcagggatagagtagggaggacgttgtgttgccgctttcatagtctggtcactgccacccattctgggtggaaaggggctcagttcccatcagtaatgttggcatctctggttttttgtctgtgcctgcaggacttcattcacctctcagccacccatccctgcagtcctccctaagcaatcccaacctccaggcttccctgagcagtcctcagccccagcttcagggctcccacagccacccctctctgcctgcctcctccttggcccgccatgtactgcccaccacctccctgggccacccctcactcagtgctccggctctctcctcctcctcttcctcctcctccacttcatctcctgttttgggcgccccctcttaccctgcttctacccctggggcctccccccaccaccgccgtgtgcccctcagccccctgagtttgctcgcgggcccagccgacgccagaaggtcccaacagcagctgcccaaacagttttcgccaacaatgtcacccaccttgtcttccatcactcaggtatgcgtggctgccttccctgcatgtctgtctcccttcccttttctcctgccatgttgtttccctcccaccctcctttcctgaaatacctactctatactcatccccttccattcctctgtcctccgcctgccccatcttttatccatcttgtctcctcttgcttcacagtgcaaacccaaacgctgtggttaagcttttttagcttcaaaccctggctccacctcttactagcagtcaccttggacaagttatttaatttctataagcctcagtattttcatttctaaaacaaggatggttcataaggatcaaatgaagtaacatacataaaatacttagcaccacacatagcccaggtatgcttgacaaatagtagcttaccctttccttttatttgcctcctctgttcctgtctgttttatatctgtcttttatctcatgcctctatcttgtcccgtctcctcccctgtatcccctcctaatttcatagaattcgtagaatcagtcaatttcctactgtggagcccaattccttcacttaatagatgaggaaagtgggacctagagggaaagtgacttttccaagtttacccagcaagttaggaagagttgagactagaactcgaagctcttagtttagggctttttccacagagatgaaattcttagcccttgtctcccttcctgtccttttcttcttgttctctatctctactcctcttttctttcatccaaatgctcttttccctctcctctgcccaacttttcctcctccattgctatccctggaatgtgtgttctgtgttccatctttactcaggtcccctcttttgtaggaaagactgaggccagattagcaagggctctgttcccagagtgtggagtgagcttgacttcccttcctttctttctccttttctttctttcttttcccaccccctctggcctcttcaaggctgtagaacagcagttctcaaccttagttccttatttactaacaataaatagttcaagtatcaagatttaagaatggtttacttctaaggctaggcacagtggcttatgcctgtaatcccagcactttgggaggccaaggcgggagttcaaaactagcctggtcaatatggtgagacccagtctctacaacaaataaaaaattacccaggtgcagtcgcgcacgcttgtagtcctggctactggggaggctgagatgggaggatcacttgaaccaggaaggttgatgctacagttccaactatgattgcaccactgtactccagcctgggcaacagagtgaggccctgtctcaaaaaaagagaatagtttacttctggagtagatttaaaattacccct

SEQ ID NO: 56234 - DNA, 3183 bp, Homo sapiens
gcccaaaaactgcgactggcatacacaaggagctctcattatggtgggtctctgcccaatgttaaccagattggctctggcctggccgagttccaggtgagtagaccccagccagggaggagtggagtttcttaggctgcttcctctgctgacttctgtcctttttggcagagccccctccactcacctttggattcatctcggagcactcggcaccatgggctggtggaacgggtgcagcgagatcctcgaagaatggtgtccccacttcgccgatacacccgccacatatccttcacaggggacttgggagtgtctgaaaggtagtgggatggggttcctcagggactcataggaagcacttgaagtgttgtgcgtcccttccttctcttggagctcttctttacccagcttccctgaaaagcgaccatagcccctgcgtcagcacctgctcctgtgacaaggagttttgctcctgaggctgtgccccctgtctctggctggctctggctgtcttcacatcagcttgctgccagaggcaagccttccttgtctcctgctaaaggagattgggtctcttctcagatttctaagttttcagtctcagagacctgcataactgtctcctccaagccctgcctgaacattctcctggattttttcagcccctttagacctgattccctttttctcttccattctttgatcctattgttgtcccttatagaagaggagaaaggtatgagtttcttgaaacaacttatctgctgccttcattgttctttcctcatttggcctctctcatctgtcctctctacttttttccttaactggtgctgttcacattgacagctctccctatagtcctgcctacttatctcctcccccagagtctagctggcgaaggtaagtgtccagggcgggcagaagctcctgcctactctctgacgtgtttctggaaggagttgccccttctgggttggggctgggattactgggctaaggtttcaacagtacctcttcctataacgccagggctgagagaggtggagacagttggagtaggtgggtcagagtccagccttggccatgttgacactagtggtcaagcctcccagtccagccagagcagaaccaatgggaaccatagccaggctggggtgtgtgtgtaagggggaggggagaatggcagaggggcaggtgaaaatggcaaccttctgtcaagggtgggtgcaagatgtagtgttctggcacttttagatttcttaaactctccccttgtccatctcactttcaatgctcatacccaggaatgctgctgggctccaagattcccattcagctggtcctggcagagagaagtttccagctctcttagattgactgggggaggggtcaatcataggcaggagaagaaccagaaagaaaaggggatgatctgggtgctcagccatctttacttccaccttagctgccccacattttccaacccctatgcccaccttcttgtccactgccagccttcctcctcatgactttgtttttctaccccaggacgatggcctggggcaatttccctgcagagaaggggcagttgtttcgactaccatctgcacttaacaggtgatggcttttgccttctttaggccagatctcttatctgtagtttctggggccctgctccctcacccccaccctgttccagaccagctagtgttttcccttgctgggcagggcttagggaccaggaagactgtcactggtgtcagctcattcctgctccccccataggacaagctctgactctgcccttcatacaagtgtgatgaaccccagtccccaggatacctacccaggccccacacctcccagcatcctgcccagccgacgtgggggtaagtggccctgtcccagggttgggagtaaccatggagctatttatttatttatttatttatttattatttctttcttttttgagacggagtctcactctgtcgcctaggctggagtgcagtggcgtgatctcggctcactgcaacctccgccctccgagttcaagcgattctcctgcctcagcctcctgagtagctgggattacaggcatctgccactgtgcctggctaattttttgtgtttttagtagagatggggtttcaccatcttggccaggctggtcttgaactcctgacctcgtgatccacctgcctcggcctcccaaagtgctgggattacaggcatgagccaccatacccggcctccatggagctatttaaagcaggtaggcaagtgagcactgcagccaatgccactgtatcccttgcaggtattctggatggtgaaatggaccccaaaggtatgtgttcctcactgctgtgggtactgaatgccaaagaatttctgggctggtgttgggattgtgtgcaggttcagggagcaggactccttcccacctgcttctgcttcctgtcctgccttactggctctttctccaactctcccatcaccagtctttctctttcaagtacctgctattgaggagaacttgctagatgacaagcatttgctgaagccatgggatgctaagaaggtaggaggaggccaccgggtgtcacccactagtctctctgctatccccttgccatggggcaggccttccagggttctctgctgagcactgtcctcattttccatattctcccttctctcctcagctatcctcatcctcttcccgacctcggtcctgtgaagtccctggaattaagtaagtactccctgaggttggctgagaggtgggggaaggaagtacagggagatgtaggagactgatctctgctcttccctgaccactgcacccaccctcctatttacatctttctttttctctccttcccctagcatctttccatctcctgaccagcctgccaatgtgcctgtcctcccacctgccatgaacacggggggctccctacctgacctcaccaacctgcactttcccccaccactgcccacccccctggaccctgaagagacagcctaccctagcctgagtgggggcaacagtacctccaatttgacccacaccatgactcacctgggcatcagcaggggcatgggcctgggcccaggctatgatgcaccaggtgagtgactgtcctggccatgtgcccactgggtgctgcc

SEQ ID NO: 56235 - DNA, 1034 bp, Homo sapiens
ggtcttctatgtgttgagaatattcattcctaggagttcttgaaagaactttcaggcctctgccaggctgcctctgaagcccccctggcttggtttcttgctttccaaggctggaggtcagagggaccaaggggtaggagtccgcctaggtggtatgcagtcttaatttagggacacattcttctaaaacaacagtaggtaaggatattgcaatgattcctcatggcagagagctagaaggaatttaaggattgatggtggaacattactacaacatctctagcctttttctgctggtctgactgtggttgcatttatgactgtgactctggttgtatttttgtgtgtatcccccttgactctgttacttttttttttttctcgtcctttcccctttgagtctctagggactatgtgccctagtttgtgggagtcagaagttaggtggggaggcaaatctgggagggtgtctgtgcacgcatgtgcacacttaaatgcatgtgtgtgcataacccactgtaaccattgtgaggattattatctaactgtagactgctcccctttaggagctttttcatcatgttggggacagagacaggaagatgggaggctgatcttgatagcgtgaggccctgccctcaggactgtgattctagcagaggcatggtgggatcttagggctcgtatgtgcaaagaaaggctgtgcgaaactcaaaagctggggcttctctttacggtgcctcgatctcttaaaaggccccttctacccaccttgctcctattggttaatttctcagctacacagaaaagtctagtgggcatacatggccaggggacccaaaagtctagagctagggacaagagatctgggactcagcctgttatctggccaggtgggagggctcatttgagacagagatggccatgggaggctataccactgagatactggggttgccatatatgagacctcaagtggtcttcaagtggtccagaggtcagcacagtgctcactaggctgacctcctggaaca

SEQ ID NO: 56236 - DNA, 1049 bp, Homo sapiens
gtcataaacctagagtcagtgtcctgttggtcctagcccatttcagcaccctgccacttggagtggacccctcctactcttcttagcgcctaccctcatacctatctccctcctcccatctcctaggggactggcgccaaatggtctctccctgccaattttggtatcttctctggcctctccagtcctgcttactcctctatttttaaagtgccaaacaaatccccttcctctttctcaaagcacagtaatgtggcactgagccctacccagcacctcagtgaagggggcctgcttgctctttattttggtcccggatcctggggtggggcagaaatattttctgggctggggtaggaggaaggttgttgcagccatctactgctgctgtaccctaggaatatggggacatggacatggtgtcccatgcccagatgataaacactgagctgccaaaacatttttttaaatacacccgaggagcccaagggggaagggcaatgcctacccccagcgttatttttggggagggagggctgtgcatagggacatattctttagaatctattttattaactgacctgttttgggacctgttacccaaataaaagatgtttctagacatctgtacagtatctgattcgtttgttttgggaaaggggtgggcatgtggccagcctgagagggcctgagtcccagatgtttacagctgttttaagattcttggtctcactgttttcactcaggacccgatagtccccttccctgaagatgacctaatttttcctcctttgtgtcttggtacttctttcccggtctccacccctcggcttcccttctcttccctcccctccctcttcctttcttctctcttcaatccctctctcctttccgttcgtagtctcagggctaatttagaactactcttcccagcttgcacctctcagggagtagccgagagggtggagccaagtccccagtttccggagtcagcagggctgctgggaagtggagtccgtttcctcctagtgctgcgtgactggggatgt

SEQ ID NO: 56237 - DNA, 1026 bp, Homo sapiens
agaattatctggcccaaaatgtttttgtttgtttgtttttgttttgttttgtttttgagaaagagtcttgctctgttgcccaggctggagtgcagtggcacaatctcgactcactgcaatctctggctcctgggttcaagtgattctcctggctcagactcctgagtagctgggattacaggcatccaccaccacaccctgccaatttttgtatttttagtagagacagggtttcaccatgttggccaggctggtctcaaactcctgacctcaagtgatcttcccactttggtcttccaaagtgctgggattataggcatgagccactgcccctggccccaaaatgttaatagttccaaagctgagaaactttggtctacacgtaacactgtgagtgacaccataatctgtgtgtacgtatcattctgtgtcagtgttaccaattcactctatctttgtgtgactgagagtagccctgtgtctgtgtcagaccctaggtctgtgtaactgggctttcaccagattttgcatctcactcttccttccctgaacattttgctgctgcttctgcccacagctccagttcccactgcaagagttcatcctggccatgggcttcttcctggtcctggtgatggagcagatcacactggcttacaaggagcagtcagggccgtcacctctggaggaaacaagggctctgctgggaacagtgaatggtgggccgcagcattggcatgatgggccaggggtcccacaggcgagtggagccccagcaaccccctcagccttgcgtgcctgtgtactggtgttctccctggccctccactccgtgttcgaggggctggcggtagggctgcagcgagaccgggctcgggccatggagctgtgcctggctttgctgctccacaagggcatcctggctgtcagcctgtccctgcggctgttgcagagccaccttagggcacaggtggtggctggctgtgggatcctcttctcatgcatgacacctctaggcatcgggct

SEQ ID NO: 56238 - DNA, 1052 bp, Homo sapiens
gacaactaaaaatatccccagacattaccaaatgtttcctgaggggcaaagccacactcctagttgagagtcactgatgtagacatacatgaaaaggtcacacattgcccatctccccaaatactcatacatagagccacatatcacaggacattcaggcttatacgcagtcacacggaaacacaggtcactcagtcacagacacacaaagggatacatccagtgttacttcctcagttttagaggaaaaaaggaaagagcccaggatgactttcctgccccactatccaacggcctcagtttttcctataataaaccaagtcctatgccgtggacttgatcattcctcacagcccacttccttgggccaaagcctaaaaaggttagcaacaccaagacccagggaatcgcttcctatccttctcaggcctacagagacctctatctccagccctttaggaaagtggtgagagagtgaagatgattcttggagcacttgctggtagctagaactgagaacccatagagcaagtcacacacctgagaaaaagtgtcttactgtctcaacgggaatgtaggggtcacacagggaatggggaagggggagggaacacatagaaagaattatgccccataaccaaaaatcacaattcataccacatgccaaaagtcttccacacagtcatggagtggcacatgaatcaatctccacaaaccaacactcccagaggtgtgtgattcccctcccgcaagtcacatgcccaggccagtgctcaccgtcacgtgcaaggctgccagggcctcatctatggcagccaggtagtcaggcagcaggtccaggagacaagtggccaaaaagacgccccccgcgaaacagcttactaggctcagggctttctggcgggaagctgggtaggggtgaagcacagaggggaataagcaaacaaaccccctccagggccgaccaccccaacccaaacaatggctacccttgcctttccctcctcctttggtcactccccgccagccccagagccctccctaagccaagc

SEQ ID NO: 56239 - DNA, 1146 bp, Homo sapiens
agccaaggtcacgccactgcactccagtctgggtgacagagcgagacaccatctcaaaaataataagaaagaagacgggatttggagccaaattacttgaacccaagtcccagctctactcctcagcactatgttattggccatattttctcatcagtaaaattggttaatactagctctgcttatccagagaataaattaaatgatctatttgagagggatttatgtactatacacacaatagaagcctggctctgatttcctcttgagtgtatcctggctaggctgaagtagaagggaaattagagggagaagctgtctggccttccttgggaataactattccttcctgccctcagctgccgctcagctttgatggaacaacgcttattttggaagttcgaaggggctgtcgtgtgtgtggccctgatcttcgcttgtcttgtcatcattcgtcagcgacaattggacagaaaggctctggaaaaggtccggaagcaaatcgagtccatatagctacattccacccttgtatcctgggtcttagagaccctatctcagacagtgaaagtgaaatggactgatttgcactcttggttctttggagccttgtggtggaatccccttttccccatcttcttctttcagatcattaatgagcagaataaaaagagtaaaatggtttccttcccttctgtaacttggagcaggaagtcatgggggcagagagggaaaggaggtggttacttaaggccccaatctaccaagtcttccccaccacttctcccttgttttccccctcttctactacttatttcaaacttctgggatacaatttcagctaaaacgtttatttctcactcaaaacttatttcccctcaaccctatacccaaagaagaaataaaatcacagatacataacagaagtatttgaggtaccctctcatatatgcaaacaaatgcagactaggcctcaggcagagactaaaggacatctcttggggtgtcctgaagtgatttggacccctgagggcagacacctaagtaggaatcccagtgggaagcaaagccataaggaagcccaggattccttgtgatcaggaagtgggccaggaaggtctgttccagctcacatctcatctgcat

SEQ ID NO: 56240 - DNA, 1808 bp, Homo sapiens
aaacaatgtaatggatgatgagttgggcataagtgcaggaaagacgggtgtaatagaggaaaaaaatgttatctgcttttctttcaggatgctataaaatcaccacggtctttagccatgcacaaacggtagttttgtgtgttggctgctccactgtcctctgccagcctacaggaggaaaagcaaggcttacagaaggtaaatggtttactaatgtgatttggggctttgagtttgatttttagaaatggaaacatttcttaggatttttcggtcttaacagtgacagggatcatctataatgtaaatttttagacaagaagtgttggatttggttgttttaactagatactaccaaaagctatgtattaatctcaaagcactactgtctaaagcggggataaatgggtgataaaagggcttaagttgataggaagtaaccagtgatacaaatgcgcaggtagctaagagttgagaaaaaagatgtagctttctgtgggtggatcatcatgcatctgcttttttgggagaggtgggcagaatacctgtactgatgacagctaatctctgaatctttttcctccaggatgttccttcaggaggaagcagcactaaaagcactctgagtcaagatgagtgggaaaccatctcaataaacacattttggataaatcctgtttattgtcttgtttaagtgttaggaagttcctgtctcaagtattctggggcaaccaggaagaggagaatattagagtcatttggggcacgtaagtggccaagtactttaaaagtccctttgggggcatttttaaccacctaggctcattggataaatttgttttttttttaaactgtgatactatctcaagtgttgtgtttggtgtttttttttttttttataagagagatggaatcttgctctgttgcccaggctggagtgcagtggcacaatcttgactcattgcaacctctgcctcccaggttcaagtgattctcctgcctcagcctcctgagtagctaggattacaggtgtgtaccaccatgcctggctaatttttgtatttttagtagagacggggtttcaccatgttggtcaggctggtctcaaactcctaacctggtgatccgcctgcctaagtgctgggattacaggcgtgagccaccgcgcccggccgacagttaactctttacaatacagtctgacataccagttttaagaaacagcttaggatgctttatttatagttctcagaagccttatctggaaacttaatgtagaagttgctgttaggcttcttgtcgaggactagaaatcttcattcccctgcagttaagagaaacttgtccaagcagaggttagtgccttatactccataaccaatgttgcagccgactttgggccaatggaggttgtagactcatgaagtgagggggagaacttgtggagttaaaaaaacctagaagaagagggaaaagttgagtgaattaaacgtgtgtatctgagcttttcaaagatgaggacagaggcttttttacctggctgtggtgttcctagagttggtacatacacaactggaactgtttgtatcttgtttaggaaggcattgtatgctggaaaaaggacaggaaatgtcacaaggcatatctgaggaaggccttaaaaggcaaagtcaactctagaatgagaatattgctaaaaataattcttaaaaataagtaatagtaatggcactattacaggaagtttttatcccaatttaacccattttagagttactttcagcttttggctgaaagggggaaaatgg

SEQ ID NO: 56241 - DNA, 1722 bp, Homo sapiens
cagggtcatatgggtacatattggcatggtcagcacaaaaacccagttttcaggccgggcgtggtggctcgtgtctgtaatcccagcactttgggaggccgaggcgggcagatcacgaggtcaggaattcgagaccagcctggccaacatagtgaaaccccatctctactaaaaatacaaaaattagccaggcatcgtggcacgcgcctgcagtcccagctacttgggaggctgaggcaggagaattgcttgaacccgggaggttgtggtaagccgagatcacatcactgcacttcagcctgggcaacacagcgacactccatctcaaaacaaaaacaaaaacaaaaaacagttttttcttatgtatttccccattgagagtttttcctcccctgcaataaagcaccatttggaaaaactgtggcagaatgtggttttctagaaacacttgcgtattctacatgttattgtttctcacagggtatttttctgcatgtttccaggtcatcagatccttaaagtacatcagataaaagggactgtactgattggagtcaattttgtgggctattcagagaagaaaagcccaaaagtgagtggagattataatgtaagaaatataaattaaataattggaatgtaaagctcttctttaaaagttgtacaacttacataaagctgagactatatacctctgtaattctgttattttggcccttgagagagtcctggaaacttctcccatagagctgaagaattagacattgactttattattattattattattattattatttgagatgaagtctcgctctgtcacccaggatggagtgcagtgacatgatcttggctcactgcaacctctgcctcccgggttcaagcgattctcctgcctcatcctcccaactagctgggattacagacacccaccaccatgcctggctaatttttgtatttttagtggagatggggtttcaccatgttagccaagctggtctcaaactcctggcctcaggtgatctgcctgccttaccctcccaaagtgctgggattacaagcgtaagccaccgtgggcggccaagaattagatgtttatattcacttttgtggttcttattatatttctaggaaatttccaacttgcccagatctgtagatgtggaactgctcctggtagatgatgtaactgtagtgcctgagaatgccaccatctataaccaccctgatgtaaaggtagaagctgtatgagtctagttaaatggaatcatattggaggggaagttattaaaattaatagcataacaattaaaaaacttacttatgtgttgaaaataattgatacatatatgtaaaacacatatataatagttgcactgtccttaaaaattgtactttaataattgtattttgtcttttgtctattcactttaatctttttatcccatattctttcttaggtaggtagaaattatttcctttgagctatttataaactgaagcaaacagaatattgtttgtctgatttttccataggaaacatttagccttgtggaaggatctggttattttttagtcaacagcagtgagcagggtgttgtcaccatcacttacatggaagcagaaagctctgttgaggtgagctctagagacagtcccagattgatggtctcaggccaaagctcattctgaggagattggaaaaattccattttgtgtcta

SEQ ID NO: 56242 - DNA, 1106 bp, Homo sapiens
tggatcatgtcccccttatgttgaggtgaccacttaattgctttcctgcctccttgaaagaaagaaagaaagaagactgtgtttttgccactgatttagccatgtgaaactcatctcattacccttttctgggtttgaagctgctgtctctagaagtgccatctcaattgtgctttgtatcagtcagtgctggagaaatcttgaatagcttatgtacaaaactttttaaattttatattattttgaaactttgctttgggtttgtggcaccctggccaccccatctggctgtgacagcctctgcagtccgtgggctggcagtttgttgatcttttaagtttccttccctacccagtccccattttctggtaaggtttctaggaggtctgttaggtgtacatcctgcagcttattggcttaaaatgtactctccttttatgtggtctctttggggccgattgggagaaagagaaatcaatagtgcaactgttttgatactgaatattgacaagtgtctttttgaaataaagaaccagtccctccaaccctcagacctatttgacttttatttattaaaactaaatgtgctttctccacagaagctatgaggtttgggttaaaaatagcatctttgtgggtggtagcaacaggatttattctttattattattatttttgagatgaagtttcattcttgttgcctgggctggagcgtaatggctcgatctcggctcactgcaacctccgcctcctggttcaagagattctcctgcctcagcctcccgagtagctgggattacaggcacctgccaccatgcccgggtaattttttatattttaagtagagacagggcttcaccatgttggccaggctggtctcgaactcctgaccttcaggtgatccacctgcctcagcttcccaaaatgctgggattacgggcgtgagccaccgcacccagctggagcaacaggatttaatatagagcaaatgtttagttttatcatctgtaaaatggagataagtattgtcagagtaaacatgaagattagaaagaacacttaatgtgctgggccttttataggttaacactgacatctcaggctga

SEQ ID NO: 56243 - DNA, 2507 bp, Homo sapiens
atctcattggttaaaactggatcatatgatcacccctagctgcaagggaggctgaaaaacaacaggatagtcttgagtagcttataccagtaatttgccttccctgggactaggcacactatttgttgactcttaacaggtttggggttcttttaaagaagaagaagaaattgaatatttattggctaggccactgaaatgggtctatcacacaatatctgtaacacaaagcattagaaagtataggagtgaatgagtgtggggatatttctcccagtatactgtttataatgctgtcttgaatgctttcacagaaaaatgttcagctgttcacttccattcctttcaaaccctgattattgtgaacacatttcttcgaagccaactgtattccttcctttgccatttcccttgtttcagtttctcaacccagggaataaatattgtgaaggaagcattttttctccctcaaaatgttgtcctaccaacttgtcagtctgaatttcctctgttggtctttccaccaactgactgactcttattgccctctatctgaatcctccttgcatccaccctgccttacagatgcatgttatatataccagctagttgaaagactcataatttacttctggtactctactaactttccctttttctctttctcctcctctttttcctctccttctcttgtgttcccctcctctccgttgctgctgcagagcgtctctacagccaacttgagcgaaaccgcctgctttctaatgagctgaagctaacgctgcatgatctgtgtgactgatgggcagggctcaatgatgcccattaaactgagcttactgctcacaccactgacctggaccccaacaaaaagctgattgtctttttaaaagttattattttgccctgagcaaattgcattttaattggggcagttagaatgttgatttcctaacagcattgtgaagttgaccattgtgaagtttctgtccctttagaagagattatgggtgaagaagggaggggcctgagagattatagtgagaaaacttgcgagaattttgttttccacccttatttgctgctctttcacttgggcactgactgtaggatatgttcccttgcatggatgtttttaacaataaaaggactgacttgacaagttgttgtaactgcttcatcggcaggcccaggaatgggtccttctgactgggtggaaaaaagggaagtgaaagaaaagttgtgggatatgaatatgggtctgtgttgccatcaccttctctgagttgaagatttgagtattttcctcacctctttagagcagtcagagtggtttgcttgctagacagattagattctccttaatgttcagctgctgattttctttctgacttttgcgtcctttttctggttttatgttaatttcaagtaactgtcacaagctagttctgttcaatagctctgcagcaatctcaaggtttgcttacaactacttgtttcagtagtattcttggctttgttttctttagagattatttgacttaactgtgagcgcccttttatttatcccatcagttattactttggcctctactttttcgaaaaaacatgtagtgcatgaggatcttcctgtgctctttataatctgagattctgatgtttctattgtttgcaatgttcaaactccggtgagccatttcaagagggtattgttatgtgggcaaaacctagaaaagtggatggctgatggttaaggcttgctctttcattgactgaaagctgaaagtgttggttgggtgtgggagggagaggaaatggctgataagggccctaactccctcacccaggaagtgcagcaacacctacaacttcagtaggcaagccaaaggccctacaaaactgggtgatgtaatagctcacttctgtggctgagaaggcagctgctttatcagtctgcagcttctctgcaacaggagcaagtctcaaagagcgggtagaccttgaaatttacttctagttcttgtaacttctctcctttacccccattagataaactgaaatgcaccaaagaggagcacctctgtacacaaaggatgctggaccagaccctgcttgacctgaatgagatgtagaacgccccagtcccaccctgctgctgctcctccctctgacccagactccgcctgaggccagcctgcgggaagctgacctttaactgagggctgatctttaactggaaggctgctttctcctttcaccaccccctccttccctgtgtctttttcgccaaactgtctctgcctcttcccggagaatccagctgggctagaggctgagcacctttggaaacaacatttaagggaatgtgagcacaatgcataatgtctttaaaaagcatgttgtgatgtacacattttgtaattaccttttttgttgttttgtagcaaccatttgtaaaacattccaaataattccacagtcctgaagcagcaatcgaatccctttct

SEQ ID NO: 56244 - DNA, 1647 bp, Homo sapiens
gatttttctatttgcttctcaaatttagtcttctcagaagggatactgctagaggtagaatccatacaactaaggaaatagggcccacagagccagtaacttgggccctgacacattaagacaaaattcaggcctcctgggtgtgtttaattggttccctgatattaaagttcagggaactacccaagatgggaaataccaaattcacctaagaattgagctgagtcccagaagcaagccaagtgataaacagcaccaaaaagagttgttggggcttcatctgtttgctgtggatccctgatccttgatgctaatctgcctctttgtatctttcccactaaccctgaaaagaagccacatttctcaggctgaagtgtctggctctcttttattattcctgctgccacctcttcctttttttcctcttcctttttcccagtttgctatctagattgatgctagtccttctcacctagagtatccttactttttcatacagataattatcaccgtttctgctctgttctggatctgccccctttactcctcggggaacccaaggccccactctcgctctggattccatttgggtcagcctggctggtccccaaggcattaggatgggggagcaaaaagcaacttatgtattttcttccacccccaccccaaattaaaatgttaagctgctggaaacctcatgccaccctgcatttgtgtcattgacaaagctgttgctgtccctaagaaggagccttgggggtgtgatgtggggaagagctattgtaggctccccctcctctgacttatgtaatcaaagccacttttgtgtgtgtctattttttcttgacatttaaactcagctgatctgattctaccagagtgatggatttagtacaggttactcaggatagtaattttagttatactcctcaagctgaacaagattaaattccttatttccaggttcttaaatcatcctgcctgcagtgtttccattctctcttcaggtattcctcctttggtgtggtgtcattgagaagccattgaagtgactctcaatacacattctgtacccttttaccggtggttcaaatggtgcatcctcagaacacccagtgaacccaatacattattgctaagattgactaattatgtcaactccagtcacagaaaaatacacaatggatagaattctggacggtttttttactttttcttctttaaacctttcttacatatttgagacttgctaccatttgcctgctagtgtgtgactagtgggatataagataagtgataaattattattgggaaaactaaaatgaccaatcatgcatatttcaaataatgtgcatatgaggctaatgatttattacatacataaatttctgctagtaaaattttccttggttcatattgtggaattaaatatcaacattttagaaattcccattataggccgggcgtggtagctcacgcctataatcccagcactttgggaggctggggcaggtggatcacctgaggtcatgagttcgagaccagctcggccaacatggtgaaaccccgtctctactaaaaatacaaaaattagctgggcatggtgggtgggtgcctgtaatcccagctactcgggaggctgaggca

SEQ ID NO: 56245 - DNA, 1551 bp, Homo sapiens
gcacatttagtgcaagaggatattcaatgtaagttaaatgtagggaggggggtattgcctgtgtgactaatttctactctgaaatttttaatctacttatcttacagtactctcaaaaagaagataaatatgaggaagaaatcaagattcttactgataaactcaaggaggtgagctgaggggatttatagggcagaacccaaaacatttagaggtatataaggcattaatatggatttaaactggctggtttgggttctgaaaggtccagaagtagaaggtggaagaaatagagattgttcttctttgtcttcatctctggttctgactaatttcatatttcccccaggcagagacccgtgctgagtttgctgagagatcggtagccaagctggaaaagacaattgatgacctggaaggtatggaacctggagtagggattgaaatagagaaatatagaggaagactgcccattaaccattaatctctttttctgtacaccaaaggaagttggtagtgacttggcatgtattaatatcatgtgcactgtcctatgccacagctaggcaaagtgggtcaaactctagaattggttttttaaatttaatcttttcctttaagaagactttaccaaatagtctgcaatttgtacccttcccttttgaggagaatgataatggctgcatttacctccaatttattagtcttaaacctttagtctgtgggtttaaatggaagccatgatttcagaagggcaagatgtatgtcatttcatggctactttccacagttctttttgccactcaagttgtcgggtatttatccaataaatgaagttgtggaataaccatatctgaacattgaccaatgtcaggagctttctaaatactttctgtccctgcaagttggtaactgccatccaccctgacaagggaacgtactctttgctttgagaactctgatgtatgctcctttggtacactctcttggcagagttgcaggggcagcctgtggagcagaggggccactaataggttcacattttgtaggcagagaagtgtctgaatatggatatatactctctccctttgctatttttgttcaattaagtgttatcactgctaggaattgggtacctggatgggagtggtatcctcttgagtgcttttggtaataggaatttctagttatgactgtgcccaggttctcagcccttgctgcagtcgatttggagtatcaagaaaggaagttggtcataggagagagtagatctgaaaatgtccagtcatggttgccagagtagatattttcctaactgtggtattagacccacagtcacactttcctaatttctaatgattccctctcttcatctgcttctgaaactcttcactctgtcccctcattcctccctgtggttcctgtgcctgtccagatgagctctatgcccagaaactgaagtacaaggccattagcgaggagctggaccacgccctcaatgacatgacctctatgtaactatctgacagtagagtggggctgggatcttgg

SEQ ID NO: 56246 - DNA, 2358 bp, Homo sapiens
tacagttctgagacccttggagtggagctgacgacacactcctcagggtgtcagtattgcttttgtcctatttctggcagaggtatgaaggttattgaaaaccgggccttaaaagatgaagaaaagatggaactccaggaaatccaactcaaagaagctaagcacattgcagaagaggcagataggaagtatgaagaggtaagtgaccttctgttagtccctctcgtatcggccttttacaaagcataatgcggtaaatggctcctttgcttcactaagctatactgggatcttttcctgtaggtggctcgtaagttggtgatcattgaaggagacttggaacgcacagaggaacgagctgagctggcagagtcgtgagtatctagctccccaaatcttgtcattaccaatttatcccttcccctttggcttgggcactaatatgaataaattagcattccttcaaccttgttaaacagggcctagggaatgggagtcatctatagtgcttttttaggcccaagaatggttttaggcttccttattctcctgactagtgacaagtgacaaaagaggctttcttattttttgttggtagggtttacaaattgagagcaaataaggactaatacatggtgaacagttaattggaagatcctactgggtccttccacctggggtggaagacatcaaagtggctatcctgatttaagatctagtgtctggctgggtgtggtggctcaaacctgtagtcccagctacttagtatgccaaggcaggaaggttgcttgaacccaggagttggaggccagcctgggcgtcatagggagaccctgtccctaaaacaaataaatttaaaaaaaaaatctggtgtctgttttggccactttgccaatctgctagggaaccttagggcaagggtagatattaactgctctcccgtcggtaccttctgggccttgattaacaaagtcagtgctgaatgcatatgtatttgtgcttccctcttacattcccgtctgccagacataacatatcatgaccatggtggtgttctcttcccattttttgaatttttttttttcgttttgctgcttgttttcttgctgtgttcctttttgacctttctccctccccacaacctggcttgtgccatccccgtgactatcactaacagccgttgccgagagatggatgagcagattagactgatggaccagaacctgaagtgtctgagtgctgctgaagaaaaggtactaaccattaagcccacagcaaggttatatatgtggtgtggttttgttttgttttgtttttgttttgcagctgcctcccctccacttgattttgttgagtgctgtctcatctcttcatggaatgctccattcttttccacttacttggcatctttcatctcttctttcctagttgcttcactgcctctccacagggtctccttcctttgggtgatttgggggactgtttgggttgggcatttgttcccacctccaccccaggtagcagttatgacttgttcctggtagtggatttctctcaagtgctttattagtattcaaacatttttgagcccaggaaggtctagctcctgacacgttctatggtagagggaggagggttgatgcttgctcaggttacttgggaacatctcttccccagtatgccttccaactctctctacatataggttcaattcacgtctatgtgtctctctccctttttttattctcttccttttcccttttcctctcctgtggtatttaaaatattcacagtaagtgttctgagctggaggaggagctgaagaatgtcaccaacaacctcaagtctcttgaggctcaggcggagaaggtaggggctggtttgtgaaagtgacaggctttggggcctgggcccagccctgcccttgatgaaagactggagacacgcattccatatataatccagtgaggcgtgtcctcttcctacctccttaccatgtattcaggttctgggtttaatgctattttctgtgcactttgattgctttaattaaaataacttcttggtctcaggttactggagtcatgtgctccttaggctgatactgctgtgctgaaaagcaataatcaagggccctaacaggctttctagcagacagatgggggcaacagacagaatcagctctgagacctaatgagcaatcaagacagatgacttcactttgccatcatgtgggtgtgtttcagtcatgtgaccttggggtgctactactcttgctcatcaagcaggggaaaggaaaaacacctccttgggttgatctgaataatatcaaagcttagatccatcttaaaaagtcat

SEQ ID NO: 56247 - DNA, 1273 bp, Homo sapiens
atccaggattccctctttttttttttttttttttgaaatggagtttcaccgtgttgcccaggctggagtgtagtggcgcaatctcagctcagtacaacctctgcctcccgggttcaagggattcttctgcctcagcctcccgagtagctgggactagaggtacgcgccaccacacctggctaatttttgtattttttattagagtcagggtttcaccatattggccaggctggtctcaaattcctgacctcatgatccacccgccccagcctcccagaatactgggattacaggcatgagccaccacacccagtcaggataccctctttaagaaaccttgcttttttttttttttttttcctgctttatgagacacttgaaaggttactgaggatgagacatgcctccaagccagagctcaggcagaaggaacccttcattgactttcttttctgactccagtgtgttgaggaatttgaactgagtccaggaagtgggtggtactaactcactgggctgggcaaggaactgagttttaaaacactcttcctgtggaacatatgggagttcgttgatgggaaagggaggaaatatatatatataaagttatgtctgctagatcttttaacagctgagctaagacaagttctaccctgcgagactctggctttttcatggtagtcaaccctgatcttaatgtcatagttatttcttcttttctccatgcctctgcttcccttgtccattctttccttcaaatgcaggctgaggctgaggtggcctccttgaaccgtaggatccagctggttgaagaagagctggaccgtgctcaggagcgcctggccactgccctgcaaaagctggaagaagctgaaaaagctgctgatgagagtgagaggtgtgtagggaagcctgatggagtgtggattttaaaagttcataatagttctgatcaagatttccttatagacctgttttctaaatagcaattctggctgcgtgtgatggctcacgcctgtaatcccagcactttgggacgctgaggcaggagggtggctcaagcccaggaagttggggctacagtgagctctgattgcgccactgcactcctgggtgacagagaaagaccctgtgtcaatcagtcaataaaaataaaatactaactccatcacacaggatctcctttctattctgcatattctgtccccttgaagacagtaagggtaacttagatgttgtgacccttttgtaattggtatttccttacaaattg

SEQ ID NO: 56248 - DNA, 1975 bp, Homo sapiens
ctttccccagtactagaacacacactcacaggggagaggcagatagccctttacccctgcttaggctccgcctttgtttactgtggggcagatagctctactcccttccaacttgcctcccctttggtgaagtttaaattccccaaggacacggtatctccctgggtaatgcatttgtgagcacagtgaactcaaatagtcctttactcacagggctcaagcctaactttctgatactctttcatttgaattttatctgtggcttttatctaataagagaaaccccagtgtggcagaaagccagatttaggctaatccccttctgtccttggccctgttctgcctgagagtaccatcacactgtcagtttcttgcctggaggggttgacatatttgggaaatctctttggagtggaggatagccgaaggtgttgtcagccatctggtaatgtgactgagttgctggggcattctactctttccccaatccctcacccaggatctttgcttcctgggcagtggagaatcctattattacttgaagggaagaaccacagagtactgtatatcctccacactgggcagagataggtcagctgaaacaccaaaaccgcatctggatgggcatgctaaaacctaagatgattaggaaagtgcagagcttaacgtttcccagggccacaggtagcctggtctgcaaaaagtaggcctgttcaatctcttggtacccattggtattatttgacctgaaagggacaggcactgtgcatagactcatgagggaaaagtcagcttgtcttccttgttcctttaaacaaagtatcagatcttgattctgcaggcttttgtttcattgtaaagagaactgatcctctgtgctaggagaaaagagaaaggcaaggtcccattccctaccactccaccctggagggggtctctgaagctttttctaggactcccatctcaggttctgcttttgatacaggcttgttcatgtgtgcatgctcttaggagggcaccaagatgtgttttccccctctcccttttcagccttgctaagaattctattgtaaatgctgatttgtgggagaaactgcctgagccagcttgctgtcatggcaactgtacacccccgccccatagcctgttatcttctactccagtttgggtaactactggtgagctgcatgatgtcttacatttcatgagcttcctctaaatctagttgtatttttcgtctgaggggggtaagtcattttactagcagtgtctcctaggtcttgcctgatagcctgacttgctcttgatccatggccttgttgggtttgtgaggagaaatgtgtgttgttacagagaacatctatttttctggaagaggcagaagcagagaatacttgtctttgtggtgttttgagtagtgtagttagaggcacaaatggtttcttaatgatttcagcttatgttgacttctcgattttctttgcctggtggctagattgtagccccagccctctgcttcccttcctagtctcttcagcttctcatgtttgtatgtggaagtttttgtgccagtcctgatggttaaaaaggagtcttttggtctatattcttcctcatcggagctagtggcccaggctgtttctatagctgcaccaactcctgcctgccaggaagaaatcagggtaatagaattcaggcacaatctgggctatagaagagagatcgtgtttaccaggcacttggataagcatctgaactgggtggtgtgcggggcatattaaattcttgtatactgttgcagtcagggtacctcccaccagtaaaggtagcggggaggcagtcatggaaagaggttttcctaccattagaatttatccatccacctgcaggctgcctccttctttccttgtttcttagagaaaacccatccaggatgggtttacttggactctaacctatatacttcattgtgaga

SEQ ID NO: 56249 - DNA, 2030 bp, Homo sapiens
tctgttcggggaggggcagtactgaaccttctgtgaaatggtgagggttttggggtgggaaccgtcggaaagaccccggcctgcctgctggcagcttttccgctccctcctcctgctcaggaaatgaggcagcagttggctgagaggaagcgcggtgccctccctccctggaggagctcgaggccacaggaccgcctctcatcctctggccaggggccctttcctcttacggggtgctcttgcagctgctacacccactctctgaatctacgtgaaacggcaggggaggggatagtacttctctcaacgttagtgcaaatgtaggagccaaccaaacttgcctggccctacccacaatgacctggaaggcaggaacttctgtcagattcaggcctttattgctgaagtgtgatcagtgcaagccgaactggttaagaacatttcttccgagcagagctgataagcgagtgtatggcagagaatcagatggtgtgccagtctcaaggtttctgattgacttgggcaatttggtggagacaataatgaattccaggtgactctagtggaatatttgttcaactgaaagtggaaacataaaatgttggtggagtgaacagtgattctagtgatttctttcttcctttcttttttttgagacagagtctcactctgtcgctcaggctggagtgcaatggcatgatctcggctcattgcaacctccgcctcccgggttcaagtgattctcctgcctcagcctcctgagtagctgggattacaggtgcccgccaccaagtctggctaattttttgtatttttggtagagacggggtttcgccatgttggccaggctggtctcgaactcctgacctcaggtgatccacccacctctgcctcccaaagtgctgggattacaggtgtgatccaccgtgcccagcctattctagtgatttctttaaacgtctttctgtttaaaagtggctgattagttttagtgtaagccataagattttccaaggtctagggtgcagtctaatagatggagctgatacgagttgaggctttgttttggaggatcttgagagagtaaagtaactgttgctaaaattcaagatccagtgaaagtactcatgtggtttattctttgttctttgttctttcccttggtaagtttttgtttttgtttttctttttggctgctcctctgggaaataactgagaatgtttttgggagggggaggggtggatttcagaaaaggatggtaattgggggacagctgccctccagtttaaatacttaaagattgttggaatactcacttatttttataagtggtcatggagatgctgggatgggagcttgttgtcttcctcagacacctttttctaggtagatttttttcctctgttcagtttgccaacaacttcttattatctgtgcaagtgagatggactggctgggtgactctttatggccagtggcactttctcatctcctttgttctggagaccagatagctttaaaggggaagacagaggaactggccatgtgttgagctgcagaatcttaggctcagtatttaaatatggacattctaggagtagttctaaggtgggtgattcctgcctcccatcccccctctttttttttttagatggagacttgctctgtagcccagcctggaatgcagttgcacgatctctgctcactgcaacctccacctcccaggctcaagtgattctcctgccttagcctcctgagtggctgggattacaggcatccaccaccacactcggcgatttttttttattattttatttttttatttttagtagagatggggtttcaccatgttggccaggctggtttcaaactcctgacctcaagtgatctgcctgcctcagcctcccaaagtgctgagattacaggcatgagccactgcgcctgtcctggggtgatgtttcttaagctactttcactcagagcctgccaaatttgcttattgagctgaggtctagtgaggaagtcctca

SEQ ID NO: 56250 - DNA, 1090 bp, Homo sapiens
tcaaaaaaacaaaaaacaaaaaaaactgcctcttagtgcgtatcacttgcctctcggtacctctctctctcccggggtccccacttggtgccatgtaaccatctttgtatcccagttacttagtagagttcctgtttcatggtctgttctcagcaaatatttgctgaacatagggctttgcctgtggagaaaaaaattggataggcttccctctgctggttcagcctctctgctaccacccagctttatgtcacagctaagtccagctccaagagaacacaaataatgggaaaacaactaggaagaaagaataagaaagggtggtaaacagaggcaaacaacacactctattctgccctctccaccaggtccgtcaagctgccctgcaccagctgtttgaaaaggagcatcagcagtaccagcaggaactaaatcagatgggcaaagctttttatgtagagagattctgatggcatccaaaacactgctcttccattctcaacatgcctgctaacctagccttctagaacctctaccaccttgaacctccttcccaaaacatacctggatcttgctatctgtcagggacttaagacagcacttccactctcacttctccactctctcgttaatcctttgccgctatttgggaaacaatctatgaaacaacagtaacaacaagagtgacgccttgtggtcatagtgggatttactatgttgatgtaagggggcaggggtggggaggggtggacaatgagagttgagaatcctgatttggtataacaaataaatttacttcctaaaggctcaaacttagaccactgggctcattctttcatgtctaaatcttgatttgtttcaaaagtgcttatttttcagctactgtaatcttaacctcctggatttcacttgccatctctcagatatcactttcacttatcttttatttatatttggacaaattgttctgaatgtggctattaatctacagacaccgtagtgcttgagtgaggaggcctgcattttgggttttgagtcagctagttattgtgaaactttggacaagtctctttccactgggcctgaattc

SEQ ID NO: 56251 - DNA, 1026 bp, Homo sapiens
tcttctaacagtggggcagaggttccaggtgaagaaacagtcttgggccaggcgtggtggctcacacctataatcccagcactctgggaagccgaggcaggtggatcacctgaggtcaggagttcgagaccagcctgaccaatatggtgaaaccctatctctactaaaaatacaaaaaattagctgggcatggtgccaggcacctgtaatcccagctacttgggaagctaaggcaggagaatcacttgaacctgggaggcagaggttgcagtgagccaagattgcaccactgtacaccagcctgggcaacaagagtgaaactctgtctcaaaaaaaaagaaaagaaaaagaaaaaagaaacagcctcactctatgggttttttgtctctactcctaactctaacccacccattcaacccccacctctgtacctggagcaggtggcgaaattcacatactcactgtctgtggcaaatggcattgggccagagaagaaacccgtatgccaccctaaggatgcaggacaccatggtacaggaattggcactggccaaaaagcaactactaatggtgagttctagcagggcaacctgaagtctcattcactactgctgtgtgcctttgcccattgagttttccaagctcttagtgtgtgtcattgcacatttatcttgtttgcctctaggttttcagcattacaccagagcaacacaactctaactccattgccaaaactctttttcattaagtgattctttgcatccaccttacaggcggcaggcacatgttaaagtcccaaagtatactctagttcctgctcctttcatcttggtgagactcaaaactgcctcttagatcgggtgtggtggctcaggcctgtaatcccagcactttggggggccaagacgggcagatcgcttgagcccaggagttcaagaccagcttgaccaacatgccaaaaccacctctctactaaaaacacaaaaattggccgggcatggtggcacttgcctataatcccagcta

SEQ ID NO: 56252 - DNA, 1046 bp, Homo sapiens
tcctatcactttgggaggctgaggtgggcggatcacctgaggtcaggagttcgagactagcctgaccaacatggagaaaccccatctctactaaaaatacaaaattagcccggcatggtggtgcattcctataatctcagctactcggaggctgaggcaggagaatcgcttgaacccgggaggcggagattgcggtgagccgagatcacgccactgcactctggcctgggcaacaagagcaaaactctgtctcaaaaaaaaaaaaggtctatgtctctcattagaatagaggttctggagactgaggcagatcaacagaactaccttttcttgcagagttttcaaaaggccatgggacttaagaagacggtcgacaggtaatctgcttctatcccctccctttacctttgagcttgacctttccactctgctgtcttccctgagccacctcccaactctgctgcatctctttaggggctcatcaagaggaaaacagatgcggaaggggtgagaagcagccttgtcctcaaagcaaatgagatcagcctcttagtgcctactaggttaggtgatatagattggtttttattgtcccctgcctcattctctggagaaaaattgaagcatgtttttattttctttttttatcaagaattcaagtatttgttgcctggctttgtactaattatgtggttggtagtgcagtatttgttgaaccagtgaatgagaagattcacaagactgggctacgtatccttttcaccctgatgaacttttgaaaaaactgatgcagccgggcgcggtggctcacgcctgtaatcctagcactttgggaggctgaggcaggaggattgcctgagctcaggagttcaagaccagcctaggcaacatggtgaaaccctgtctctactaaaatacaaaagaagttagccaggcatggtagtgtgcgcctgtagtcccagctactcgggaggctgaggcaggagaattgcttgaacttaggatgcggagggtgcagtgagccaagatcgcaccactgcactcca

SEQ ID NO: 56253 - DNA, 1957 bp, Homo sapiens
ctgggattacaggcacccgccaccactcccagctaatttttgtatttttagtagagacagggtttcaccatgttggccaggctggtctcgaactcctgacctcaaacaatccacctgcctgggcctcccaaagtgctgggattacaggcgtgagccaccgcgctcagcctcttgtatttctaagctactagatggggttttagtaactagtttacaaaataggacagataggacacaaataactatttgtgactattgctgcatttatggcctgggataagccctgatttctttgattagtcctcattctgtcaatgacctcccctctctgttcttcagggttaaagcacgaattgggagctctcagcgacatcaccagtcagcagccaaagacctaactcagtcccctgaggtctccccaacaaccatccaggtgacatacctcccctccagtcagaagagtaaacgtgccaagcacttccttgaattgaagagctttaaggataactataacacattggagagtactctgtgacggagctgaaggactcttgccgtagattaagccagtcagttgcaatgtgcaagacaggctgcttgccgggccgccctcggaacatctggcccagcaggcccagactgtatccatccaagttcccgttgtatccagagttcttagagcttgtgtctaaagggtaattccccaacccttccttatgagcatttttagaacattggctaagactattttcccccagtagcgcttttttctggatttgcattcaggtgttattcttaatgtttctgtcaaagcttcttaaaaatcttcacttggtttcagccatagttcaccttccctgttccaggtttatttaattccaaaggtgagagttggagtgagatgtcttccatatctatacctttgtgcacagttgaatgggaactgtttgggtttagggcatcttagagttgattgatggaaaaagcagacaggaactggtgggaggtcaagtggggaagttggtgaatgtggaataacttacctttgtgctccacttaaaccagatgtgttgcagctttcctgacatgcaaggatctactttaattccacactctcattaataaattgaataaaagggaatgttttggcacctgatataatctgccaggctatgtgacagtaggaaggaatggtttcccctaacaagcccaatgcactggtctgactttataaattatttaataaaatgaactattatcaaataaaacgtatgaatcagtcctttatagttgtcttttaataaaacaggcatttgataatgttatctgcacatttctaacagggtatagggcatgaggatttgcctccagagaattggtgggactgtgtgcataccctggacctacgaccatacacatactccttgggaccctagcacaagaaatcctaaaatcaggactgtggcccttgctcatagatgcctgtgtcaccaacagaaggctgcagaacaaggattctctcaaggtttctggggcaacaggccaggtggccaatcaactcctaggcccagggttattgttggaggtgtaaatgttactatgactactgaaaccttggttactgaactaaacagaggagcctgtcagtctcctcagactgtatcaagcaaatctatagacatgtctgtggaaaagatgacaaaagtagaagaggtatgcagagttggaaggaggggctgggttgaagtttgatgaagtttccagatcaatttactataagtgcatcttttactgggaaaggcttttgatgtaacaagggtataatgtagttagtaacaggagtgggaggctgtgtctagtacacagtaggtattcaaatatgtgttctatccaacccctgcgtgttttctttgatccattctgaaagtagagctttcctctccctatttccccccag

SEQ ID NO: 56254 - DNA, 1134 bp, Homo sapiens
ttccccacttgacctcccaccagttcctgtctgctttttccatcaatcaactctaagatgccctaaacccaaacagttcccattcaactgtgcacaaaggtatagatatggaagacatctcactccaactctcacctttggaattaaataaacctggaacagggaaggtgaactatggctgaaaccaagtgaagatttttaagaagctttgacagaaacattaagaataacacctgaatgcaaatccagaaaaaagcgctactgggggaaaatagtcttagccaatgttctaaaaatgctcataaggaagggttggggaattaccctttagacacaagctctaagaactctggatacaacgggaacttggatggatacagtctgggcctgctgggccagatgttccgagggcggcccggcaagcagcctgtcttgcacattgcaactgactggcttaatctacggcaagagtccttcagctccgtcacagagtactctccaatgtgttatagttatccttaaagctcttcaattcaaggaagtgcttggcacgtttactcttctgactggaggggaggtatgtcacctggatggttgttggggagacctcaggggactgagttaggtctttggctgctgactggtgatgtcgctgagagctcccaattcgtgctttaaccctgaagaacagagaggggaggtcattgacagaatgaggactaatcaaagaaatcagggcttatcccaggccataaatgcagcaatagtcacaaatagttatttgtgtcctatctgtcctattttgtaaactagttactaaaaccccatctagtagcttagaaatacaagaggctgagcgcggtggctcacgcctgtaatcccagcactttgggaggcccaggcaggtggattgtttgaggtcaggagttcgagaccagcctggccaacatggtgaaaccctgtctctactaaaaatacaaaaattagctgggagtggtggcgggtgcctgtaatcccagctactcgggaggctgaggcaagagaatcacttgaacccaggaggcagaggttgcaagccaagattgcgccactgcacttcagcctgggtgacagagcaagactccatctcaaaaa

SEQ ID NO: 56255 - DNA, 1745 bp, Homo sapiens
agagggagggtaaaagggggatcgcggatttaaaggggccgcggacaatacccggccccgccgcgctgccgctgccgccgccgccgccgccaacgccgctgcgctcccaactttacctcagtctcctccacactgacaccccgggccgcgccgcccctgtcacgtgatataagattccctcttccccaccccctccctccttttccctctcgcgctcgctctcgcgccttcccccgcccacttgccttcctgcgtccctcagcgcgtgacgctaaaaggggcgcgcacgcaagcgtgcgcgtgccgcctcgccacgagacacctctttccggctccgcgagtccaccccgcctccttcacggcggccctgcctccaccacgtgacgcacggatggccgccgcttcctcttactgtcgtagttccgcgtctgagcgctcgacgctcctgggtgccattgcctgcctgagtcacgtgtcagggggaagctggaaggcgtcgttctcctttcccagctctcctgcctgtccgccatgttttcaggccgggtctggcttggtcttcccccgtaaggaaatggccggggagctccaggggacccaggcgccgtcgcttcggcggagcctgggctgaccagccaggacagcggggtaaacccgaacaattctgcgcgaggtagggaggccatggcgtccggcagtaactggctctccggggtgaatgtcgtgctggtgatggcctacgggagcctggtgaggagattaccccaccccattcctgctgtcgcatcttacccagtagagaccctccttttgagctgtaccccgtctgcattctccacccactcacctgcgcctatccgggctttgactccttattccaggagtaggtgggagtttaagtcacttagtcgggccgacccgccctcgttagtctagaaccctccctttaacgctagagcacagaccccacgcctccctgctgctggcttcttagatccacccccatcataacggccttgctttgccccaagttttaccctgaaacattcctgagagccggaatctggggatttggaatgaaggcatgcttttttaaaaaaaaaacaaaacaaaactgactttttattaaaggatttttacatctttttggacaggtgtttgtactgctatttatttttgtgaagaggcaaatcatgcgctttgcaatgaaatctcgaaggggacctcatgtccctgtgggacacaatgcccccaaggtaggtccttagggcacaagttaaacatacttctccagatcttttagggtcaagaatgagatttcctctgcctttagtgatgactttaattctcatgtttctttgcgtgcacttgtccttgtacttactaagttgagcaggcactgtgcgctttggaacttggcttacctgctcagtgctgtggcaagcatgtggctcatcctggaacttctgtttttgtatctgcagaatgaagggcttgggtcgaagttcccaactgtttgtagtaaaatatttcccagctcatcttaaactacccagtgttttttgtttgattaggatggggttgagatcattaaggttaacccaagagcaatgagaagggttacctttacataattttagacttaagaggagctccataaatcatctaattccaccattcatgttaccaagaagcccaagaaaaggaggcagtttaccagaagacgtataggaagtgaataaccc

SEQ ID NO: 56256 - DNA, 2389 bp, Homo sapiens
cccacaccgtgtgttcccccactgtacacccccccccgagtcatgcgagccctggcgccccccacctcgagtcggcccccggaggttttgtttatggttgggttcgcggcctagtgggccgcgccagagccggggcctcgatttgggagcgtggccggggcggggcttggagcagccgtaggaagggggggccatgcggctagagcctgagaggggagagcgagaaagagcgcgagcgagcgaggcctgggccttgcctgaggtagggctctctcttcaccccggccggtgcctgcggaggagagggcctcctccctttccacccactgcgggcctcctctgatccggatccggcctggtttgggggtggcgtgggggagggagggcgatggggtggagctcccccaaactcccccatgtggccctcagtttggtgtgcgaaggattaatttgttccggctgggaggtagggaggagattggccccgtgggctctcgatgtggcgctgaggggggtgagcctcccatcctccacccgtgggcttgcgtcccctctccgtttccaggctctttgtcagctcctcttattaccctcccttctttctcaccaacccagttcttggaatatgtttttgctgctgtctttagcttcctgtttatactgtagtttgggtaccccaaacaattgtgttatttgggaagctggacatggaggcccccatagggtgtatttacgcttaagggacgtcactagagcactggggtatttgttcactcttctcataatggtacaggaatgcccagtttcttcaaacccttaaccttgtggacagcccttaaattgctttgcaaactgatgtcacaaactggagactgctccttttccaccattcttgaaatgtagccacctctggtgtaggatgttgtggaaagaaaaacaccacagtaacaggcgtttttgttattattgttaacgtttttgcctttgactctccctgattattaaatggagaaatcctttttttttgtcttctctcccatcctaccttcctccgccgcatatcctgttttggggatacctgatgtgacttgctgggaggtgatggacattactagtaaccagcgtttctagagaattaaaacattttggctgtgtatcagttgataaaactgctttgagatctgtctccattgtacttaaagattagactatcccaatgattacagagaattaaaacattttggctgtgtatcagttgataaaactgctttgagatctgacaccattgtccttaaagattagactatctcaatgattgtttcctttgtgaatgggaaatattgctggcacataaactagtgatgaaaggcctaaaaatgtcctgttttgtttttcatctttaaagctcctccttgctatgtcctaactgggaagtactcttactaactagatatcaaggtggtggggaaggggatgcaggggccatttcaacaaagcatctacagaaattagttgttctgttagaggtagcaaattttacccaactcagtctagcttcagtttctgaattgtttcttaaattagattgtaagctccctgagggcagctactaagtcatactgcttttgtattttcctgaagtattggacacatagtagattctcaataaatatttgttatttagttttttcagtgaaatttctctggctatttttttaagtagctagttttcaaaaaagagtcaagggcactcctgtgttgaaacctctgtttactctcgcacgatttccttggtctccaatacttctcaccctacttcctttaaatctttttattttctaagaaagagcaagtaagtaacaagattcttcatctccagtgtgatagctgggaatgggtctgcttgctactaattctgtgccctcaagtgatccattccagatcacttacttttgacctgttgctcagtgttgtcactactaggtggtaaaaattttcttagtcacatttcgaagcacttgtaagagggaaatgttactagcaagagtgattaggagaatttttttctttcttggttaattatatctttcaagatgactttttaatatgtttacatctgactggtacagtatatgcaatagtgtatagctagtcatgcagtttatacctgcaatataacttatcctcacaaatagatatcacatgtggagtagaaaacagtcaatatttgtaagttacagtagtgggttggaaatgactatgccatattagaaacttcatcttagagccaattttaaaacaaaatagttttcctctcgtctttatatatatacgtatatatgtgtatatgtagtcttgttgatttggattcggggtacttggttaaaca

SEQ ID NO: 56257 - DNA, 2333 bp, Homo sapiens
aatgggctactgtgtagcaaataatcctttctagcttgaaatacttatgggcttttgtgtgccaatatgtgtagggggaagaggtaatgggttaaaaattacctgagaagctaccttaaaaaaatctttcttgatacaaagacctatgcaacctattgacgcaacttggtgaagaatttatgcacagaaaaagtcagctttctctgtgacatccaagaaagtcagatgaaattcacttccctaatagttaatccttgcatatttctttagaagtccttcctcccactcaaatccagtaatatctctgggcagtctagaattacgttgtataaggtttcattaacaagaaaaattaaatatagagcagaaaagtataaacttaccctctttggaagggaataaatgcagagtaacctattattttgaacactctatcatatgattaatgttttcttttttactaaatgcagcagctgagattgtattataaaacaaagtatgaactaaaggaacttgaattcagtagaatccttccttgttagaagtcttgtaacaaaaactatattctggtttggggaaggccctgtgtgttctgtgtctctttaaagactcaactaagtcatcttgccagcattaaggtctcaagtttaaaatgatttcttagaagcactttcttccaaataaaactttgtgctagatgcttttggtttgagacaaatttgagattccctgtatattaaggtgagtggtggagggtaattgccattttggtttcttgaaaatgtggactaggagaccaagagaagcacctgtaaaagcagtgtgttggaattattttccagagaacagagattctggacaaagtcattggggctaatacgtaccctgttgaaggctgtggtttaaaaaaacaaaaaacccccacaaacacaaaacaaacccatagcatactgagagagatgaaacttgagggacaaagaagagtctagacttgaacttgtcctttcccaagcaatggaggtcacatgcagcttacataaaaaaggttgtaaggcaggtaaggctgttttcttaggtgattgaatacagtatttaaaattatttctctggagtgtagactaatctccttcctggaaggtttttgtttccagactttactgattatctttccttctgtcaaaggtacttcagatacttgcatctatgtaaaaggcttttgattattagttaaatgtaaagtctgcttatgggggactagtaaccaaactgctgtaacttcttaaaaaaatccatcacttacacatgctttatacatttcttgttacataaaaatggattaacagccatagctccttaaggaatttatcaagctaattatgttgtaagaataaatgaatcttattgatttgttcctttgaagaagtgaaagtgtttggtggtgaaggtgctgatgagagagttaaaaacatattttgcccacatttaatacctaattttcttttaaatctttcagtattctaccttgtaaatactgttatttgtatatactgtaaatgatgacatcggtgggcactaaccgagcccggggaaactgggaacaacctcaaaaccaaaaccagacacagcacaagcagcggccacaggtaaataatccaaggcatacggattcatggatagcgttgcctgctgatactggtttccatgcagtacagcatcattctgtgctttgaactgttggtttaggttccttatttttgttttctagtccttggctctttttttacttaggtcctgataactgttcatgacatgctgtaaggcaagatgcttacttttttgttgtttaatactgtattatgaggcttagcactttattatgggtcctgtgctttttatcttttttttttttgttttgttttaagataggagctccctttgcctaggtcaaagtgcagtggcacagtcaccattcatttgtagcctcaacctctggggcttaagtgatcctcccgcctcagcctcctgagtagctgggactaccagtgcacactaccatgccaggctaattttaaaattcttgtagagatggtagtcttgctgcattgcccaggctggtcttgaactcatgggattataggtgtgagtcactgcccggctctataactcttaagatagcatttcccttctcttacctgggccattttagcaatacctttctatttcttagaccttccaccttgatatctctctcttttgtttttgagacggagtctcgctctgttgcccaggcttgagtgcaatggcgccacttcggctcactgcaacctctgcct

SEQ ID NO: 56258 - DNA, 2330 bp, Homo sapiens
attttcctctctggttccattgagaccttacctgattattcctttcccatgaggagctggcaacttcactatgtttcttcaaaattaaatgaaacaccttagagcattgctcaattttaagttttaaagagtaaattaacctcttggatattaactttgatgtagatatattctgtttctcataccaggttgatgttagttggtatgtaatgtgaatgaattacttatatttgattatggtcagataaatcgaatatgtaagattaggacatcccccttacgcatttttctttcatctgtgttttcaagtggatttctagtagaattataatacttagttggggcagtaaaattcctagtatctgaacatacactggatatatagaagatgtgttgagtctattgtcagacttgtattctaagctctaggaataagaggatggcgttggttattacagaaataagaatagagtttacacatggctttgtgacttaatatgaattaaggggcagatgtttcagagcggttctgtgattctaagacggaagtccctttaactgtgaagattggtgaatgagttccttactctttctgtaacagtttcactcaattttttgtcattttactgatttaagcatctttttttttgaggtggagtcttgctctatcacttaggctggagtgcagtgccactatctcagttcactgcaacctcctcctcccagattcaagcaattctcctgcctcagcctcccgagtagctggacctacaggtgtgcaccaccacacccggctaatttttgtatttttagtagagacggggttttgccatgttggccaggctggtctcaaactactcacatcaggtgatctgtctgccttgggctcccaaagtgtggaattacaggcgtgagccaccacccgcacctatccctgatcccccattaagcgtcctaaatggtgctttattacttgctcatttgttacaaggaaaagaaaattggggcagtggaggctgacgaaataggttcctgttctctaaactgttgcctcatgattatgctttcttgatctcatctcaattcctaggccactgcagaacaaattagacttgcacagatgatttcggaccataatgatgctgactttgaggagaaggtgaaacaagtgagtgtatcactaatttactgtacactatgagaaaagataccagtattaaggcataatcaaatactgtagatggatgccaggatactttctactataggtattgaaagaattttgacctgaaatataataggtcaggccaataaataagtgctttcattctctaattttttgtagccctttgttttgttttttgtttttttttcagatgaagtctcactctgtcacccaggctggagtgcagtggcatgatcttggctcattgcagcttctgcctcccgagttcaagcgattctcgtgcttcagcctcccgagtagttgggattacaggcgctcaccaccatgcctggctaattttttgtatttttagtaaagatggggtttcaccatgttggccaggctggtctcgaactcctgacctcaagtgatctgcctgcctcagcctcccaaagtgctgggattacaggtgtgagccactgcacccagcctattgtagccctttggatagatactttgtttggaaattttatcttaattttaacctcttgcctgttgctgatgccattttgtagaaactgagcagttgtgggtataggaaatgtggaaattcatgctgaagcctgtgtgtttcagagtttgattctgtatttgatgcttaattgctttgtaaatacttttgacctcatccctgaaccacagatgttaatatttggcttttggaaatagaataccaaaattctacatgttttcctttttggcgggggttgggggggtggttctggaaaacctgctaggcaaattctacatcatttttctttctttcttttttgtttttttttttattttgagacggagtcttgctctgtggtccaggctagagtgcagtggcgcaatctcagctcactgcaacctccgcctcctgggttcaagcaattcttctgccccagcctcccaagtagctaggattacaggcgcccgccaccacacccagctaatttttgtatttttagtagagacaggtttaatcattttggtcaggttggtctcaaactcctgacctcaggtgatccgcccacctcagccttgcaaagtgctgggattataggcgtgagccactgtgcccagccctcatcttttgctttttaaacttgtttttttcaaa

SEQ ID NO: 56259 - DNA, 1090 bp, Homo sapiens
ctatcaatgttcttctggaaggaaacccagacacggtagagtgcttatagagtgttctaggacatgggtcctcaattgggaggctagtaatgttctaaaagtagcaaatggcaacataccttaaagcagagcacctttttcttgaagtaaagttgggaactttcttggagattgttcaccacaggttataaatacttaaaatttatgtgtactacatcctttttatgaggataatgctcataggagaaaacagtgaaatcagtctctgctaattggcctggaataaattatttattccaggctagtgactgttttcaggctgtggggttaggctgaattagaggtgcgatttgatagccttggatattgctgttgaacaaagtcacacactatacttgattctgtttttttttctttttattttattttattttatttattttacatatttgattctgaattcaggacattcccctcaatatcagcttcgcattgcacactactgtttcattgcctgaacttccttctgttgaggtagcagagaaacaagctttgtagcctgctgaccatccctggagatgataggggatatcttggaggatctcttgccctggaatttagacaagtcgctttcacttctccttcccacttcatgagaattctgtttttatgcttgtcttatgtttgtaccaaattgtaatcctctgactgccttattgatcttcagaatgttcctgcagtgcttactagagaaattttgtttttttaatgagcagtgtattattattattattattattttgagccagggtcttactctgtggccctggctggagtacactgacatgctgcaacctcctcgtcctgggcttaggtgatcctcctacttcagcctcctgagtagctgggaccacaggcatgggccaccatgtccagctgattttcccatttttagtagagccagggtttctccatgttgctcaggctgatttcaaactcctggactcaagctagctgcccgcctcgtcctcccaaagtgctgggattatgggcatgagccaccgcacctggcccagtgtattattttgaa

SEQ ID NO: 56260 - DNA, 1114 bp, Homo sapiens
tggaccacctgtggtcaggagtttgagagaccagcctggccaacgtggtgaaaccctgtctttactaaaaatacaaaaattagccgggcatggtgtcgcgtgcctgtaatcccagctacttgagagactgaggcacgagaatcgcttgaacctgggaggtggaggttgcagtgagccaagatcacaccactgcactccagcctgggcaacagagcgagactctgtctcaaaaataaataaataaataaatataaataaataaaaaataaaggactttactttttgtagtgatatgtataaaatatttaaacagaagtaaaagcaaactaatggaagtgttttagacatggatgctgagtggagaatggttaagtcaatcagtcatcccagctttcatctctagtgtcctgatagcactccatattgattagatatgaatgctctacccttctatagcattcctgggagatggtcgggaagaagaagggagtctcaggccagaaggatggtggccagacggaatccaatgaggaaggcaaagaaaatcgagaccgggacagagactatagtcggcgacgtggtgggccaccaagacgggggagaggtgccagccgtggacgagagtgtatgcatggggctttatcaaaaccagctgtgggtcagtaatgtctagactctagggatgtgccagggccctgctagtcaggacctaggaaccattatattatccttttgcttttcttgccgtcgtctgttctgagaccttgacatctcttgcatgtggccttttctaccaactgccaccagtctggcatgagattaccctgtagtcatttataaagttaaatttgacttgcagctctccattaaggcacattaccattccctgagaaacatgttcccatccttccagctcattttctcttcgttgtttttttaattcccaataccatattacataccatttatatatttgtatatatcctgttgactgtgctctggccatctgtggtttggtttttttgttgttgttgttgttttaatttttatttttatttcagttcgaggtcaggaaaatggattggatggcaccaagagtggagggccttctgga

SEQ ID NO: 56261 - DNA, 2033 bp, Homo sapiens
ctgagagcaaaagaaaaatctctcaacagtaatgattgtcctactctattactgatgtgtaacatgggacagagagaaagaacatctgatagtatcaaccactttttattccagagctgcctcagctggcagggtagttttttgtatttttgaggcaaggtttcactgtcacccaggctggagtgcagtagtgcggtcttagctcactgtagcctctgcctcctggattcaagtgatcctcctgcctcagcccctcaaggagctgggactataggtgtgtgccaccacactcagcaaatttttgtactttttatagagatagggttttgctctattgcctaggctggtctcgaacttctggatgcaaccaatccgcccgccctcagcctttcaaagtgctgggattaccaccgggagccactgtgcctgcctggcaaggaagttttatatcaacttctaaaatacatctctcttctctttttctcattctttctttaggtggctctggtaggcgaggaggaaggttttctgctcaaggaatggggtaagtttcattgatctagtgtcttaattttttttcccttaaaaattactgtaggcagccttaaccaaaatgatcagaatgatttctagactggtcagaaagatatggggacttagggctcatttcttagggataaacctttaccacctggatcattacctatattttatatatctttatttgaatcaatatacctgttcttttctcagaatatcttagatatatgttgagattataccatgaaattttgggtagagtgataagtgagaaaaagtagatgacacacaggattatagaatggggccatgacagatttgtactaggaaggatgcagtcaagattttgattctttgagttaatatttgccaaagctgcttagaggtcagagactcttaagttttattttttccagaacctttaacccagctgattatgcagagccagccaatactgatgataactatggcaatagcagcggcaatacgtggaacaacactggccactttgaaccagatgatgggacgagtgagtgaccatttatcattcatttcttgtctctgggaatctaaggaaatagttttttctgattatacttacattaaaacgtggaagaatagtgtttggttatggagatagggtgagaaagggctggcagttgtattactgtgtgtactgtttatgtaacgtgcatatgggcacattacacatgttatttcgcttaatgctgcttgatattgtatgaaataatcattatttatcatcactttccagatgacaaaactaaggccgaaagagaggttataaatttgctagtatttgaactcagcattgtttgaccctgaaagtccatgccctttcaactatgctatgtcactgctattaggtccaagtgtattttctagtgtttatgttagggtagtgttgccttttgaaaagatagccagaattaatcaagccactgcttgtaaagatgaacaaggcctagaatcaaagtccacactatccatttatttgttttctgttactgagataagaatatcctttttttccctttatttttgggacatgtcagtatctgaacaagaagatttcgaaatctctctagcctttctggtgccctgttgaacagccttcttggtgtgatggagtattcagggtttgaataagattacttttttgttaactgactttggtgcctgcgtctgggctggatataaatgtttaaggatatgttaagctgtggtatacacctaagatgtgtttgggggtggatacgtgtgccactttcaataagagcagttcattttagtaagaaaactctggagtgctttcttgaacagctgcctcattctggctgagctaacacatgagagcctaaggctttttttcctcttacaaagggggatgagtagggcctgaaatgtttgactccttacctgtttaaatttgccttgtcacctttcacagatacgtgatctctgggccttta

SEQ ID NO: 56262 - DNA, 1186 bp, Homo sapiens
tacaggtgcacgccaccacgcctggctaatttttgtatttttagtagagatggggtttcactatgttggccaggctggtctcaaactcctgacctcaagtgatccacctgccttggcctcccaaagtgctgggattacaggtgtgagccaccacgcctggtcgttgttaatttcatgatatgaacataccttcatgcatggtttctttttgtgttttcctgatagcaaacttgagtttcccctttaaattaaaaaaaaaatccaaacctacctttaaaatatccacaggtacaatggggattatgtattggggcagactttctcatttacaagcaaaatttcactggttgttttttcttttcttttcttttttttttgtttcaggacttgatttcattggggttgaggggtcaaattatcccccaaaattatcccccagactgctcctggtatgatacatccaggtgcctaactgccccagatatttttgtagatttttatgagctgaaatatctgtggatatgtcatttttatgtctttctgctttttctctttctgcctttttctctcatttttctgtgtccacttacctttctgttcatttaatgaatatttgacagttacactgattgctttctgctaatggaatggaaaccctagtctgttgtttagagcatttccatctattctgttccttaatgcttcctcagctctctctcttcctcagccatgaccgtatatcctgaataggaacataccagttaggtgtctacgttcctcctttccatcccagttgaagtcatcagtgtgcagaaaaaaattcttgcatcaagagcctagattaaataacctgttagatcatgtctaactctaggattgtgtataagtgctaatgcaacttggattccatcgagccaggataagatggatgtcaatgagaagaaagtgtggtatcaatgaaggagaaaagaatgtggtttgtaacttgtctgtactgagattggactttggttttgagaatattgtcattattaagtggtttaggatttccctggtgcaattttaatattttcctgggaaagtctttacaatgaatatattttcctctaagaaagaagatttttgcattattaaatgtttagaagaattttagatgggctttgtattagaatacttctaatgtggt

SEQ ID NO: 56263 - DNA, 2554 bp, Homo sapiens
aaataagggtgctcttgtcccttcttcagacaggttcttgtttttactgtgcctttggctgaagggaagaatcctggttcttgttagaaattctcacccttattttttaagaaaggacatttttttttttctgaaaatatatgtatacatgaagcacaaaaaaggaatgtggaaggtggtttgattgcttttggatttctccagtagaaactgtatcccagcttccgtattaccaacaaacacaaggacagtgtatactcccgttgtctgtgccatgaccatagcaggtcaggtttcaagttctatatgagtaaggttaggacagtaactatcattcatacctgatttttcagtcttgttcattgtcttttgaagaggacagctctataggggcttttcttatacagttaaaccaataagatctataaacttgacttctgctgagtatgcatttttaatctaattctcatagcagatagttttcaatgccctcagttcgggtttcaaacccacccttcttcactgctctttcactaaccattatgtggtaaccatttgtgtttctctatcagtgctactatccttcttcagactgcctacagtattttttgtcttatactagataaataggtgtagtttgcatgttatggtttaaattggctgctgccatttcactgaattgaccactaaatcaacctgaggaccttaaagatactgctttgagcattgggtggttgtctgtctgtccccccccccacccccattcctgctttgtaacaaaaactgaaagtagctatgaaatcataatcttattaaaaccctggtactctgagatatccttttctaaagagtgtttccttacctttgaagcccaagaatttctttttttttgttttgttttttgtttttgtttgttttgagacagtttcactcttgttgcccaggctggagtgcaatgccgcgatctcagctcactgcaacctccacctcccaggttcaagccattcttctgcctcagcctcccgcgtagctgggattacaggcatgtgccaccacgcccagctaattttgtatttttagtagagacagggtttctccatgttggtcaggctggtctcgaactcccgacctcaagtgatccacccacctcggcctctcaaagtattaggattataggtgtgagccaccacacctggccttctgattactaaattttagtcatacttttggctgccaaaaaaattaatacattgatgttttctatacatgctttgtactggcatttaatagtgaagttacttcactatttttctttattctcaggtgcatggaggactgcaacagaggagtgggggactgaagattggaatgaagatgtaggtattcccaggtcattcctcactaatgccttctatccctaagtgttgtttagggatagaaaatgggtatgtttctacccctcaaaattcacccttaagattctgacccaaaacttttacatccaaaatagtgttctgagccagaacatttcacatatgttatatgaaggagactgggcatgaacaggactctgtggaaccacactatggaaagggcaagtgcacttgtgtaagtccaatatctgattgtcggatttatcccaggaagagattggtggttgggtagggcaccagaagtggagttaggcaggtagtgcattgagtaacagctgctggtggtacatgactacttggtgcatttaagtatttgctataaggtcctgtaatggattggcagtggatccaaagcgagtgttgtggtaccaaatcctcaaacttgtaatctggttgactctggaacccttgtatttatttgaagcccaactgtataattgtgattgagatgaatatctgtagaattggctatctgccagcttgacttaacttggaaacctcatagatgggtggcacgtaaacaagctctgtgaattcatttgagtactacctgagtaagaattttgctgattcctggtcacagtcaagcttctgctgtgaattatggttttcagtgatcatggataaactcttgttttaacatttttaatctatgtacttttctatactttcatgtagttaggcaagacagcttttgtgataagaggaaatgacatgtgaagactgttttggttgccaattctgggttttttaaatttcagaggcatcagcatcacagggtgattattttctattgtataatcaatgaactagactgctttgtgaaaatgggcaaattatgttcctttctgagatttggcttgtccgcttaagcaactttcagagaatgataaatggtgttgggcattgaggggagagtggattttctgtgctttagcgattttaatcaagaaataaaactgaaacccaaatcaacttttgaatagtaggaaaagttaatccctgcatttgcttacctaagtttgatgccttaatagtggaaggactagatgtcacaaagtcaaatattaaggcaaaaataacatctagttaaaacgatctcccataaaaaccttaattca

SEQ ID NO: 56264 - DNA, 1048 bp, Homo sapiens
tctgtttttttagtgattactatgtgccatacatgtattaagtgctttaatttatttaatcctcctacagctttacttttattcctatttccagatgaggaaagagagattaaaaaatagtttttccaagcttacatagccaggatttcaatctaagacagtctgactctaggtcctatactctagtggactatgctgtatactcagtgtgacagtattctttacttgcctgatctatactggctctcggtctggataagtgtctttatgagtagctgaacaaggttactggctgtaggtttctctcatctctttgttgatctacaggtgagcatgttagggaaaggatttggtgatgtcggtgaagctaaaggcggcagtactacaggctcccagttcttggagcaattcaagactgcccaagccctggctcagttggcagctcagcattctcagtctggaagcaccaccacctcctcttgggacatgggctcgacgacacaatccccatcactggtgcagtatggtgagaagatggaaagtgacttgaatctttaaagcattggagcattactgtcaagaggctagcagggggagggggtggagaatgtgtcctgaagtgaagaaaaggggcagctagttggttaccttcccacatgtatttcccctaatcaaataagctgaattcaagaagttggggaataataaaatttgaggctatgtatttctcatcacatttagaggctgggcatggtagcttacacctgtaatcctagcactttgggaggttgaagtgggaggacagcctgagccttaggagttcaagaacagcctgagcaacatatcaagactccatttctaaaaaaattgttttcaattagctgagtgcggtggtgtgcacctgtggtcccagcccctagtgagggtgagctagtgtgaagctagctttccgcaaaaaaaaaaaaaaaaagaaaaatttttaaccatatacatagttgcagtcttctgttgattggggttttaattattattattattctccttagat

SEQ ID NO: 56265 - DNA, 1033 bp, Homo sapiens
gtggcttgatctcggctcactgcaagctgcgcctcccgggttcatgccagtctcctgcctactcccaagtagctgggactacaggtgcccgccaccatgcccggctaatttttttgtatttttagtagagaccatgttagccaggatggtcttgatctcctgacctcgtgatccgcccgcctcgaccttccaaagtgctgggattacaggcgtgagccactgcgcccggcctagatgtttttttaagattaattcttaattcagatctctggcgctatagaaggtagggattcctagtgttatcaggaggaaattttggtagattcttctatttgttgctgaaaaatttcttcttgattcaaatcaagttattccactagtagatctccacgatttccttagtatgagtagatatgctctattttgtttctctgagatttttctcttcgttactcacagtgaatcatcctctacaatttcatctaaccagagtcaggagtctggttatcagagcggcccaattcagtcgacaacctatacctcccaaaataatgctcagggccctctttatgaacagagatccacacagactcggcggtaccccagctccatctcttcatcaccccaaaaggacctgactcaggcaaaggtagtggcttcatgaacccttgggaattggttaggagaatagtgggcaaaaattccttaaatattagtgttttacttttcagcaagtggtgctaagaaactttggaagtagtgattgagaatttgaaaaaggcacacatctgtggctagtgaattaaaagttcttatcagcaaacccggagactgaagagccaggaaaccattctctttgtactaaaaattcattgcctctagtagaatcagtctcaagtgcctgtcctgtcttctgggaagatgtgattgccagatttctgggtgcgtgtcagtagacctcaccttgctaagtcctggcatggtgagggagacagcatgtgccagaggtgatgtggagtgagtgtcagatgca

SEQ ID NO: 56266 - DNA, 1999 bp, Homo sapiens
tttgtaacaactattaatagaattaagctgagcctgtaaagggaaggacccattttggacaaaagtatcagatttgccggaagcctggggaggtatgagggctaaggctcctttaggagtctctattcaaatacacagtttcagatttaaagtcagaattgtggacaggtgcagtggctcacctctgtaatcccaacactttgggaggccaaggcaggaggattgcttgagcccaggagtttgagaccaacctgagcaatatagtgagacctcatctccataaaaattttttgaagattggccaagcatggtggtacattcgtagagtcctagctactcgggaggctgaagtggaaggactgtttgagcccaggaggccagggttgcagtgagccaagattgcaccactgcaccccagcctgggcaacaggatgggaccctgtctcaaaaaaaatgtaaaatcagaatttttgctttttcctagtccacaaactggtctcaactagtaaagaaaagttggggagagaaagctgtgatatattttttacatctcaactctctctgttcctttatcagccagtgttagtctctggggaatctgtctccatttgctttactgtctttctgaacaggatgatgatgtgcagtgagtctgttaccattcttgccagatgagtcttgaggaatatgtagctggagattatttctaactactttagcagggtgtactttggtaccttgcctacttggcctctttaattaggaagttgacatcataatatattcagcaggagggattgtcttatttttcctgacctatgatgctgatctcttttcttcttctctcttccactgctcccccttttgaagcacacaagtgtggagagtgaggcgaatctccattcttcctccagcactttttccaccacatccagcacagtctctgcacctcccccagtggtcagtgtctcctccagtctcaatagtggcagtagcctgggcctcagcctaggcagcaactccactgtcacagcctcgactcgaagctcagttgctacgacttcaggtagccttgcataagcagatggcattcctctgggatggaggaggtaagtaattgtgtgatgggataaaaatgtaatttctcttttaggaaaagctcctcccaacctccctcctggggtcccgccgttgttgcctaatccgtatattatggctccagggctgttacatgcctacccggtaagtgggactaaaggatcttcttcaaaaggtgaggatgttgtggctactctttttatagctctggcttcagatggacccctgtgaataccaaaacttgcacatactcaagccctgcagttggctctgtggaatccatgtatatgagttttgcattctgtaaatgtggccgtatttttgatctgtgtgtctggttggaaaaaattcatatataaacagcgtgcagttcaaacctgtgttaagggtcaactgtaattaaaatataaaataaatgagggattgccacatgtaatcaaactggtttttaatctttgcagttttggaaaaaatactaaactgaggccaacccatctattgtgtatctgctttggtttatggtgcacacatgtatgcatgtgtgtgtgtgcgtacaatgtgtatgtatatgtgtgatgagaatatctgccctgtttgaaacacagcttctgggcctcagaagccaaaggccagaatgttcatctggaatcctttttggtttcttagataattatgactattattttattttttgaggcagatcttgctcttttacccaggttggagtacagtggaacgatcatagctagctcactgcagccttgaactcctgggctcaagcaatcctctcacctcagactccccaagtagctaggactacaggtgtgcatccccatgcctggctaagttttaaaaatttttttagagacagggtcttcctatgttgcctaggctggtctca

SEQ ID NO: 56267 - DNA, 1173 bp, Homo sapiens
ctgtcgctcaagctggagtgcagtggtgtgatcttggctcattgcaacctccgccgcctgggttaaagcaattgtctgcctcagccttccgagtagctgggattaaaggtgcccaccaccacccccagctaattttttttgtatttttagtagaggcggggtttcaccatcttggccaagctggtcttgaactcctgaccttatgatccacccgcctctgcctccctaagtgctgagcttataggcatgagccgccgcacccagccttttttttttctttttttaaatcagagttgtggcatcttagtaaatacattttaacctattctatagcccagtaaagtactctggagcactcagggtgctttctgtttgtcccagacactttaaattatcgaatgatctgttttctcagtagaataagcttggtataaactgatagggatgacacctagagggttgaaaatattggtcctcgtggactttgatgtattctcaagtgggcatacccgtagaccttgtctgactgtgctcatggccaggcaggggggacagtgtatgcaagagtaatgtggagtttgtgctaactctagccagcttaattagtgactggataaattgcacaactctcacattcttctgttttttcctccgtggaaatagtactcatgctggggaatgagtgacattgaatctctgctcttttttcccctcttttctaggattactacagcatcccatttcccacacccactactccgctgactgggagggatggtagcctggccagcaacccttattctggtaggattgggatgggactaaataaataaaaagggagatagtgttgggattgatggcagacacctgattggtagcaagaagggatgtgataaatcaggattggtagattcaaaatcctgctaaagttgggcatgtcatggcttttcctattcatcccactttgtgttgtctccctgtgatttctagatgatatcttagccaggcatggtagcacacacttgtagtctcagctacttgggaggccaaggtgggagaattgcttgagcccaggagttcaagaccagcctgggcaacatagcaagaccccatctccaaaaaaagtgatatcttgacttagtttcaagccatttgctagctttttccaggaaa

SEQ ID NO: 56268 - DNA, 1904 bp, Homo sapiens
aatcatgtgaaatcagaagaggtaattctgtattggtattggggtgaaagaggcaggtacatttagcttctcctgtcacaggtgacctcacaaagttcggccgtggggatgcctcctccccagccccggccacaaccttggcccaaccccaacagaaccagacgcagactcaccataccacgcagcagacattcctgaacccggcgctgcctcctggctacagttacaccagcctgccatactatacaggggtcccgggcctccccagcaccttccagtatgggcctgctgtgttccctgtgagtacctggctttggtcactccttgtggtgaaggatcctagccctggacactatcctagctgcttttaagggtcaatgactttaataatggatgaggaggaacagtttccacctctggcctgtttttggcctgatgcagggtggtgggggaatggggctggaattggtggaattaggatagggattgcctagtcttagaatttgccaaagggagaatatgataccatacagctttgcttcactcagattcattcattccctgctgccattgtccctttttcttcctccaaactaccatttcttgacttcattagtagattctagaacagttagtaaggagctaatttcactaagcaaactgtagtcaacttgcatcaggataggtagccatctgaatggccagtacctggagcaggacaagtgggacagatggtattctgctgccaagtcactgcaaatctggcctttttgctctttaggtggctcctacctcttccaagcagcatggtgtgaatgtcagtgtgaatgcatcggccacccctttccaacagccgagtggatatgggtctcatggatacaacactggtaagctgaccttgtctctggctcggtgttatctgtggggtgttattggataaatttcagggaggaagacttggtgcttgagaaaatgggattggtgagggtgtgccgctgccccaggtatgattgttaatgcttggctgacttgggtatctgtgggagcagcaccaacagaggagcttgatactaggacatgtgtccactatttgtgacgggaatgcccaagagtatgtgttggtttttagaatatgttggttggccaaaagtgtgggtggaagtagggcaaggagccccaagattttgctgaaatgtcagtggaggcaagtgttaatagtatgtatggcactgatagtacaaaaggggggtgtattcactgagtagaaggattaaatgggttcatagctagcagcctacgataggtttggcttaaatcactttgtagcactacttttcttatgtgtccttttttattccctagctagaagacctaaactgtggagaaaaaggagtaggcgtgaccatacttaatagagtgggaattggactgggagagttgggcctttaggttccttcatttgtatggctggtctctttgcaagtctttttgcatatgtgatggcagggagggaattgtaggaatcctctggatgggtacttacctaaaagatactcagcctctcccttgcttccatacctgacatctgtgctctacttttggaggacagggagtgagaaggaatctttgaataatataattgtaccttttcagcgacttgtagatgaataggggaggagtaggtttctctgattgcttagggttggggatgggggttgtccttcaaagctgtcagctcagttacagtttcatggtgatttggatagagcagcatgtgtttttcacccttatgtgggctctgggtgggtcagttgcccacagttttcaataattgggaagagcacagaaggcagtaagggctaggaactgatagccaagtggagctttgaactgtgctgcatgag

SEQ ID NO: 56269 - DNA, 4057 bp, Homo sapiens
cagaattcagaaacgtattatatcagcccttgagaacccccagttcccaaccccacaaagggcttttgtcattccattcatttatttttatgtatttgattccttttaggaagaaaatatccacccccttacaagcatttctggacggctgagagctaatttggcccaaggctgggggctgtgttttgtgtgtgtgtataaatttgcactgaagtcttgtttcagaaaccagaccactgaggagagcctgctgagctgaggccatggcctgcgtggcttggggaaatgagttggtggataccttctgggcttttgaacttgcccctcccccatttccctctcccccatgtgtctgaccctgtcttacccatttcaagttcaagcggtgcagcaccttcgaagcatcaatgcacacacctgctgttgcttttgatttctggaaggcatgtagtttcaacttgtaacaaaaatatttgtagtcttcaataaactgtggtatttctttagctaactctggcgttctttccgtgcatgtctttgtggacactaggaaccaatgctgtgctgtggatgaagggtggagggtggcctttttaatcaaaccccagcatagccaaagaactattaatttttcagtatggtggttttatgaaggtggggggaggggaaacagcctcagtttcccacctgttgattagttggtaaaggaaactatttgtagaaatacctgattctccatgcttatgttgcttcatttttccatttagatctttcctttgcctcttacataagcagtgggggaaaggacaaaaaagtttggagtgtcatgtcatggtgaaaggcaaaagagagagttttcagagctgttagagaagtatctttcaaggcttaattcccacatctatctggttcctaaaggccaagtggctaagatctgataaagtcattagtgataagctagttgatgactcaggctctgtggcgactgtgctatcctggaacattgttcttagtcccttgatggcttttcagagatcgtggattaccagttttgcatttgtgggtataagctaaggatgtgcaggagcggtttggtcagatatctccttgactatggaaattctaattccctcccagtccagctagcatacaacattagccctttgtttataaagttaacgtggacagtgagatcaccaccctgggtgaattagaaaccaaagtattcagctttccttgtatttgttcccagccctttggagtaattttgctctgtggagtgtgaccacctttcccaggggctgccatggtgggagagatagattcatgtgtctctgccctgctgcccacgtgattctggtattgtcactgtttggggataagtagggggtgttgatgttggaaggaaagcaagagaactctgtagtctgaagatcttcctaataactggtgaggggtagtgaaatcagtacccattattttctaggtctctaatactgtaattgagattattatggctactacagagtattatggttcctgcattctcagtcccttcaacctcatatcaaagataaggcctctggactagaagctgtttttagcctaaactctggaaagaatgagatcaggtaggggcacactggagctgaattcctccctaccactcggcttgagaatccagttagtcatttcttccatccaatataggcagcctagcctcactgcagaaggtgaccaactatgctattttttatttttttattttttttttgcctttgcagtaaagataaattctctcttttggtttgacttaaaaatgttctacttatatcctgtttattccacctttactctccacccttccacatgaacttactagcttaagccttttccataactgaacttcctattcttaaaagttatgcctgttactcagtgatttgccagatgggcacctcgggtttgaaaagggaatggaaaaaataccccattagccctttaagatactcctgtatcgttcccttcttttacttcagtgtctttagacagttgatgcttcggagatgaggaagtattttctcttgcttggttttctgtagttccgttatttttcctagttagtgtttgcccctcccaggaactatctggacttaggatgttgggaaggttttccagattaagataccacttcaaaagtgactgttcaaggtgggcttaactttggaaggctgcctttgtctgaggcattgggaggatttaggttctagagtttgaattgtgggtgaatggaggattccttatttgtgatttggccactctagtacactgcttctaaaactcttttccatcagtgttcctgatagcagaggagaaggaaatgtgtacctctgatgggaaggatccaagggcatagacaggcaaagtttttctgaagctttgttttatttttataaaaactaatatatctttttaaaatcatgctttatattcctagttaaattacttacttttcttcacatctttgtttcaaaatggaaagtataaaagatgttaggttatttatttcatggcttttcctatcttcttgacccgatgccttataccccaggtgatggaatatagtatgagtatttatttgtttgaggagtacaaattagaatgacatgttgtactactctggtttctttaaagttgtagtggttagtagggagtttttttcaacaggaaatatgagagttggggtatgagagcttttatcttacggagaagctgaagttgtatactgaaaatgacgtggtttttgtgttccacctaggctataggagatggcctactcctgtctacctatccctccccaccccgctacacttaggcttaaattgtgtacatggaaattgatcttgatactagacctttacatcttaagtttgaagatttagcctagatgctccaagactaaagaagctggactaattgagctgaggctctgagaatgagagtgcccttggggattaaagtggactgctcctctagtacttatgcagtggaggcatggattttgagcccagaaatgtcacttcaggaagagagagggccagactgccccagtctccaggaataaaactgagtggcatttgggtggattgatttgaaatggacattaaaattaaaagtttattatattcctgctagactttggcacagaagtgttttgaaaacagtgtatgctagtgaggtttggtcatatccccttgcccaccaaaaaacaacttacctcactctctctcacgtatactcaacacgtacctgggaagggccaaagaacccttagggagcttttgtttcatgaactcttacctctcaggactaacttgaagctggaaaaccgaccaaaattcccttgcattggtatagctagaaaggctacagatatcacctcatctcaggaataagggccaggtagctagctgagctaatcctcctgtctgtttcctcctcccccaggtgtttcagtcacctccagtaacacgggcgtgccagatatctcgggttctgtgtactccaaaacccaggtaggtgcctggctctggataaaagtggaaaagagatagacatagaggaggtggagttgcaatggtagaaataacagtggacaagaagaaccctaggagaggtggcaggaaacccatcctactttttctaaatgaaaggtcttctctagacttcacttcctctaagaagttaaaatttagccctctgagaaaaaaaacgagaaacgtaataggaaggtaaagcgtggcaaattgtttatcgtgtcatgtaatttactgtgcaactctcctggccccttttcctacctactcccaacctttttcataacttttcaagagaataagtatgagagtgacaggaaactagttcattccattctttgagtaaatctataacagtgggagtgggaaaggagacgacctagtaactaatgaagcatttgagtgatccacaggtttgttatgttgcttttatcccccatcaccataaatacttaaagttt

SEQ ID NO: 56270 - DNA, 3229 bp, Homo sapiens
gggtaattttgtgtttttagtagagacggggtttcttcatgtttgtcaggctggtctcaaactcctgacctcaggtgatccgcctgcattggcctcccaaaatgctgggattacaggcatgggccactgcgcccagcctttttttttcttttttttcttgagatggagtctccctctgtctcccaggctggagtgcagtggcacagtcttgactcactgcaacctccacctcccaggttcaagtgattctcctgcctcagactcccaagtagctggattacaggcgcccgccaccatgcccggctaatttttgtatttttagtagagacggggtttcaccatattggccagactggtcttaaactcctgaccttgtgtgatccacccatcttggcctcccaaagtgctgggattacagatgtgagccaccatgcccagcctatttggtctttacaacaggtttgtagcatccctgttttatatctgaggaaactgaggctaagagattgagtagtatgcccaggttcacacagttcttaaataagagcagagctgagactgagacctgaatatgtgacttcaagtgtactgtgccttctgtgacaccatgctgctttctgagggtcagggagcttgagctcaggaaaaatcccaagactagtttgctgatcccttttactctgtctcctcctggcctcctggatagcagtcctttgagaaacaaggttttcattccggtactcctgctgcttccttcaacttgccttcagccctaggaagtgggggccccatcaatccggccacagctgctgcctacccacctgccccctttatgcacattctgaccccccatcagcagccgcattctcagatccttcaccatcacctgcagcaggatggccaggtaatagcccttccccttctctcctttcccttcctcttccttcctatcccttaaaactgccttccctttccttttcttacccttcctcaccaccaccttcacccaatccctccccagcgccagtcatgggcacacagcacatacagacacaagcgcacataacacgagcggccggcaaaggaaatctcagagaagggccgggttgaaaccttttttgcccaattcctttggtgcccttctcctcctgtgccacagttgtcctcatcccatcagacctgggtcacaccttccctctttcctctcccagccttccctcttccctgacattttagctttcccttctaatggtggagttctattgtcaaagtttgtccctttattttccatatatcctggttctgcctcagctaccatatttgcagatgattctctgttgccagcgccagcaggaggagcaggtaatgaaattgaatgatcatatgcttgaacccactccttttcagtccccatttcaccttcacagcctcagggaacttgaaaagactgcgcggtcacaaatcgggatacacaaacacaaacaccttgctgagctctctggcctccccttcctctctcctcctcccctccccaacaccctctttatctttgtacccttccccagctgtggaaaacattcggttaccagaatggaaaagattcttggggcagcatctggagcctgaggcctcagactgcctctcatacctgcctgaaatgggctcacagatgtgatgtgtggtaggggtggggatctgtggggcgatgcaagtggcctcttgagagctccattataggtggctggagctagaataagggcttccttcctcaaagacagctttccaaattgaggcattaatggggatcaatggaaatgaaattgccttgtgatcacccatctccaagagcaggggagagagggggtagtgtgagaatgtagaattgaaaatgagtagaactcactcactaccttgtctctaaaggtatcttgccctcttcatcttttccctatttaaaagtcaaaaatgccttcctgcttgtaagaaaggggctttagcagctatgcagaccaaattttctatggttctaatagtagtgaggggaatgggagagcaagacagtttgcacatctccacctgaagatgttacaaatttgtaccactaactagacacctttttcctcctcatgatcctcccattcccctgcagacgggcagcgggcaacgtagccagaccagctccatcccgcagaagccccagaccaacaagtctgcctacaacagctacagctggggggccaactgaggccctgaccctcttctcccggtcccatcttctgagagggcttctcagcctggaaactatggaaacagcatcaaagagaaaggaatgtggggggtttccgctgccccccacccccagcggcccaccccatgcctcagcttcatgtctgtcccattcctataccatccccaccctgttgtatgtattataggatttgtattttctccttttttttcccccttccattccttctcccctcttgcattcaagattatgaaactttgctatgggccctgcacttcctttgcttcctcctgttcaccctggtggtgtacggatgaggcggggaggtgggacccccaaacatatatcagcccaacagccctaagtctccttctttattattaggaaaacaacaacaacaacaaacaaaaaaatggcgtcatgaatatgaacagcattgtcagatgaattagttgaagtggttttttttttgttttttttttttttttgtactgtgtcctcaaatttaatggattaatgtgtcttgtatatataaaaagaaaacctctaccttcagcctctgcctattcttgctccgtctaggacatcctcaatttcgtcgatgaccagcttggtgaataagtattactgtaccaactgggcctcctctagcaggcccctgaaggcagtggaataaaatgaaatcttcgccctttaagaactcctgaccttaatgtggtagtagtatcttgtccttgaggggatttccttcccctcacccctaagactttcacaacctggtgactggaaagaaccaccacaaatcttcatttcctccagaaactgctacatctacagccgatttcaggcagtaaagggagagggatagaggagattgggtggaaaatggagaggatcaagaaggagctgagaccatttcaaagaaaaaaaatgctttatagagttttaagtatgacttagatgggtccaggcaaataaact

SEQ ID NO: 56271 - DNA, 1050 bp, Homo sapiens
gttcaagcatatgatcattcaatttcattacctgctcctcctgctggcgctggcaacagagaatcatctgcaaatatggtagctgaggcagaaccaggatatatggaaaataaagggacaaactttgacaatagaactccaccattagaagggaaagctaaaatgtcagggaagagggaaggctgggagaggaaagagggaaggtgtgacccaggtctgatgggatgaggacaactgtggcacaggaggagaagggcaccaaaggaattgggcaaaaaaggtttcaacccggcccttctctgagatttcctttgccggccgctcgtgttatgtgcgcttgtgtctgtatgtgctgtgtgcccatgactggcgctggggagggattgggtgaaggtggtggtgaggaagggtaagaaaaggaaagggaaggcagttttaagggataggaaggaagaggaagggaaaggagagaaggggaagggctattacctggccatcctgctgcaggtgatggtgaaggatctgagaatgcggctgctgatggggggtcagaatgtgcataaagggggcaggtgggtaggcagcagctgtggccggattgatggggcccccacttcctagggctgaaggcaagttgaaggaagcagcaggagtaccggaatgaaaaccttgtttctcaaaggactgctatccaggaggccaggaggagacagagtaaaagggatcagcaaactagtcttgggatttttcctgagctcaagctccctgaccctcagaaagcagcatggtgtcacagaaggcacagtacacttgaagtcacatattcaggtctcagtctcagctctgctcttatttaagaactgtgtgaacctgggcatactactcaatctcttagcctcagtttcctcagatataaaacagggatgctacaaacctgttgtaaagaccaaataggctgggcatggtggctcacatctgtaatcccagcactttgggaggccaagatgggtggatcacacaaggtcaggagtttaagaccagtctggccaa

SEQ ID NO: 56272 - DNA, 1074 bp, Homo sapiens
ttaaagggcgaagatttcattttattccactgccttcaggggcctgctagaggaggcccagttggtacagtaatacttattcaccaagctggtcatcgacgaaattgaggatgtcctagacggagcaagaataggcagaggctgaaggtagaggttttctttttatatatacaagacacattaatccattaaatttgaggacacagtacaaaaaaaaaaaaaaaacaaaaaaaaaaccacttcaactaattcatctgacaatgctgttcatattcatgacgccatttttttgtttgttgttgttgttgttttcctaataataaagaaggagacttagggctgttgggctgatatatgtttgggggtcccacctccccgcctcatccgtacaccaccagggtgaacaggaggaagcaaaggaagtgcagggcccatagcaaagtttcataatcttgaatgcaagaggggagaaggaatggaagggggaaaaaaaaggagaaaatacaaatcctataatacatacaacagggtggggatggtataggaatgggacagacatgaagctgaggcatggggtgggccgctgggggtggggggcagcggaaaccccccacattcctttctctttgatgctgtttccatagtttccaggctgagaagccctctcagaagatgggaccgggagaagagggtcagggcctcagttggccccccagctgtagctgttgtaggcagacttgttggtctggggcttctgcgggatggagctggtctggctacgttgcccgctgcccgtctgcaggggaatgggaggatcatgaggaggaaaaaggtgtctagttagtggtacaaatttgtaacatcttcaggtggagatgtgcaaactgtcttgctctcccattcccctcactactattagaaccatagaaaatttggtctgcatagctgctaaagcccctttcttacaagcaggaaggcatttttgacttttaaatagggaaaagatgaagagggcaagatacctttagagacaaggtagtgagtgagttctactcattttcaattctacattct

SEQ ID NO: 56273 - DNA, 1053 bp, Homo sapiens
ctttgattaaaaaaaaaaaaaaaaaaaaagaactgtcagccattgtattaatgttttgatgtggcagccagtcctccgaccctctccctagcttcccagaccccttgctcttgtcccactttgccacccatgagttgatttaatggcttaaatagtgctgaaatattggtggccaatctgcctccactctcagccacagagatcccttttttggagggatgactcgagatgaagatgatgatgaggaagaagaagaagaagggggctcatggggccgtgggaacccaaggttccatagtcctcagcacccccctgaggaatttggcttcggcttcagcttcagcccaggaggagggatacgtttccacgataacttcggctttgatgacctagtacgagatttcaatagcatcttcagcgatatgggggcctggaccttgccttcccatcctcctggtgtgtggctttccctaaggggcaacctgtggtttctggtgggttggtgggtgaaataaagagcctgcagggagtagctgggggatgggaagtgtgagaagactgatgatttcagagagattaatagagcccaagtcctttcccatcccagcaaacacctgccacctttctgcagaacttccaggtcctgagtcagagacacctggtgagagactacgggagggacagacacttcgggactcaatgcttaagtatccagatagtcaccagcccaggatctttgggggggtcttggagagtgatgcaagaagtgaatccccccaaccagcaccagactggggctcccagaggccatttcatagggtgagtatcccatctggtcctgaagtgagagcttgtgagagaccactaataaagtgcaaagactggctaggtgcggtggctcacgcctgtaatcccagcactttgggaggccgaggtgggcagatcaccagaggtcaggagttggagaccagcctggtcaacatggtgaaaccccgtgtctactaaaaatacaaaaaattagccgggcatggtggcaggtgcctgtaatgccag

SEQ ID NO: 56274 - DNA, 1093 bp, Homo sapiens
gctattcgggatgctgaggcaggagaatcgcgtgaacccaggggcagaggttgcagtgaacagacatcacaccactgctctccagcctgggcaacagagtgaaactccatctcaaaaaaaaagaaaaaaaaaaaaaaaaaagaagaagacactgtgaatccaaagttggaacctaggtctgtctgctttttccacagcaacacactatgtctcaaggctccacccaagcacaccgatgcagtgtgtatctggggtacaaacaggagaggtcctgagtggagatgagcccccagaggacttcaggtgggggatacaagaggatagcagctgcccttcgtgccctgccattgatttctgtctaggtgagccaagcattagtgtgaggaagcaggatggagagatacagaaagaggaggggctggtggggccaaaggcttatttcagtctgggacactgttcaaggggataatgtccacgagtcacagaaggatttgcgtttccaccatcaccagacagacaaactggcatgcacatcccacgtgctctgatgaccagaccccaccctcctcacctgagacgttaccacccacgtagatggctatcgtaacggccagagagccagccagaaacatggtgaagaagttgcctttggtttctccactggtgacagcctgggccacagctccttgggtgaggagctgctgagaagaggagagatgaggaacagggagcccaggagaccaacagggagaaaggttgggaaggccaggggagcagccaaggagatgaatgagcacagaagacaagcaagggaaggagaaaagcagaaggagggaagggaaaagaaatggggaaagtggaggaagaagaaagggaaagaatgtgggaaaaaagaaaagaatttacccaactcataggcatttgagggtacaaacccatggcagggctcagctttaaaaagtcttatctaagattctttctatggaagagttccatcaaagccaattttaaaagcctatgtgaaaaataattattcttgctgcactttatacaatcatcaggccaagtataataaagcacattggtcttacca

SEQ ID NO: 56275 - DNA, 1453 bp, Homo sapiens
ttataagcctttcgagaagggtggagcctgcccaccctgtttcctgatgccctgccaggtgtttcctggctcatgttccctccaccccaccctttggggaaactgctttctagtaagcacaagcactactcattgccgccagaacacatgagagcctccattgtccctgggatggataccttgagagctgttccccttttttcaatatctggcctcttctcctttccctacaggcatgggcttctgtaaagtctcagccccccatgtcacccaaggcaggggcatgatgggaggtggtggggaagtcccctctttcccaggaacccatcatggcagtaagaggagagactgggagaaggaggctgggggaggggcagggtcagagctggagaagagggtcttcaaaagaggtctcatgaggggagggaagggttatcctcagcttcctgacctcattcgtctgtcacttcttgcagggtctcccatgggattgctgggatcttgctgggtgagatggcagtgtgtgcaaaaaagcgccccccaggtaagacaggcaaggaggggagatcccgggaaccatcaagagtgggtgttgttatggctcagggagcaaaaggaaaagggacaactggtatgggtctgagggagggtagcttacagcagcccctacccagcttgggggcagcctaggaaaccgaattcttccgcttgatcccaaagctgggttatctgccaggacagcgcagagcaccagccccacgccccgaaacacctgcagtcttatcttcgggcacctgcagctcctgctttctggcctagggagctgtgttctcatctctgcttggtcctctcaccccttccctgctcccctcgtttttccatctaccggttctcctggtttttccgcgggcgggggtgtgtgtgtgtgaaagcggttgcccccgacaacgccggcagtccgctcacccgcattggcccggcccgggggtgggaggggaggcggggctcgcgcgcgagctttcgcctacgcggcgcgctggcaggctgcggctcctgcagtcggggagcgggcgggggcggaaccctgggcgtgctcggcgtgtccggggccactcagcgcacgctggcatccgccggggggcatggggggcggcggcggcggcgcagctgagctcgcggtgtccccgagcgccggcggccgggaggatggcctgggctgcgggtggggcgcgcgcccgacggctggggctcccctctgagcggctgcggctcctgcacctccccggggagccgccccgtcgatgccactaaggccaaggacatatagacggtctgccctcccccactcaaaccgggatcatgacggtccccaaggagatgcccgagaagtgggcccgggcccaggcgcctccctcttggagccgaaagaagccctcttgggggacaggtaacg

SEQ ID NO: 56276 - DNA, 1620 bp, Homo sapiens
ctgtggcctgggttttgttactgcagtgtgctctgcaggggtcctggggtgtgtagaaagggttctggaatgctgtctttggctcccggacaggcttaaggcattaggtttgctgcctaaccaagttacccctttttgcagcatgaggtcatggtgacccccggggagacgggctggggaatctattataggacagctccttgttctgggacatgaatttgatgcctgcagtcccagacctgcagaggtttcagataggtttagctagataggtgtcactaactgagtgacagatgagccctttaaagctaaatgtgtgcagatggtacaaggaaggtccagttagagagcaactgtttcaattacatttcattcctccctcctctatctctatctcagtctgcatgacccatatccctgaaacgcaccccccacacctttttctacttgaagatgagctttgaaataaggtgatgtcatttcgggccagtcagaagcagttgctggtgacatgtgacaaccagaggctcctgtaggggggactgcacatggggctgggatgctcccgcagagcagctccagggcacagggagcctccttcttgccacctaccccactctctaaataagggagagagcagtaccgcgactagatctgcagtggtccccagggggaaggaagctttgcgttttcagcgctactccttgattatgacaatgtatgcattagtaatagcagcaaaaggggctggggaatcccaggactgtcagtggctcagattcctctggagtgggggtgggggagacaaactgggtgcttccagtggaagaccttgaagtttggtggtgaggaaaagagaacatgtcctgtcctgtgaatgtaacctggagagccgtgtggtcaggctgctggtgagaggtggactggagggaagaatttgatgaccccctcagttgtggagctaactccttaaaatgatattctgtggaaaaaaacagggaaccccccagcaaagtgttggtccagacctcagtttgctcctcctgactgcagcatcattttgttgcagaagaagaaaggagggcgcgggctaatgaccgagaatacaatgagaaattccagtatgcggtaagcgactctagaccacctgttccctctctctgtttggagaggggaatggggcaaggacaacctaccgttgggactgagggctgcctgggaagagtgcttgggggaggggaagcaacctcctcagccactctccatctgctatcgtgctgaatttttcatgccttcacctgtcagtgaagcagaatacattgacccccttgagactcccttctctcctcctctttccccctcccacacctgtgtttgctagcttttggggtagaggtctggggaagtataaagatgggggaggcagcctcagtctggttctgggttgggactggagactgctcattatcttctctcctactgccatagagtaactgcatcaagacctccaagtacaatattctcaccttcctgcctgtcaacctctttgagcagttccaggaagttgccaacacttacttcctgttcctcctcattctgcaggtaggtgacccatagtag

SEQ ID NO: 56277 - DNA, 1164 bp, Homo sapiens
aggaagaggaaagggaatgaaggcatcagatggggcctcagaggcatacttctctttctttttttcagttgatcccccagatctcttccctgtcctggttcaccaccattgtgcctttggttcttgtcctcaccatcacagctgttaaagatgccactgatgactatgtgagtggttttcattcttctattttgtcccagtcacccacccctactcccagccccacccccatctcatggccaccttcatccagcacaatttcttggtgaccttgacatcccttacccggtccagctagatccatgatgtctttttgctgagcgtggggagagggaatcagggagtgaactggtttgtgatggggtgtgtatgaggcgttaaccagcatgctctgagttctactgatcaacgaattccttcgaggcgggggaaggtgtcttacctttcagttttcttcttttcagttccgccacaagagcgataaccaggtgaataaccgccagtctcaggtgctgatcaatggaatgtgagtgcctgttggagacaagagctctggggacgaagggggtcccttaggaacctctttagctcctgacagcctcttcactgtcttctcgttgcctcagcctccagcaggagcagtggatgaatgtctgtgttggtgatattatcaagctagaaaataaccagtttgtggcggtaagggacagggtacccctctaggcctgtaggttcttcctcttctttgtgagaaaaggatgaatctttcctgatttactgttgcctcttaaacacccgtggcaggaatctttctcacaccaggggcttctgtgtcatgctgatatgcctggaactagccatttatgcacctggaactaagcaaaccaagaatgcttagtggaaggagccaccattacagcccactgggggtggaggtttgcatatttggacttctcattagtttttctctctaggcggatctcctcctcctttccagcagtgagccccatgggctgtgttacatagagacagcagaacttgatgggtaagtggcatgctcagtgtcagccctctccttctgtctctttggaggtaaaaagattgtctttgaatgaggttctcaggcctgggctctgtctgaatttggaaaaattaggggtaaga

SEQ ID NO: 56278 - DNA, 1022 bp, Homo sapiens
ggtaaacaagaagcccaggggaggcggtgctgtgcgttgtgcccagggctcaggtgggggtttctggaccatttagacttgaatccctgctccccactgccgttctggaagaccacaaccgtatcatttccacctcgacaggaaagcccgggagaagatgatggactcatcccgctccgtaggcaacggcttcacctatcaggacaagctttcttcttccaagctaacttctgtcctggaggccgttgctggggagtacgccctggtcataaatggtcacagcctggtaggcatcgctatccttagcttgggcagtatctttccagtgagcacttctgtccagggcttttatatcttgttctaatttcccctgatttcagagaagactggtctcaaaggggactgggaggagctgagactcccaggtgtctcctggaaagactggctctctcaggtttctctgtgctccaggcccacgcactggaggcagacatggagctggagtttctggagacagcgtgtgcctgcaaagctgtcatctgctgccgggtgacccccttgcagaaggcacaggtggtagaactggtcaagaagtacaagaaggctgtgacgcttgccattggagacggagccaatgatgtcagcatgatcaaaagtgagtgtgggctgtgcaggtgtgtaggctgggcttgaggctggggaggggcccactgaggtctctggactgcagaagaatgacgggaagggggttgtaacttggtaggctctaaagtgtgtggccggtggccatcttcaccctcttgtcatctcttgtctctgcagcggctcacattggtgtggggatcagtgggcaggaagggatccaggctgtcttggcctccgattactccttctcccagttcaagttcctgcagcgcctcctgctggtgcatgggcgctggtcctacctgcgaatgtgcaagtttctttgctatttcttctacaaaaactttgctttcaccatggtccacttctggtttggc

SEQ ID NO: 56279 - DNA, 1002 bp, Homo sapiens
ttgcagggtttttagttggagcaactgaatgggttgtggcatttcctgagttgagaaagaccaggatcagatttggggaaaggaaacaatagttgagtttgggccacgggaaattcaagatgcctggtatgtcaagtctggcagttgaagcagcaggtctggagctttgggggagtttggagctaaatttggagatttacatttggagggtgagcctggagaagcgggaagccagaggtgacttaggctttgagagtagggaagtggagctgccagaaatgggaacggggaatgtctgcctcgtgactcccaaggccactgactcctcttcatccccagggaatgcccagaacaccttggcccagcccacggtgtggctgaccattgtgctcaccacagtcgtctgcatcatgcccgtggttgccttccgattcctcaggctcaacctgaagccggatctctccgacacggtgagaagccaggctacctgctgtgggaggcagagatggggtggctggaaaggcctcatgtgaacactggggggctctgtggggccatgtggctgttcagtgtgttggtgcttatctgttcttcctggggacagacaccctgtgcagctggccacagaggcctctgcgtcagcctggtcccaggtgctgtgggtcggaggcctctgtgtcagcctggtcccgggtgctgtgggtcccttctccttggcgatatctgacacctccacgctgacagagggctcttccctgtgcccctctgcaggtccgctacacacagctcgtgaggaagaagcagaaggcccagcaccgctgcatgcggcgggttggccgcactggctcccggcgctccggctatgccttctcccatcaggagggcttcggggagctcatcatgtctggcaagaacatgcggctgagctctctcgcgctctccagcttcaccacccgctccagctccagctggattgagagcctgcgcaggaagaagagtgac

SEQ ID NO: 56280 - DNA, 1371 bp, Homo sapiens
gtagccccagtggcggtgccgacaagcccctcaagggctgaaggccgaggatggatgccctgtgccagtgaccagagcacccagggctggccagtcactgagggaacagcgtctcggaactgctggtcctcattccttgcttcccgtccccccggtagactctgtcctgctggtcccaccacacatggctgggacatctgttcccagctgtaggcccttccaccagctggggagctagagggagcaggcccaagggcagagcagaggctgaggcacggggagccagccccactcggggaccagaagtggaaccaaaaacaagaaaaaactgtgagagattgtgtctgcccctgccctgcctgggacccacagggagactataatctccttatttttttactcctactccccagaggggccctagtgcctctgttcctgaattacataagaatgtaccatgccgggaagccagagacctgcaggggcctcggcccctcacatcgtgtatgtctctccttgatttgtgttgtgtccagtttggttttgtctttttttatttggcaagtggaggaggcttttatgtgacttttatgttgtggttggtgtcttaactctcctgggaaaaggaggctggcacacactgggatgccgcagcctggccggctgtggggtggtttgggaggatccatgtcggctctgcctgcagtgaccagtgctctgtggggcagaggagctgaccagggagggaggtacccatgagcagagggtagtgggagagtgtaaaggagggtttggtcctgtctgcttcctcaccttgagagtaaagtgctgccctctgcccccaacacacacacatatcaattcctggattccttagtcctgctggccttgggctggagcctaggaaagtggcccccaaatccttagtgagctaaagctgggtctgaaatttggtcagtggggaggggtagttttcttttcttttttctttttctttttttctttttttttttgagatggagtctcactcttgtcacctaggcaagagtgcaatggcacaatctcagctcactgcaacctccacctcctgggttcaagcgattctcctgcctcagcctcctgagtagctgggattacaggcacacaccaccacgcttggttaatttttgtatttttagtagagatgtttcaccatgttggccaggctagtcttgaattcctgacctcctgacctgcccacctcaacctcccaaagtgctgagattacaggcgtgagccaccacacccagctcagggaggcgtagttttctttaattttaaatttaaacccaagtttattggcagactcccttttgacctccctttgcctcc

SEQ ID NO: 56281 - DNA, 1112 bp, Homo sapiens
ctgtggtggggctgcagggggaagctgtgcacctgagatgaggctggaacgggaattggcctctctgctcccttcttcagtaagcaaggagccccgcccctcaggcccagcctctggcaagaggtggtggaatccttgtgccgggtagtagaggaggataagggcaaaaccaggcccaggccagtgcctggcttggtctggatgggacactgtcagagtttggccacagcctgtcctttacttcatccacacctatgaagctattccctaaataaggcatttcccaagttagtcgctacctaatcagccttgagaagaatcctttcctcttctttgatagtgggtcgggggattcttcaggaatggtttggagctgggagtgggtagggggattttaaatgttccatatgggagccccaaaggaactggatgggctgcagtgaggtgggggcgggtgggcagggaatgggagaggggaagtcttggcagggaaatcccttttggccacacagtttacaaacccagtatcatgtctgtctgtgtgtctctcaaggtgagagtctgatttttataccaaagaggaaatgattttttttcatattttgtttgtctatattatataaatatatatatacagttatatatatatatattattttttggttctctctcgttttttagggagggaagaaagtaccaagttgcattgagctgtaattaaggaacattataatttatgacacatttctatacttgcaaaaattatatcattttatggatataagagaaaaatgcctttttataaaatttcaatttctgagaagtgtgtaatttgtctcttttctgatgtttaaccaagactggtggtgaaagtaaagacagaaactgtctcttaaatgtaattgagtgggtagatctgggatatcttggacaaattggaatctgactggtgtgggatagcacctcatccatttgcagacctcccgggatctgagtttcagctgaagatgaagacggggcagtgggtggtactgagcggcatatcgtatggactttggctgggtgcctaggaccttgagctgtttacctttctccaaacgcaggccaacctg

SEQ ID NO: 56282 - DNA, 1052 bp, Homo sapiens
ctagcactttgggaggccaaggtgggaggattgcttgagctcaggagtttgagaccaacctgggtaacatagtgagacaccatctctattatgaacaataacagttaagaaaaaaaaaggcaggcaggcggttatggtggttccctcccatcccaccacataaagtttctgagacttgagaacagcaaaatgctgttaaagggaaatattaagaatgagaatctgcagtaagggtgattctgtgcccacagttcttcaattctttataccgttttacccacatgtggtgttaccaaagccgggcagaaccatgctagcggaagatgtgaaatccagatagctcattattgccaagagctaggcagctttgatctccaaattgttattgctttcatttttattgtaatggaattgctttgttttgtttttttgtttttgtattgaagagggttgttttccctttatttttcataagctaatgtaaatgaagaaaaaatgtcttctctgggctgtaggcctggctcagcgtacacaggtatacatcctaagctctctatgttctctaatctgtggtgactgaacatgtgtctcaatgcacggggcatttctacctgtgtttctgcagcacccccactgccttgagtccccagcagtgctgttatttgcctaacacctgtagccatctgccacgcagccagacgtgaaacgctgagacagagaccatttaggttaaatacgacagcttatcctgctgggtggggaaagtaaaaaatatgctggttcaaggcctaaagtaaaatgatcaataatgtttgtagcattaatgaaatattttcaagaaatgtgtccaggggtagcactggctatgttgacgaggcctttggtaactcagagagctcttggccctgatggggacttgcccttacgctttctttatcaggctctgagttcacacggagcctctggcacttccctgctgtcttgggagaaaggaaactggttgccgcggcaggttgtggaatctgttgctggaaccaggctggaagcccacc

SEQ ID NO: 56283 - DNA, 1028 bp, Homo sapiens
ggagttcaggagcatcagagttctctagaaatgtgcctacttgttacctggaatacctggtctctaaacaaaccaacaaaaaatccacgtggcttttccacatgatggtgcagactggaagaggatgttatattggactcgttattggggaaatgaatgagcgggagaaaatgtgaatgacgggcaagaaggtggtctttctccctcagaagtcctaattcagctctggagttcatggaaatccgcaacttcagagtgtggcctaaggattattttgttggtcagcctttccaagaaagtgtgtgttctctcaatctctgtggattttctcattttttagcaaatcagtgagataagcataaataggaaggaagataccccaggtttaagaatcaccaatatcattaggcattggcatcattattagaattctgaattatagaataaaaggtacaacaaaaatttcatttctgaattttaaaattctggaaatttgcaaagctccacaactgtttttttactgaattaattacatagaacttcgatgtcttttgtttcatcatcattgggcattttagttgctatggaataatttttaatttttgtctctaaaattagatttgctttgtagtaaattttttaaaaatgcaaccctaagatctgattatatgaactgggtctctaaagcctacaaagattctctcgttctgtaccaagcagactgccttgtactatacagaagtgtttgaaaagacctagaggttttctcttaaataccattacttaagattcatagtattaggatctttatgatttatcatgagcttatatcaccagtttatttactgtgaaaaaaaccatgggaatggcatactgtgagaagagtactatggtgaatggctccagaattaaaattcagcagatgtgtctgtattctggggttggtcatttgggtctcaaaactgccccatatgcaaatgtactgactgtcatcaatgaaaagttaacctttgtagcttataaataca

SEQ ID NO: 56284 - DNA, 1185 bp, Homo sapiens
gtgttacttctaaactctttggagaatgtaacagaggttgtggagcaaggcctggagcttccttcctgagaagggtcccctaccctctggtgttgtcacccatgttgtcacacaccacctcctcaggtgccttctatttttggaaagatggatgctttctgacacaaaataggggatcccagatagggatcaaaaccctatctggtctgtagcctgtgacagtcagtttgcctgtgaattattgaacgtagaacacctacaatactgtttagtactgacctacttctcatctatgaagcctgtgtctttggagctgtgatccactccttgaggacaggaagcatgtcttgggtttattttgactccttcacagtgcctagccagtgctggtggatgactgactgactcattatgactgtactgctcagctgattggagtttaaaaaactcaattcataaagggtatgtggtaaagccacataccctttatgctctaaagccacaggtagccttcactccccacatccacccctgccaccctctaacccagaaaatgttttattgcttggagaaataaagggaggtataaagagccttggggataagtgaaagagttagatgaattgttgcaaatcaactgtacaaccaaaaaaaacaggtgtttgtctaactgggacacatgatcaagtgcaaaagctatctggaactggttatagagattttgacctccttggatatgcaggagatgtcagtagccattttgataccattgccattttggtatacggtggcccttagcaactgtcctctcttgttctttttcaggtcatcattttagaagactatgctgacccttatgatgccaaacggacaaagggtcaaagggatgcagagagagtcggagagaacgacggttacatggaaccatatgatgcacagcaaatgataacaggtttgtaagcaggctctacagaatagagactgaaatctcacactcagtgagtgttgtaatatagtaaccggtgtctattggggaagagggataaagcaatttacccagatcctgctgacttgaagaaacagaaattagaccccaaactaatgtcggactatttaggtaacttcctgtatgatttagtatccttcagagttttagaatttacaggagtcttcaaagtttttcta

SEQ ID NO: 56285 - DNA, 2393 bp, Homo sapiens
gccactggagacgtcttcagggattggggcaggacagggagggtgggcctgaaccttcacctcactgaccattccatttctttgcaggctggtacacacccccaaaagaagacggctaaccctggagtatcacccttcctccctccccaggcaccactggaccaattacctttgaatgctgtatttggatctcacgctgcctctgtggttccctccctcatttttcctggacgtgatagctctgcctattgcaggacaatgatggctattctaaacgctaaggaaaaaaaacaaacacagaactgtttcaagtactcaagactgacttacagaccaaccaaccaccttgctggaacccttgctagcaggcattcttataaaagaaactttcgagcctccttatattgctggaaactcagctgtgctccagactagagcctccttacctatgctatggatttttaatttattttctcttatttcatgtacactgctttttttggttacagtgtatgatggatgtgtatgaaaaaaatgtatctttgggaaaacaattacagtttgttaatttgaagatgctggtcttgactcatctttatttttattcgcacatcccaccccatcccctgaactacttgggaggtggggaggggtacgagtccactgttgctttggtagagatgagaggccgcattttgctgctaaagcaagagaaacttggagctgaagcacacacctggtctgcccctagatttctcctcaaggcctctggagcaaccagcacttgcccccttggaatgcagagcctggcctgccaaactacaatgtggtaggctgaaacgatggtgttaattcttaggactacttttctagtcacagatgttttcaaatttctaagaaaaagaaaatgaggctcaagaggctgcttcgtagaattccttttgaatgaattgagtggggatggggacacagtctccaagtgtgtatgtggtcttttctgatctcagctgtgtggctgcaactcttcgctgttcattggttcctctcctggaaagtggcttctaaccagcactggatggtgatcattggtaagctttgctcacctccctctctcttgcttcatttggctttatcaaaaagaacagacctagctctgaatttgtttggcttgggaaattatggattctttcaagccactcccacaaggtgggtcctactagaaagggttagcattttaaggggggttgttctatacacctgtgtccttaccccaggctcaggaactgccagggagggaagatgaggtggggagtctgtactgagatggaactgtcagtgctgtgttgtatgtacttgctgttgtaaaagtttgggcatgactttgcatctagcgggtgctgcctgcatctctttgtctgtaagcttgctctgggactcagcctcttaggacctacgatgccagcagctctcattaacagtgaaatgacagaggccaaagatggccaagtgaagacccaagtctcagaaaacccagacttgggacaactgcctgggaactaggatgctagagcagttctgtaatgctttgagacacagcaattttcacattggccattctttcccctcccctaccccttttcttttgagggacttttaatgtttgctgctttaggtggatggagagtccaccagtcccactcaatgctgctctaactctacccacacccacctaattaggggtgctaataaaacatgctgaggttgagataaagacgggacataaggggaaaattcattccatagagctgaaatctggttttcaaggcctctgtggctttcttctgaacttaccaccagccctggctggaatgtagattgtgtttttagtaatgtgtactgtgagctgtcttctgtataatgtattttgtaatgtatttttctcatctaccaaaggatgaaacaaataaaattatttaaatagtttggctctaataaaattatttgaagaaacagtggggttcctgttcacttgacatagagggaaatgcctgcccctgtgagttgcataacaccaactaactctaagagaatcctccatttttcttgccaaacccagcactcccttttatgaccttaagtttagggttctaataaagtacaaagtataaaaaagaaacaaggccatatcatcatgaaacaattttcttctctccacttagaaggcaaggagaaataatgaaactaactcttaggttgttcccctacacttcaaacatgtatctatatcccaggcagggtttgcatggcccagagcccacactggcaggctctaatctcactgcagcagttttagagggcacggcagggcagtggaagggtggctggaaagaagt

SEQ ID NO: 56286 - DNA, 1047 bp, Homo sapiens
tggagggtgagtggctggcatgcggaagagggcatctcctctggcagagggcggggaagagacttggagattttgtcaggcacagctgactaacctttctcatgcaggtatgttctgggcggaggggccatctgcatggaacttctcaccaaacaggtgagcctgtctctcctccttggccaggccggcctgggcggggattgtctgagctttacagcacacacccctacgggctgggtgatagacatgatgtggccctttcattctgctgggctgggtctgcacccactgacctagacagacaggtggtggcagtgctgggggcaaagggcaagggccctcctatagacacagctgattgcccagaggacaagcatgagggttctctggaagctccatctggacctgcttgccttgtccttcccttcacccagggctggagcagtgcctactccatagagtcagtgatcatgcagatcagtgccacactggtgaaggggaaagcacgagtgcagtttggagccaacaaagtaaggatcctggtcctggggctggtggggctgggtggagccaagtacacttggggccactagcaggccaaggctgccttctttagaggaatgagcataaggcccccgggctggtggcattggatgagagggcctagggtgcccacaatggaacaactgtgccttggcccctaggggcacccctaggacttttgggaggtttcgggtctggaaaaggaagactatgggattatgcctccaagggacctcgaaggtggagggtacttagtgttttactagaccacagtgctgggagctgggactctggggtctctgggtgacagcctgcagaaggtgaggggcagtaaggccacagctagccatggcctgatctggtggcttcctctccccagtctcaatacagtctgacaagagcacagcagtcctacaagtccttggtgcagatccacgaaaaaaacggtgaggctggagccaggactcaggagattcggacacttgccacacccaggttttcact

SEQ ID NO: 56287 - DNA, 1407 bp, Homo sapiens
atagccagtgtagtagaggagacagggcacccatatccaaccactgaagacaggtgcagcgcggttcaaaccaaatactgggtaagttaatttcaaatggctttggagtccaacaaacctgtgtttgcatcctagctatcctaattgaggaattttatgtaatctcactaagctacagttttcttatctataaagtaggattataatacctactgcatatggttgtcttgagattaaatgaggtgttatatataaaatgcttcagatgatacatgataaatgctaaacaatctatctgatatattctctaaaaacatacagaatataaaatcatggttaggaatttgagctttagagctagacagaacttgactgaatcttagctctgctaagagctgtgactttgggcatgataattgacctcactagactcagcttccgcatctataaaatggataatgatagaataatgagtgatggtggtaagaatgaaatgagctagtatctgcggcacctaggacagaacctggcatgtaataaacactcagtagacattacctgctggtgtggtaattaggtatgtcctgccagaaatggggagatcactctgattacttttatttcctagcattagattaatatcccaggttctataaccgtgtaaggttcttgagactggcaaagggctgacgacatgaaatttactcctcccagatagtggacagccctctgggccacacccccaacatctggctgaggggctcaaccctacataggttctcctccttccctatgctcagtgagctagttgcttgctcacttagagcaggatgaataaggggctaattctgttcttgacctcttccatatatctctctggacatcctttctcatttccatctggcagtgcgtgcctctgcatacctgattcatgccttgcatttgtagcgaggagaggagatgtaatgattcaggtttctcctttaggcttggggccctgagaactcccgggtgcaatagtcacctggtgaaacatgagctttgagtcacagggtcaggcccaagtcatttctgctaggaattagggaagagtttctgctgccaagggagttttaggaacagttggagcagggtcagtccaggaaacaagagggctaagtccctgcctcgatctcagctgcagctctgctcgtttccgaagtccttgctgtagcttgagagctgaagatttagactgtggagggaatggggctggaaattgttctaaaaatggaaagcacgttgcgtttataagactgctagatggactgcttcactttaacttttggctcttcgccaaatgggactgggaaggtgatggtcattctctaacctgtgtcggtttttttccttttcttttcactccca

SEQ ID NO: 56288 - DNA, 1107 bp, Homo sapiens
ccatgtggagctcagaggagggagcttggctggaaatagaaatatgggagtcatccccctatagggtcttcatggccatgagaatgcataggattacctcaagaaagcggggaggaaatgaagagtgcggcacaaccaagccctgaggagttgacagatgaggatgccaaatgctggggtcccctcctgtctagctggcagttgactctgccttgtccactggctccttctctcctatcctctcctgtctccttactgtctcttcgcatccactccattgcgttcaggccacgtcagcagtcatcatggtggtcctgaaaccttgctaaataccctaaagtatagacacagttaccatggagccggtgctccactcctaggtatatgctgcagagagatggagatctgtgtccacacggaaactaatatgtgaatgttcatggcagcattactcacaagagccaaaaaagtggaaacaacccagacgtccatcagctgatggattcataaataaaacatcaaatatatccataaattgaatattattttggccataaaaagaagtgaagtgctgatacatgcttacaatatggatgcacttgaaaacttgatgccaaatgaaaaaagccagtcacaaaagatcacatattgtatgattccatttatatgaaatgtccagaatagacaaatccatagagacagaaagtagatgagtggttgccagggccaggagtgggagagttggagagatgaggagtgactgcgccaatgggtagaaggtttctttttggagcgatgaaatgttctaaaattgactgtggtgacagttgcagaactctgtgaatatactaaaaatgactgaattgtatgctttaaatgggtgaactgtatggcatatgaactatatctcagtaaagcatttttttttgtttttttttaaacccgatagtggtttcccactgcactgcatatacaagcaaaacctgctgtgatcacccggcctcctctcatgccactttccccatccctcgcatatgctctgtccacactggctctctgtcaggcgcctgaacagccaatccgctggctgccttggggcctttgctt

SEQ ID NO: 56289 - DNA, 1072 bp, Homo sapiens
tgatgccttgtctggtacatttccaagctgttttgctccaccatgctcttccctctgtgtttggaaattaccagccggagcggtagaagccacctccctgctccacttgggcactttattgtcagcgcagctcatgcgcccaagatccattccttaccccagagttagcttaagcctgccaggagtcaaaaaaacaactcccagcaaaacctgggtccctggcctaaggccgaccttgacctaatgacctctccaggtcaagtccccttgagctaataggaagtaaatgagggaatggagttgggcgctttaaaaatcagacagtgtatgaagtaacagtgacttgtggggagaaaggtagtcccttctgatttctgcttaagaagagagtccaagttggtgctagcatttcgttaagccttcctcatacttcataatcttcctttatagtaaggacaggctcagagcctttgcaggtaacagtatctagtcagaattttataacatgattttatcatattctgttttacagccaccttcaatatgtggcaagtgatactggttttccatttacagtagtgaaacaaagtttcctatttcagtgtgtttacatttttatctcttttttcatacctagtattacggatatttacatttttagagtctgtttgtttattttagagatggggatcttgctgtctcgcgcaggctggagtgcagtgatatggtcatagctcactgcagccttgacctccagggctcaagtgatcctctcaccccagcctcccaagtagctgagactataggcacagaccaccgtgcccagctaaatttttttttttttttttaagagacaggggtctcgctatgttgcctgggggattactatgttgcccaggctggtcttgaactcctggcctcaagtgatctcccaccttagctcctcaagttgctgggattacaggtgtgagccacaatggctggctctaagaagtcaatttagagaaaaatattaattaatagtccaagtaatacctggatgtggcacaaatcatgtggtgattcatgaatg

SEQ ID NO: 56290 - DNA, 1043 bp, Homo sapiens
ctcctgtcaggttccaatactgtgttgcagtgggagcccaaactttccccagtgtgagtgctcccagcaagaaagtggcaaagcagatggccgcagaggaagccatgaaggccctgcatggggaggcgaccaactccatggcttctgataaccaggtagggcgttttcctactcaaaagatacaggtcatttttagcaactgagtggtttaagattgccagtgactccctcaacatttcctgaagtgtttatggctcctctgtttgatggattctcctttagcctgaaggtatgatctcagagtcacttgataacttggaatccatgatgcccaacaaggtcaggaagattggcgagctcgtgagatacctgaacaccaaccctgtgggtggccttttggagtacgcccgctcccatggctttgctgctgaattcaagttggtcgaccagtccggacctcctcacgagcccaagtgagtgtcctagtcctggctaatgcatgtgtcaccagttggggatggtctgtaacccagggaaaacaagggtgtgctttagctgtgtaggacagaaggggcgagttgagggaaacaagtccagccctgtctccacggcctcttagaagacaatagacctgccaagagtgaatgcgttcactcttccagtaagcatgatcctttttaattttttgactagttttaatttttaaagaaatgtataggtacattaaaaaatcattcaggccagacatggtggctcacgcctgtaatcccagcactttgggaagttgaggcaggtagattacctgaggtcgggagttcaagaccagccggaccatatgaggaaaccctgtctctactaaaaatacaaaaattagctgggcgtggcagcgggtgcctgtaatcccagctactcgggaggcagacaggagaattgattgaagctgggaggcggaggttgcagtgagctgagatcgcaccactgcactccagcctgagcaacagagcaagactccatcttgaaaaaaatcattcaagctgattgaa

SEQ ID NO: 56291 - DNA, 1270 bp, Homo sapiens
gtggcaggagtctgccacagagaggtgttgattgcctttcctcacatttccaggaactgagtatctaccaagatcaggaacaaaggatcttaaagttcctggaagagcttggggaagggaaggccaccacagcacatgatctgtctgggaaacttgggactccgaagaaagaaatcaatcgagttttatactccctggcaaagaagggcaagctacagaaagaggcaggaacaccccctttgtggaaaatcgcggtctccactcaggcttggaaccagcacagcggagtggtaagaccagacggtcatagccaaggagccccaaactcagacccgagtttggaaccggaagacagaaactccacatctgtctcagaagatcttcttgagccttttattgcagtctcagctcaggcttggaaccagcacagcggagtggtaagaccagacagtcatagccaaggatccccaaactcagacccaggtttggaacctgaagacagcaactccacatctgccttggaagatcctcttgagtttttagacatggccgagatcaaggagaaaatctgcgactatctcttcaatgtgtctgactcctctgccctgaatttggctaaaaatattggccttaccaaggcccgagatataaatgctgtgctaattgacatggaaaggcagggggatgtctatagacaagggacaacccctcccatatggcatttgacagacaagaagcgagagaggatgcaaatcaagagaaatacgaacagtgttcctgaaaccgctccagctgcaatccctgagaccaaaagaaacgcagagttcctcacctgtaatatacccacatcaaatgcctcaaataacatggtaaccacagaaaaagtggagaatgggcaggaacctgtcataaagttagaaaacaggcaagaggccagaccagaaccagcaagactgaaaccacctgttcattacaatggcccctcaaaagcagggtatgttgactttgaaaatggccagtgggccacagatgacatcccagatgacttgaatagtatccgcgcagcaccaggtgagtttcgagccatcatggagatgccctccttctacagtcatggcttgccacggtgttcaccctacaagaaactgacagagtgccagctgaagaaccccatcagcgggctgttagaatatgcccagttcgctagtcaaacctgtgagttcaacatgatagagcagagtggaccaccccatgaacctcggtaagagac

SEQ ID NO: 56292 - DNA, 1029 bp, Homo sapiens
agtgggccttgggtggagaagggaactgaccatgagatccaggtggggtgaggaggtgtgtgaagtcagagtggggaagaatcagggtggcttactggcagcttcaccggggtcatgcgaggagcaggttccaccagagtaaggagtgaagttgtagaaacacagggaagtcaccatcagaaaagagcaggagtcaagaaactatggcccacaggtacaaactacctgtttttataaataaagcttcatggtaaatgaattgtaaataaagttttgcatattgtgtgaggctgtttttgtgctacagtggcagagctgtctggccctttatagaaaaagtttatcagccactggaaaagagttgcaggatttgaggtcttggtgtgatggcctaggttagagtcatagtgagattgaaggagtagctagacaagccaattgtgtggcagaaaggtagggatggagatcactgggttaaggatccttgtagccaggacaccatgagagtgattgacaagaatgctgaaatcccctaagtgtgtcaggatgtggaagagtagaaggctagagttatggaagaaagggtcccacctctacctgtgcagcctccaggagagtctgaggagggggcggtgagtgtgagtaaatgttgtcagaatccctcctcccagtctacaagccccagggaaaggaagcaaggtgtttactgacacccccaggcttataagtacttcctggctccatcaccctccagtgaacagccctggggagaagacagtactggtttgcaggtgggtgggtggggaaaggggtcacaggtgcttggtgttctggtaaatgtgcatatgagaacatggggttgcttgtgccctgtccgtcagggttcagaagaacgtgcagtggaagcagctatggggaagtagctagggaaggtaggactggtctgaggtggtgaggagcagatgctgccagctccacacatccaggagagcctgggtggtttgggcaaaagtctctggcatcccttct

SEQ ID NO: 56293 - DNA, 1367 bp, Homo sapiens
aacagataaactgaaatacatccacataatgggatactgcttagtagtgaagaggaaatactgttacaagtaacaacacgggtgactcgcaagtgcgttatgctaagcacgagaagccagactcaaaaggctgcatactgtatgagtccatttatatgacattctggaaaaaaaaaaccacagttatagggatggaaagtggatccgtgggtgccagggactgggtatcgtggaagaaattgattgttgagtggcatgaaaaagctttttagggaaatagaaatgttctatatcttgattgtggtggcgattgtcgaaattcatagatttatacacttaaaaggataaattttactgtatctaaattatatacctcaattttgttaagatatatatatatttttttttttttaagcactcctttgaaaggattaaggacgcctaacttgaaggaaaagcatttctgcacaggtgtcagtgtattgcactgtggaacctgtgtggtaaaggcaaagggggtagtgcttatctcttgatcctaaatatgtgagaccagattaaagtgaaatctgggaggcaatgaatgttaaatgagttgttatgtaatttgcatagaggtgatgctgagagatttagaaaggatcactgtgggttgcttgctcactttcttgctctcctattccgtagctttccaaatggctgtactcaacggtggcttggtgtttaggggatttaaggggggcaaaaagaaagattaataatctcctcctctccctctaaccctactgccctaagatatccttagcaaacttacatctcctttcttttctctgtgttcattccattgtgcgcacacatacacattcatggattttctctttttgtttagggaaaaaaattataatgtacatactattctacaactttttgttgttttattgaacattatatgattcctaaattatccccaggtgaatacaaatagatatgacacattttaaaaaaataaaataactggccgggcgtggtagctcatgcctgtaatcccagcactttgggaggccgaggagggcggatcaggagatcgacaccatcctggccagcatggtgaaaccccatctctactaaaaatacaaaaattagctgggtgtggtggcgtgcgcctgtaatcccagctactccggaggctgaggcaggagaatcacttgaacccgggaggcggagattgcagtgagctgagatcacactgcactccagcctgattgcagtgagccgagatcatgccactgcactccagcttggcaacagagcgagactccgtctcacaagaaaaaaaataaccgtgtgagtactattccatagaatga

SEQ ID NO: 56294 - DNA, 1026 bp, Homo sapiens
atgataattgtgattactgaggcatccatcttccctagcagactagctaaaggatggcgctcttatttgtgtcatatcctgggtgcttaacacagtatctgccacataattaggtgcttagtaaagttttgttaaatgatcgaatggggcgtttttagcgcagtgtgcaagtgccctattaggggtaggcgcccagtaactcgagaagcatggagtaggaaaccacaaacagcacctgctccccctcctctccccctacctgctgtggggaaggcctcccttgtaaatttgaaaggttgattcacgggaagccgtggaggaggtgcatgctaggccaacgaatagaatgtgcaaaggcccagaaggaagacagagcccagcctgcaagggaatgttaatttggagtgactaacaccatgaaagggcatcagctggagatactgctataaagggactgccttgtaatttcataagcatgggggtaaaattaagattaaacacagggaaagaacattctcacaggtgaggatggtgttgaaccctagaataatcgtttcccagataccttgaacaaaaatccagcagttagagaagcctgaccatgaagcaaatttgacttttgtccctctagataacaaaagttatctttttgaaagtaatggtgtaatttgaatgagtgtagagaagcgctgaagactgagctttactaaagccttcagacctggatttggcagcagcgtggccttagtcaagcctcggtttctacacctgcaaagtgggaataatgcctaccttggagggctgttgtgaagattaagggagataatacatgtaaagtacttaaccatttgcctggtggggtagtttttatgacctagatcctaaattgttcactgctgctgttgctactcttggtactttttactggctggcatctgcttgcttaagtttataacatagtaggagcattaacaaggtcccacggtggggaccttggtcgtttgacgagatctgcgctcccgccca

SEQ ID NO: 56295 - DNA, 1963 bp, Homo sapiens
ataaaaactggtcaattaagactagggagatttaagaaaaaagtaaatgcaacatattggttgtttcgtaaattggttatccaaggaattgaccatttggcaaactgactttcggcaaattggctgttggtgaaatcagcctatttccctgagaaacactgcagaaggcagggcagtggctgccttgagcctgcccaggacaggactgtgactgtcccctcctgctttctacaagccatggagataggggcattgctcttgcatgaggctggggctgagagcagccccctacaggctggatctggatcctagggaagaagaagatgggagatctccccctttgggtcctgactcaatagaacccaaatgtaggccagtagcggaacctctgtgctagccagagtcaggccagaagtcagtcaggtgctgcatccaagaacaatctagcatcggagaagcggcttaagggtgtcagaatataatgtataaaaccacaagttgtatagggtcaccccgtggggtagttatccgactgaatgtacatttattagttatacatacttgcaaaagattgcacacaggcctgttagtcattattattagtattattttacatatgtaatattattgcaaatgttatatctttattatataatacttaagcctggcacatatagctagttgataaataccactttttttctttgttactagataacttactggagtggataaatgcacttaatagcttttggagacctctttttcttctgggggtacctgaggcatttcttgctttctttttttttttttttgagatggagtttcgctcttgttgctcagggtggagtgcagtggtgcgatctcggctcactgcaacctccgcctcccaggttcaagtgattctcctgcctcagcctccctagtagctaggattacaggcatgtgccaccacacccggctaattttgtatttttagtaaagacggagtttctctatgttagtcaggcgggtctcgaactcccgacctcaggtgatccacccacctcggtgtcccaaagtgctgggattacaggcatgagccaccgcgcctggccacatttcttgctttcttgtaacttcaaaagccagttttagctgggagcaatggttcacgcctgtaatcccagcatttttggaggccgaggcaggcggatcacctgagatcaggagtttgcgaccagcctggccaacatggtgagaccccacctctactaaaaatataaaaattagccaggcatgatagcgcgtgcctgtagtcccagctacttgggaggctgaggcaggagaatcacttgtacctgggaggtggaggttgcagtgagccgagatcatgccactgcactccagcctggataacagagtgagattctggctcaaaaaaaaaaaaaaaaaaaaagccatttgtgatcattaacatcaatagaatatatgtcagcataaatactgccacagagcactactcagccagttgggcaactcactcttctctaccaaaagctttacaggttatcaaagcaagtgggtttactgtgggaggctactgtgaattttggaaattaatgttgagggactagcgcagtggctcacacctgtaatcccaacattttgggaggccgaggcaggcggatcacgaagtcaggagattgagaccatcctggctaacacggtgaaacgccgtctctactaaaaatacaaaaaattacccaggcatggtggcatgtgcctgtagtcccagctactcgggaggctgagacaggagaatcacttgaacctgggaggtggaggttgcagtgagctgagatcgcaccactgcactccaacctgggcaacagagcgagactctatctcaaaaaaagaaagaaagaaagaaaattaatgttgttaggaactgttgtagtggaataaaaactcagtgataaag

SEQ ID NO: 56296 - DNA, 1049 bp, Homo sapiens
cactcataactgacattgtatatttatttgtttatttattgcctgtctctcctcattgactgtctttcattagcttcatgagaacaatgtggaaaggaattttctttgatcaaagcaaaacaaaactaccttgaggcctaggacagtgcctcatactggcatatagtatatgttcagtaaatgtttattaaatgaatgaatggaaatcttcccacaggaagaaaacactggcattatgttgatgaacattccagtctgcatgatagatacacttctcactgtaaagatctgaaacttgagtaccatggcatcccaggaaggtagcacacctcttcccatatgtgtttgaacctgcagaggtcaggcccaaggagcctccagctggaaattctaccctgtgtgatgtttcactcctctcaaacttttctgaactttgataggttgtatattaaggccttctccatattttggggccctttccttggagtatttatttttaaaacatttatttaagcacttacaaggtgacaggcactgttcttagtcctttataaatagcaactcactcttggactggagtttggggaccaagggttgtcaactttaaaacttttttctttttaagtaccaaaacactcaagaacagaaataagactactctgcatctagtccatcttgccctccagaagtagagctatctaacagcctgatacaggtcttgtccctgccctttcctcaggtttttacagccatagctagtaaatataacatactgcatctcatcgcctttgtttggtcttcacccaaacgcagccacgctctgccgcaggatatgtggcagagccaggtggggaatcagtggctcagagcccactctgcttttcaggacataggctgctcaagcatctgtcttcagccctctcccagggagggcctaaacccacatcctcaggcccctgcagagcacatccatcttcctggttacatgttatgccttatctgtgggaaccctagccacgccacacccacacctcaacacatgaagaaag

SEQ ID NO: 56297 - DNA, 2872 bp, Homo sapiens
gagtagctgggatcacagatgtgcaccaccatgcctggctaatttttttttttttttttttttgagacagagtctcactccatcgcgcaggctggagtgcaatgatgcgatctcagctcactgcaaactctacctcccgggttcaagtgagtctccctcctcagcctcccgagtagctgggattacaggagcatgccaccatgcctggctaatttttgtatttttagtaagacagggtttcaccatgttggccaggctggtctcgaactcctgacctcaggtgatccacctgcctcggcctcccaaactgctgggattacaggtatgagccaccgtgcctggcctatgcccggctaatttttgtatttttagtagagatggggtttcaccatgttggccaggctggtctcgaactcctgacctcaagtgatctgcgcacttaggcctcccagagtgatgggattacaggcatgagccaccgcgccaggcctttcgcttctctttagcacttgctatgtacctgacacggtgttgagcactttacatatactaacttatttcatccctctaacaactgagtgcactaaatattatccccattttatagatgcagaagtgaatcttggctaaggtcctgacattaattaacggcaaagctggaacttgaagccagctgtgtggtttgagtcttgctctttctcagtgtctagcaagtcttgctcttgcccttgctcatcaggctatgtggtttgagtcttgctctttctcagtgactagtatcccagcaatgtaaacctggtgcagtgggggaaaggaggcccagacagagtttagtgggccaggattggctgcaagaataacatctcaaattgtctaatgatacattatcttttattttacattttttactcagcattgtccagatatgaaccaaggtttggccttttcacccagagaaaaaggacaggctcatgggtacactgtgctgggatgacgggcacaaagtaggtattcggaaaatgcttgtggaaaaaagaaatcctgaggcattgttatttctgccagaaggaggcccagtgcttattacacacaggctccttaagccagctatttttatactataacacactgtaatatgagcatttttctgattcatggatttaaagatttgaagccctgtttcagaccaagattggtagtattatctgtgaccaactgattagagttctcaaatatgtgaacaacagaatctgagcttttgggcttctgtagtaatctcttgagatagagcaatttgttttgctataacatctgttagacttggaccttaatgggtacaactgcttgagttttctggagaacactggatgattgtttgacatcagggataaagagttcaaaatattaagtttgtctcaaaattaaatatttgggaaagacctgtgattgatgtgcattcattgtaggaatagtacactagttttaaacagatgatattcctggtatttttgatgagctattctgtgtcttaaagatgtttaaagatgacttgtagttgtatagtgaactattaggaacatacaaaatttatataacccatccatatagactgtgacttacacccccctcagttcctccacccaaggaggtctagttgctgcttctataccctctggttaccttgaagctacctatttcaccatctttatcagactttatcagacttaataggtgagaccctctgacatcagcctccctttccttctgtaccaccccttgccacatgcacacagaatgaagctcttctccaaaaggactgtatattaatctacttgcaagtggcacaaacccagtgtaaattaacttaagcaaaaaaaggttttttcctccctttgattatttaactagaaagtccaaaggcaagcttcaggcatggctggatcctggggctaaaatgatgtcatgagggctttcttggcccttcctttttcggctccgttttctttattgacttcattctctcttgctgctttctttttctttttttttttttgagatggagtcttgctcgtcttgctctgtcgcccccaggctggagtgcagtggcacgatcttggctggcggcaacctccacctcccaggttcaagtgattctcctgcctcagcctcccgggtagctaggattacaggagcccgtcactacccccggctaatttttgtatttttagtagaaatggggtttcactatgttggccaggctggtcttgaactcctgacctcaggtgatccacccgcctcagcctcccaaagtgctgggattacaggcatgagctactgtgcccggccttcttgctgctttctctatgcatactgaaaaagctccctgtcagcaaccccaagcctatgacctgatggctgtcttttagcgttgtaaattaaccattgctgacaaggaaatagggagaccacaattggagaggtctacatcataggctcactcttgggatgaggaagtaaactgcccgtccataaccttatgggatggggaagttcagaggtcctaggcaggcagaaacagcacatgactactgcaggggtgtgtgtatgcacacatgtgtgcttacatgtgtgctcttatctcacttctttggggtccttctagagccttccaactggaatgaatccagtgggttgtgtttgtccatcaaactttgactcccactgtggcatccattatgtgctctccgtcctttctgtacctttgcatctgctgtttgggttgcccttccccattgcttcatctggctgatccttctagattcaggtcatgcttctcccagaagccttccttgacaccttccttaatgagcta

SEQ ID NO: 56298 - DNA, 1056 bp, Homo sapiens
ccaagaaggaagagcattgaagaagtaatgattttaatatagtgggggatttcccccttaaatttttataatttccttgtgaataaacaatcatggaaaagaagaaacctagtcatacaaaatcagaataaataaaaatcttaagactggatccacatctttggccaattcatataagcacctaatacatcaatttctctgtacttaaaatgaagagaataattaatattcttaagtacaatgttttcaatagagaacaaatgaaatcacctttgtcatcaacagcagcccagactgactgtatctagatcacaccttgatgttacgtttgaatgcagtcagtagttaccaaaaagtaattagtgcacattaaatagtggtaaaatcagcagggagaaatatgggattagcacgtagttccagaaccttcctcctcctccagagtgcaactcaacaaacagtacactccaaattaagaatcaatgtttcatcccaggacaaacggtgttgctcccatcacagtaccacaactgagatactgtgaagtcattgcactaccagtaggttactactcttttgaagttactgtttttaaatcctaaaatatgtccccagttttctacattcattcttcttcccctaagagttgctagaagcagatgaaggatccctattgactctgcagggtttgatttcagtaccttagacagctatctggtgacttcccagtaggcacgaacaaccccttctctccccttgcagtcggtgggcttgatgacgccccagacagtatcctttccttctctactgccgccaaaataaacattagggaaatgggatcattaacaccactgagaaaggagtttacagggatcgcaatagtaactgtctgcttgtggtagtagaaagcttgtgccaggctgcatgaatagaaattaatgttaaactcctgttagacgagtaatatgtagatttttattgaaacagaccacagcttattaaaaagtactcagtgcaatggtatatacatatatacagatagaaaaaaatataact

SEQ ID NO: 56299 - DNA, 1048 bp, Homo sapiens
actcagaatgtggccagaactagctaactacctgaactgaaagcaccccatgttcagattcagaccaactcaaaacacatgtaaggggtgcctattgtatgcagggtaaggtgtcaagtccctttttatttggattaagctcaaataagaaaggacctgaagcgaacgtgggatgtgtatgtgtgtacatgtacacgtttgcaaacacacaggtttatgtgggtattaatatcgagtggaaaatctggctttttatttgtctgtgtctttttttttttttttcagtctgattcgagtatatctgttttggcaagttgtgggcagctctcttttacttttgtcacccagaggcttccgtagacaaaaggaaaggagagaggtgtgttcaaagacccccatggcgaagagcccatcccccaagcctgacacaaccctccctcccagcggacccctcttctggactggcttcgctgttggctacttcagtgcatctgacccccaccccccgcgtgaagacctgagattgagcgtggatttctgttctccaccaactctgcagcaagggccctgccagaggcgtcgcttcctgtcatctcctcttcccgctcccaagtagaggcacctaaacagagattagatttctggtttcaaggcatgtcggaccaagcacgctgaatgaacatgagttagttaattagctcggtctctcttctttccgttccctggtctgaatgtttcttgatggcaaagcgaccaggagagagttgatttgcatcttaagacctatgggtaatgcttctggagtggggagatttatttagcaactgcttgaacttgtgtacggggtcgggaaggaggtggagctgaccccaatggggctatcggagattggggtgtgggtggtgcccactgccacgctgacaccccgggcctcgatgatggcagacaggagctgctgctgctgctggcgcagggtgtcggcgatgagcagcggcagggagttgaagctggcggtgagatgctccagcttcgactccaggctgccaat

SEQ ID NO: 56300 - DNA, 1013 bp, Homo sapiens
aaacctcaaaggagacatgtggccagactgcaggaaggaactgactcgaactagacctgggaagcccccacaaccaggaggtctctcaccatttcttctctgtccttctgtttaagtgactgcttcagttctctctccctctccctgtctctctcttcctctccctttccctgtctctctcttcctctccgtctccctgtctctcttcctctccgtctccctgtctctctcttcctctccctttccctgtctctctcttcctctccctttccctgtctctctcttcctctccctctctcttcctctctttctctccctctctgcctcctgtccccgcgacagactgtaacaggctccaattcagagagtacatataatagttttagccacaggtaaagactaattggccccctactagtcttaattctaaattctcagaatagaagaaatgattggccaatttgggccacgtatccaccctgggaccaatcagcattggccaggaagagggtcatatggagcaaacagggctaggggcccacctgtgagcttcaggaatagcccaacaaactgccccaggatgtttcttccatgagtagcagtatttcctgtttctcctctcaccttgcaggacatgctgtgactgatgttccctggggacatgaggcaaaccaaactttcttttttttttttttagttttattattattacactttaagttttagggtacatgtgcacaatgtgcaggtttgttacatatgtatacatgtgccatgttggtgtgctgcacccattaactcgtcatttaacattaggtatatctcctaatgctatccctcccccctccccccaccccacaacagtccctggagtgtgatgttccccttcctgtgtccatgtgttctcattgttcaattcccacctatgagtgagaacatgcggtgtttggttttttgtccttgcgatagtttgctgagaatgatggtttccagtttcatccatgtccctacaa

SEQ ID NO: 56301 - DNA, 1144 bp, Homo sapiens
cctttcaggcaagaaagtactagaggtgggcagttaagtcatttaaaactattttcacagcagatctttactgaatttttaaaaagcaatatttatgtcccttagacatttctgagaagacttagctgttcttttaaaaacatcacttcagcgccaatgaaaaatataatccagccttagtaataaatttttaaaacatacacacacaaaagttatcagcctgcaaaacaatgtttcctaggcttcccacacatctcagtattttaacaacatcccatctgttgatgtcagtctgaagaagcaggtctatattctctaattttattaaaatcctttctggctagtaacctgatttctattaggctggcctacttatttccaggccccaggcctgtggacacatgccagtctgcatggctgacagaaatggggatggttaatcaaaaatctgcttagcatgtgcttaataaggaatgttttctgttgctcttgttactaattgctgaagatgtctgtgtttggattaaaactttgtcccctgccatctggatgccattgatatgtctcagctcagtcatgagcctggtgatatcagtggtttccatgtcaatggatgacagcgtcatatgttgaaacgtgtgattgcagtgcacagtgaaggagccagccctggggaagaggaagctctggtttcacacctaaatatcttcactgattttcagacattgctctgaaattatttcttttttgtgccaattacatttacatgtacaattgcagtgcaaatgtttttggccatttgggaaaggagacaatgggctcgttggtacctatagttccaatcagtgggaaagacattttctcaaagaagtcttttaaaatctccagctgataggaaatctgtttactctctgaacccaagcaatgtaccgtatacacgaagtggcaatctcaggcaaagctcggaagtctgcatgtaagggcagcaatggtatatcgctagctattttccaaggggaccccgggactcaaggtctcgctcatgcagcctgtctaaatatagcatcagcaacagcagtcaagagatagtattgaaataatcaagaaggaagaaagaaagaaggaaggaaggaaggagaaagaa

SEQ ID NO: 56302 - DNA, 1003 bp, Homo sapiens
aggacagatatgatccctgccctcatagagcttccaggctagtgggaaggcacagggacaggcaataacaaggaatcaatcaaataagtccgtgtaaattcagatgcagacaaagaacggaatgtggcagtgatggggggtcatggaggaagaaatgaattagggttgtagcttcaagggcgacctctgaaagttactttggtattgtgagatttatttctattaatacttcctttcgctatgtactacagtattatctcctcaggaaagtgaggctcagagaggttaattaacttgcccaaaatcacacagccagtcagtggaggagtcagaattcgaaccctactctgcctgactccgaagtccaggttttttccaccatccttgattatctacagaaattaggacaacctactacagaatgtcaggtaatatggtaaccattagtatgagcattaagggaccccaaggccagacctgtgagcccagcctcactgctgtctctgtctcctgttctagggggagggacgaggtggatattctagatggtcttaccctctcctctccttcggagactggcttcattgggagtgagatgacactgtcgcagggctagctttttgtaggccactagttgtcgcaggctgctgatgaagccaagcagatcacccccatgtccacaagcacaccgggattagatacatttaagtcctagatcccaaacgcctttttcatttctggttttgcatttgtttccattctactatcttcatttggaaaaccctttcattcctcaagaaaacaagccacacaatcaaaaaaagatgtgtcttatcctctgggcgctgcctcattgcctgccccattattgaccaatgccaccggagtgccttgcacagcttggccagcgttcgctgtgcacatcgaccggtgagctggcatgctgacagcggcaggggcccccagcttcagacacttctgaacccagctgctttacggacac

SEQ ID NO: 56303 - DNA, 1057 bp, Homo sapiens
taattgtctaattatattcttatatatatatttgtatccttattattgtatatttgtcaccaccatccatctccagaactgacttttgtcattttctgtgtggccttgtgtgcctccaccaaggcttgtggtgagctctcttcgcacatcatctccacaagcatctcccactttgtcagcccctaaacttacctttaccctgtcccatcgccctaacgtcacgggccggggttctgattccaagtttcgattggggaagtggttggtaatcccacaggtggtaatagtgtcgcctccatctgttgatctcttgtgtgctggagactgtgcctttactttatcatctcagtgattcttggcgacagtcccgtagttaggctctgtattcataccccctttatagataaagcaactgaagcagagaaggtaagagatgtgtccacagtcatgtggctggtgagggcagagggttttgaggtcaactgtttgagttgaccatctccaaagctagccaggttgccctgcctgggggagagaggcccgtcctcaaattaactcttctacccctggttcctacaatggctagaagcagcctagaaggtgggctgagtcatggggacttccctccaacaagggtgaatattaggaagcctagggctgaacagtaacccagtgttggtccaaccttgcagcagctctggaggccctcatcccagccacacccccaccttggctgtgccttgtggtggctcctctgcctattaaaatcccttccttctcctggtttccctattgtcctccccttgggtccaaggcttgcctcaaggatgaggcccagcacccttggggaggtagaagggcagccatctcagggtaacctgcccagccatcagaactgggacccgcttcagtttctctgccttgccttctgatcccaaggaaggctagggtcttccttgaagcctcactgagccccatactgggtcttgttctttcttgcctccctgccttctgaggggctgacttctacttctgctcgcctggagtcacagtgtcc

SEQ ID NO: 56304 - DNA, 1065 bp, Homo sapiens
tctcctcacttgtacgaggtaccttctggctgctcttccggctgctcaacactcaaagaaggaaggtgctgggtgtccttgtttgcatatttttctggcacggacacattcttcttggagtttcttgacattagggccacttgaaatgctcaaggtaagggctgctctgcctggcagacatgcgtcaggtgcctttggctcctccctggcaagtctgcctccagacgccctcagatcctgtccccatgcctggccatggggctatctgaccactgatgccagagggtcacactcatcagtctatacagaagacttggaaatgttttggcaaccctgtgttagaagagtggggtttcctaactgtatggctttgggtaattgcttaaatcctcccagccttagtttttccatctgtgggttaggagtggtcctctctacctcccagcatcaaataggaaactgtgcaagaaaatgctttgtaaacaggaaagccctaaactgacatccaggacacagtgactcagtagcaaatatattctgatattcagccttttccatggttacagcctcctctgtgccaagaaattcaagtcaccaagggttaaagcaagcaaggcacatggccgtgattgtccataattgatgaaataaaccttaaaggagtgacatataattaattgcaattaatccaggcactgtgacaccaccttgctaaaaatactgtctactaacaattgctttgatccagcagaatgatgtctgcccatgagcctggcaaagtgtctgctaatggagtgcacatagtgggtgtggaagctggcaggtgtgggggcagagggcgggaagggggccccaattctctcagaccctttggcagcaaatactacatatatagggtgatcatatgattcattgtctaaactgggacacttttgagattattatattaatgattaccattcatagtaataattatgccagataacaggcatacactggactctcctgggtaaacccgaatgtatcgccaccctctgcataggctgttttaagcccgtgggaacc

SEQ ID NO: 56305 - DNA, 1008 bp, Homo sapiens
ttggatctgggatggaattaatctcactcaaacgtgtggctgctataaaatacatgtgggtagttcctaaaagaaaatattttatggagaagagggcaattgttgctggtggtgcaaccagcaattgccctctgtactcttgtggtatttggtatactaaactcatgggcacttatgtttgccactccaattcttcttaattttggtgaagtccaatgtattatgttttcttttatggattgtgcttttagtatcatatctaagatatctttgcctaacataaagtcacaaagatttttctcttatgttcttttctagaagttttacagatttaagttttacatttaagtcattgatccattttgaattaatttctgtatatgatattaggtatggattaaagttacatttttgcatatgtatattcaattgttttggcatcatttgttgaaaaggttgtcctttctccactgaattgcctttgcacctttgttgaaaatcagttgccaatacgtgtaggtctatttctggactctattctgttccactaatatttttctctttttgatgccaataccacactcttattattgtagcttgatcatgtcttgaaattaggtagtgtaaaccctctaactttctttttcaaaattattttgacttttttttaggtcatttgcatttccacataagctttatttatttatttatttattgagacgaaatcttgctctgttgcccaagctggagtgcagtggcgtgatgtcagctcagtgcaacttctgcctcccaggttcaagcaattctcctgcctcagcctcccgactagctgggactacaagtatgctaccatgcccagctaatttttgtattttcagtacagatggggtttcaccatgttggccaggctgatcttgaacccctggccttaagtgacctgcctgcctaccttggactcccagagtgctgggattacaggcatgagccactgcacccagcctaaataaa

SEQ ID NO: 56306 - DNA, 1249 bp, Homo sapiens
cagggtggtcagagtaacctctcctgccttgggggtcctctgggtgtgggaggccttgcaagtgcccagagccagatggagtgatgctgtttcagcaaaggcgccaggaatttggggatgggaaggggtaagggggagagaaaggagacacaatctccgtgggatttgggatgggggcaaacaatgctagtgggaggacatggagtgcaggattttttttcccccctcagatttcccactttagttgaaggctaagcctttgcccaggggatgcaaactaatttcagtattagtttaagccagaaataattgggaaggtaaaacttgcaaaagagaaaccacgccacatatttcaaagacaaattgaaacaatttctggattatccccagacctttcttctgtctaccagtgatcgggatttcttagttgctgagactcttgcccttgcagacctttgtcctggctgaaacctcattaatccttgcatcagccctgggggaggcaggtgagggtgagggatggctcttccgctgttttaggagagaccactgaggttgaaaggccggtgacgtagacataatgtcctttgggcaggagcatggcttgaacttccagagactcctggacaccagcacctacaaggaggcctttcggaaggacatgatccgctggggagaggagaaacgccaggctgacccaggcttcttttgcaggaagattgtggagggcatctcccagcccatctgggtaagagggctccatggcagcatgaagaacacctgtttccctagctcttcgctgtgtccatctctctctgtctccactgccaccatcctggcccaagcccccaccatttctggcctggacagtcgcagtagcctccacactggtctctagctgtggctcttgccctctgtggtctattcattacacagtagccagactgaccttttattatttatttatttatttatttatttatttatttatttatttttgagatggagtctcacacttgtcgcctgggctggagtgcagtggcgcaatcttggctcactgcaacctctgcctcctgggtttaagtgattcttctgcctcagcctcccaagcagctgggactacaggtgtccaccaccacgcctggctaatttttgtatttttagtagagacgggttttcaccatgttggccaggctggtctcgaactcctgacctcaggtgatccacccaccttggcctcccaaaatag

SEQ ID NO: 56307 - DNA, 1050 bp, Homo sapiens
tgtgttgcccaggctggtcttgaactcctggcctcaagcactcctcctgccttggcctcccaaagtattgggattacaggtgtgagccaccatgcccaaccagtgaattaataaatgatatatgttatggtgaccaagtcagtggagacagatacctctggctatgagagaattagtttagggtctgggcaataacctaatccagctagaatattgtgcgcctgttcacactgtaattagcactttataggttttacctgttagtttcagggctcttttatattctttagagtttcataataatcctgtgtgggagacagaacagaaagtgttatccccattttctgatgaggaaacaggatcagggacattgagacctaccaaagttacataataccagtagtagaaatgggacttcaacacaggcctcttgactccctttctgggacatggaagctcctggaaattctaggctaactggattctgatctccctgtcctgcagacttggagctgatgtctgtgctgtcctccggctctctggtccactcaaggaacagtatgctcaggtaggtggtgctttgtggcatccggtgtgttgggcggggccggctccaggactttggagctgtggctgctgcctgagtcactggcatgattcccgtcaccactgctggcagggtggtggccagctcttggttttctgtgagtggacctttcgggggcattttcagcttatatttctttcctaatagcctccctcccttcagagtgagttcaggaaggtgtgcccaggaaaggctgtcgacactcgagttggcagctctgatgctgtgtgattagtaaggacctgcctgtgcctcctcacaccaccctctcactcagctggcctgacacagcccctagaactttgctcctagaaatttagtacaggccgagcacggtggcacatgcctgtaatcccagcactttgggaggccgaggcaggtagattgcttgagtccaggagttagagaccagcctggccaacatggtgaaaccccatctccgt

SEQ ID NO: 56308 - DNA, 1035 bp, Homo sapiens
gtttgcgcggcggctcggcgcttccctgtcgtcgcactttgtggttgctgcagctcgggggcctgggctgcccctgacaccccttctgggcgatggtgcagcccaagggcgcctccatcccccgccgctgccgctaacccgggtcccccactccatggccgcctcggcgccgcccccaccggacaagctggagggaggtggcggccccgcaccgccccctgcgccgcccagcaccgggaggaagcagggcaaggccggtgagcgcgctgcgaggggcgggggctgaagaggcccaggacttgggaacctcagaggggagggatggtgggcggggggtgtttcacagtctgaaggcttgaagggaggctcaggtgaaaaggatgggtgggtgtaatcctccaggggttgggggcaggtgtcacacattgaggactctagggtttggagccacatggaattcagtactcacttggagcttgaggatatcgaaagatgggatatctttcatttaaaggaagacgtagctgagagtatgatcatcttcacaatctatttttcatattgcaccccttgttagcatttgttgaataaataagcaagtatgtattgacgttaaaggagttcctcagagcatggctgagagaaaagaggttggggaaacctcagggaaacttgtctgcgtcttccttttgccgctcttccaggtctgcaaatgaagagtccagaaaagaagcgaaggaagtcaaatactcaggtgaatggtggttggtggtgggtttggttcccagcagccccttggcggcacactgtctactctgccattccagtatctgtttgtatcttgtatcagctgcagggaggagagagaaaactgtctttcttgctttgcttcttgttctttcgctgaaccttataacaagtttaggggaaagtatcctctcctaagagatgattcgaccaaagttcttaccacgcagggttccagtctcctccatgtttcctgtcctggtttcctcctgatgataacgtaacacc

SEQ ID NO: 56309 - DNA, 1499 bp, Homo sapiens
ccatgtttaaactttgtgcctttgaccatctcttaggtctaatgatattttatgcaaacagttcttggacccctgaattcaatgacagggatgccaacaccttcttggcttctgggacctgtgttcttgctgagcaccctctccggtttgggttgggataacagaggcaggagtggcagctgtcccctctccctggggatatgcaacccttagagattgccccagagccccactcccggccaggcgggagatggacccctcccttgctcagtgcctcctggccggggcccctcaccccaaggggtctgtatatacatttcataaggcctgccctcccatgttgcatgcctatgtactctacgccaaagtgcagcccttcctcctgaagcctctgccctgcctccctttctgggagggcggggtgggggtgactgaatttgggcctcttgtacagttaactctcccaggtggattttgtggaggtgagaaaaggggcattgagactataaagcagtagacaatccccacataccatctgtagagttggaactgcattcttttaaagttttatatgcatatattttagggctgtagacttactttcctattttcttttccattgcttattcttgagcacaaaatgataatcaattattacatttatacatcacctttttgacttttccaagcccttttacagctcttggcattttcctcgcctaggcctgtgaggtaactgggatcgcaccttttataccagagacctgaggcagatgaaatttatttccatctaggactagaaaaacttgggtctcttaccgcgagactgagaggcagaagtcagcccgaatgcctgtcagtttcatggaggggaaacgcaaaacctgcagttcctgagtaccttctacaggcccggcccagcctaggcccggggtggccacaccacagcaagccggccccccctcttttggccttgtggataagggagagttgaccgttttcatcctggcctccttttgctgtttggatgtttccacgggtctcacttataccaaagggaaaactcttcattaaagtccgtatttcttctacctctgcctcttaacccttctgggaagcctattgtgtacgccgcgggccctcagcggcagacggggaggcgggaggtcgcggccgcccagggaagctgggggtctgcagagtttgggtgcggcagagtggggcgtttcgcgccaccgtccccatggggatgtcgtgtccgcagagggggctggctccgggtgggtcgaggcgggagccgggcctgcccggcgccccagcaccggcccccgggctacctgggcctcccgggtgcgccttcggctcgcgcgcgcccctccgcggcggctccaccgcccgggatggtacggtccggcagccgggccgcgcgctgccgcccctcggtgagctggtgtgggccgccgctagcggagacgaccctttccactcgcgtggtgccg

SEQ ID NO: 56310 - DNA, 1141 bp, Homo sapiens
tcccctccaaactctctccccagtgtgtgaggtccttctagcctgccttttctttttctcctcattccctgttgtctttcaccttggttgtgggatgtagccacgggaagtgggcagaacttcttcctctttacttcccttagggaccatatgggtaaagtcctagggccctttgtgaaggggctggggtgggggagccgctgacctgctgtcctcttctccctccccttagtacatgggttgtgtggaggtcctccagtcaatgcgtgccctggacttcaacacccggactcaggtcaccaggttagtggggagggagtggattgtgggagtcctgggattagtgaggccatgggaaacagaggaggggagtgggtcacttgggtgctgctgctgggggctgatctttgcgtagtaaaggggattgagagaaagctgaggtagtgattccgcctcttactgaaaggaggcccctttggcccggatcctccttacctatccagccttgggagttgtggggaaggtggcagaagcagctggcaggtggagctggagtagaaaaggggggtagatggaaggttgctgctgcctttgggaagggaatgggacatttggtagctggaagggggtggggctatacccattgaggccctaacccaatcagccaggaagtggcctctcagtgtcatcaaatattaaaggcccttaattcaatccaccatgacaaagagcctggagtgccctgggagtctggcctggctttcccctcccccagccctgtggcagccccagttgagtgggaggcaggcaggcaggcgctgggtctgagtacccctctttccccagggaggccatcagtctggtgtgtgaggctgtgccgggtgctaagggggcgacaaggaggagaaaggtacttggggtccttggggatagggatgctgctgggaaatgtggaggggcagtggggaggcaagtgtggggcatgtggggagagggccaggaggcaaaagtgtggtttgcctgtgctgggaaccctcaccttctgagaccctgggccctaccttagccctgtagccgcccgctcagctctatcctggggaggagtaacctgaaatttgctggaatgccaatcactctcacc

SEQ ID NO: 56311 - DNA, 1109 bp, Homo sapiens
acctctactttcaagcctccgattggcttagatttacttctcttcggatccttattggagggcagttctcacgcttctcaagaacgagcgtgggtcaaaagtaggcgtcttattggccaccactgcctttgtgcgcgatctcgcgctgccattggctaactcgggaaagtgggaagcgtgaaggagggaccctgaggtagagggtcaggggttagtgaggccggaagtgagtgtaataaagtttctccagggaggcagggcccggggagaaagttggagcggtaacctaagctggcagtggcgtgatccggcaccaaatcggcccgcggtgcggtgcggagactccatgaggccctggtgagtcttgacttttttctccttaggtgactcactctttcaccccggaacccctctcccgggaccccacttccggtcttcatttataagtcccgcccctgagacccctctccccggaagtcccacctcccaacttcagggggctcccccgaaccccgacttgatttttattttttgtctccgaccccaccctgtcgcccagtttttctggaagtccccaccccccgacacgttccaagccctactacgagaaacccttcgttactccttccattctccgaaactccgcctcctagcaacgatcctcggctaactcctgtcaaaaggcctatctcccaaaagggcaaaaccctgctcttcaaagaacgattcgaatttgttgaagctccgcccctccgaagccacgccccctccgtaatccacgtctgactgtccagaaagcctccccgcccagaagtctgaagttcgcgtccttaggggaccacgcccccttaggagctttatctttgtgggacctgggtcatcagctgaaaagccttgtcgtcaatccctgaaactccacctgcttatattttcctgtcctttctctttttgggccttgggatcagttttccgagcactctcgtgctcccccaggtgggaagtcaaagttcccatctctggctgtaaggagtgagattaaaggcagccgttttccgttttcctttctatcttttttttttttttttttttttttaagacggagtttcgct

SEQ ID NO: 56312 - DNA, 1116 bp, Homo sapiens
gttccggggtgaaagagtgagtcacctaaggagaaaaaagtcaagactcaccagggcctcatggagtctccgcaccgcaccgcgggccgatttggtgccggatcacgccactgccagcttaggttaccgctccaactttctccccgggccctgcctccctggagaaactttattacactcacttccggcctcactaacccctgaccctctacctcagggtccctccttcacgcttcccactttcccgagttagccaatggcagcgcgagatcgcgcacaaaggcagtggtggccaataagacgcctacttttgacccacgctcgttcttgagaagcgtgagaactgccctccaataaggatccgaagagaagtaaatctaagccaatcggaggcttgaaagtagaggtgtcccgcctcgagccaaacggaccaataggaagtgcgggcggcgtgtttgaaagcgaggccaaagtgggtgggagcgcgtgctgttgggagttgcttggaggttggcggcgcggggctgaaggctagcaaaccgagcgatcatgtcgcacaaacaaatttactattcggacaaatacgacgacgaggagtttgagtatcggttagtgctggcgcgggagcaatagcgagggtcgtgagctttggccgctgagggcacaaggaattagtaacaggaactgaggcgatagaattggcgcatgcgtacgaggtgcgaacgggcaatggtgtgatattgtggaaggcgtaaggcgcatgcgcggaggtgggaggcgctcgtaaaacaaagtggttgcgaatttggagtcgcctctcagtagagaggagagaggggtgggcgtggttagggtactgaccaccctcacccatgaggctttctggatcattctctgaactttatcgggcaaacttaacttgccttgtagagactgtttcacagtaatcttgtcgaatccagtgggagaacgtagcaaaagcggagctggaagtttcctggcgtccctaacaggagagtagcgctgagagagttgaatattgcttattaactcgtgaaaaagacaaggggcgtggttgtctggcttgtgtaaggaaggggatcgcttgggactgca

SEQ ID NO: 56313 - DNA, 1588 bp, Homo sapiens
attatatgatccatgaaccaggtcagtgcactggctaaaaacaaccatatagaactgctacactgagagaatgaaagaataagattgtataacccaaatagggagataggaaatggtttactggttccttccccctccagtcgtgggggatttttttaaaaaaaaactagtgaccaaaaataagactaaaatatctgggaagttcagagacaacctgtcactgaaaaacctcctgtaatctttcattcaatcagagggtattctttttaaggccacatatagcctgatcatagcccctgcctcattctccatcgaaaacattcttggatgtgttctaaataagcaaaggaaagtatatttattgataagacaccagacacccagctgccaggcaaaactaataagggacaccctggggctgtataaacatagcaaaagaactgatattaacaattctgtacttggcagacagtccagacttctgggtctgcttctaaggccatatgcttaagtctttatttagttataaagatctgagtgggtgatagctggggaggtggtagtggaatacactataggttgtacatagaatggtgtgagcttgtctcttagatttccctcactctttcagaacctcacatcttgctgttccggcgcccactacccaagaaaccaaagaaatgaagctggcaagctacttttcagcctcaagctttacacagctgtccttacttcctaacatctttctgataacattattatgttgccttcttgtttctcactttgatatttaaaagatgttcaatacactgtttgaatgtgctggtaactgctttgcttcttgagtagagccaccaccaccatagcccagccagatgagtgctctgtggacccacagcctaagctgagtgtgaccccagaagccacgatgtgctctgtatccagaacacacttggcagatggaggaagcatctgagtttgagaccatggctgttacagggatcatgtaaacttgctgtttttgttttttcctgccgggtgttgtatgtgtggtgacttgcggatttatgtttcagtgtactggaaactttccattttattcaagaaatctgttcatgttaaaagccttgattaaagaggaagtttttataatctagtgctgtaattgtacgggttttttccccctcactcagggtgagcatcatcaatatcatggttctaattatatgcccttcagtttgataatgaagctcagctctttgctgataatgaggtttaacattgagataactggtttttaatctactttaagcagacttgctgtcaaacatctactgaaatatatttcactctaactactagcctgaggtagaggttatatagggacaacttcatctcatccaaacaaatgaactgcttcctacagtcggggtgctgcctttaacatagtcccaatatttgaatggcacacatggataaaaggatgctgtcagtcaggggctgcttgtgtgtcccaattcctaataggaataataggcatatctatgacctattcactgtgccccttggttggggaaggttttcagct

SEQ ID NO: 56314 - DNA, 1095 bp, Homo sapiens
ttaagatgggcacagggtgggagggcttccagcggaccctgaaggaagtcgcctacatcctcctctgctgctggtgtatcaaggaactgctggattaatggtagcagggaactgcctcctctccccaccagcaccatggctggcatcgctcaggtgggcagggtagagtaaacaggaggcatagctgcagcttctgtggcagagcttgccttagcttctcattctcttctttagcccccagcccaattgccatcaagactcctgaagccagctgtgcttgaccaaggatgggccataaacaatgagtaaacagtaaagtgtggatcctgctttgagctgtgtcatctagcagacctgcctcatctctgagcctccttcattcccaacccctgcctctggtggacctctggtgggcaggagcttggactgctctggctaggaccccagtaagattgtggcaagacctggcactcctccaagcttggcacagtgagcccaccagctcagatggttgatcttaccataccctcatagtaccaagaatggactgccccctaagaaacctgtttgagaatcactgaattataaatataatccataggccttgaggcccaagattataagtgtctaaaggggaatcagaaaaagtcagcactagaacggtctgggagcaagggtgcagaccagggagggaaggagcttgtcctgaatagaaccaagattgaaagccaggttttctgactcactggttcctgagtggggagggtggaagacagttcaggttcctctcaatctgtgggtaaggaggggacccagcttgagtagggtcttcatctgtgaggccaagggtgtgtggaaacccagaggacccagccctttcccaaatagaagacctggtccaggcagcttcctgcctctgaggatcttggggaaagcactgcgctgaggctagtccccagctcatcaaggaagtaggaccccatgagctacaagagctcccagctcacatacaaagttaccagagaaagacacctgtgtggccacacaggtccctcaggcttatcatgacacagccctatcaggacataaacagct

SEQ ID NO: 56315 - DNA, 1051 bp, Homo sapiens
cacgggaccccctccctcaagaccctaagtccccaattcacccccacccagcctatccctaacctctcatacccttccctcctgaggtcctgaccctacagaagcccctcttgaaggagagggagcccctgtagggggtgctcgattccctggccgctgcggacactgccccctcccccctcctctccaggttccaggccagcccctcggctccgccccctccctggacgaacgcaaggcgagacctactggagatgagcgggtattcaggccaatgagcggacagggcggtggcgtgcagggggcgggcagagcagcagcaaagggctggatgggggccgggggcggagtttgagttaaggtggactgggagagataggggcaggagaaaggggggggagagagggaccgcggcaggtgaagggagacagagagaaggaaagaaggagggaaaggaggagggtgggaaaggctaggagagctaagtaagagtttggagaagggggcaaaaaaggagggagggacccatctgcgctctgcagggactggctggacgaaggggttgaagtttatgtccttattgggcggagggagggggcctgggggggcgggtgaaaaaccaggaagtgacagagggtgtttctaagtgttggggggggggagtttggggggtggcaggggcggggggagggaggggagggatggggggaaagcaagctggaggacaggtgagacagcaggacaggtgaggcgggccctgaggggggggcgggtgggagccaggtgaatgtacggctcttggcggccgagggggggcgggcggcaggaggaggcagagggcggcggaggaggagccccccagcagcgagcggcgagcaactgaccgcggccttctgaccaggaccggagcagggccccaagcccccgggcctggtgggggacgcgcttcttcccacactgtgagcctcagcagctccagccagcggacccgacggctgagaggtgagtgtaccccacttttgtctcctggctcggggttcactaggctcga

SEQ ID NO: 56316 - DNA, 1077 bp, Homo sapiens
tgtccccaactctccagctctccaattctcccaaacccccagtctccagccttccaatacccaattcttgaatactcttgtcttcgaaacttctgagctactcaaggccaaagcccccaaatttcctagatattctagttcagctgtccagagtactgaccactcaggtattaggaaatgtgtatagagcatgtcctaatgactcaggggctctcctggcatttaacaccaggaccagggcacgttctgcaatgtttgggaatagttctgcaaaaaatgccagtagtatccccattgggaaactgtaaatccagggtgacaactcccagctcaagttaacttggccccagggagagggaccccccaggctctgcctgtgcagattcctgaccagcaggtccttgaacatggcccgtaagggggctgtggagatgcgccaagctgcgcgggtgttgttgatctgcagctccacggtgcagcccagcgatgcgatcacgttgttgagattgtgtcgcagattggctactggccctggagaaagaggccctggttggtcacctccctgtataaccagcactttctcaaacccgctcagcttccctctgcaaatagtgcccatcgcctagaactatacagtggtggggccgagagcctatgaaaggtcaacttgttcaacctttgatttttttcactgtttttttttttttttttttgagacggagtctccctctgttgcccaggctggagtgcagtggctcgatctctgctcattgcaacctccgcctcccgggctcaagcgattctcctgcctcagcctcctgagcagctgggattacaggcacacgccaccatgtctggctaattttttggtatttttagtagagacggggtttcagcatgttggtcaggctggtgtcgaactcctgacttcgtgatccgcccgcttcggcctcccacagttctgggattacaggtgagccaccgtgcctggccttttttttttttttttttttttttttttttttgagacggagtcttgctctgtcacccaggctggagtgcaatggcgcaatctcg

SEQ ID NO: 56317 - DNA, 1066 bp, Homo sapiens
acacatactgtgtgtgcccggccctgtgctaggttgcaggggattaactatatagatgagaagatcaagaccctgccctctgggattccacagactctctggagaacaggcgcaggcaggagagcctgcataaagacaggtcattacaataccaataacaagtgataagagcttttgttgtccttggactctgaattctctatctctgtcacagaccaaagcttctgaatcacttggaggacctgttaaaaattcaggtttctcaccccccaatcttaaggtttctggctcattcattcaatccacaaatatttattgaacactgtcctgtgctgggcacttttccaggcacgggggatgcagtagaacaaaacttaccaaggccctgtccttgctcagcttgcgttctagtaagtctgggctggctgagcccaggaatcttcatttctaatcagaactgatacaggtcgtccttggaccacccactggaggcttttcctaagtcatgcttcgctgtgtttgtggtatggggggtggttcatgcagcattcagtactgtggggagcagccccttccagcccttcccacctgtgctggcttccccaggcagctcccaagaggtggggaagggagtcctgagaagactgaagactgggtagtatgtggactccccccatgcctggcacttgctcctcctggccaaaaaagggaggcacctagcacccactccctcattctttttttttttttttttttaatttttagaatttagagacagggtcttgctctgtcacccaggctgtagtgcggtggcataatagctcactacaggaacttgcggactctaaggatcctcccgcctcagcctcccaagtagctgggactacaggagtgcaccaccactcatggcctttatttatttatttatttatttatttatttatttatttatttattttttgagatggagtctcgctctgtctcccaggctggagtgcagtggcgcaatctcggctcactgcaagctccgcctcccgggttcacgccattctcctgcctcaacctc

SEQ ID NO: 56318 - DNA, 1044 bp, Homo sapiens
ccctttttcttcttcccttttattagttccttctttcctttttcattcactcagcacattgtgagcttccagcgcgcctttctttcagtaggccagacgctagctggggtcgtcgggggatccccagcggtgacgccattgaaaagggtgcgctctggcttccaaatagccaatagaatcccggggcctggggcatgaggtcatcagcggtgatgcccattggttcaggtctggaagtgaggaaggggtccccatagcaaccgacggtgcgtccgagtgcaacctggagagtaatgtttgcctgagctgctgtggcagcttgggtgggtgcttgggatggggtgaggaagctggggtggagctcagcttcccaggtcctgcagccctagcccaagcaagctcttatctctcttgagatcctttttcgttctcaaagtaatggtcagcaccacttaacgcagaaagattaggagtaggttggttattggcaacagcattggggtgcagagctgctgccaccaggaatgtcagtactgagatcctgtgttcatctgcatatcgtctgcatctcatttgcattctcttcatttaaggtcaaattgggcagacatctccacatccccagccctgtcgcctgtctgtttctggaatctatccctgagtggctctgtaatctgtccctcagttctccaccttcataccccacctctcccattctccagtgtctgttggggacggatggggcaaagccagcaacagaagaaaggataaggagtttgttctcccgctggatgtttggtgacagatggggagtactagtctatactgcttggccccggctgggtggagggtctccagggccaaatcacccacatgcctggcggggtgctggaactagggatgcctggttccagcaaggggcaggcctgcccacctgtctggtgccaaggcagcttccttcctccaattaaacactaatgaggtgtcattaacccttaccttgcctgccaaccctcaggttgaactcaaattcgtggtctcaca

SEQ ID NO: 56319 - DNA, 1021 bp, Homo sapiens
aaggcatgcgaggtgagcaggcaccggggcggggggctgcggttccagcagtggccaccagagggcgctgcgcagactcacccagcacgttgatcttcacattggggcccatggtgaactgggggagagtggggaccggcttctccccggagtgcgatgctgcggggtggggtgcgggtggggagagaggaggggagagtcagggccaggattccctccccttgctacggctggggagcaagcccccctcacctgtgccctccgcccccacccccaggaagccaggggagccccaaagcagggagctgaggatgggggcgcggctcggagcctattctactcactggaggcgcagcagacgaacaccttcatcctcagacacttccagtgcaggttgtgagtgggcgtggctggggaggagaccgggcctgagtcactttcgcccaatgtgtgcctgtgccctccctcgacggctctatttctcaccccctccaaactgtccccgtcgggcggtctccttcaggagctcccctaccctttggacacgggtcactttagctctgccgtcggccctagacgcccctttggtcccacccctcaagaaactgggatccctgatgttccaaccccggaatgtccctcacagaaacagcgattctccgcagcccaaacttgggactgtcaccaaactcctctcttggccccacgacctcgtctgagctgaacccctcaggcgtcccgtgcccacgcctcctccctggtctcagccgcgagacctggcgcccgccgcgccggccccgccccggagcctaggggctccaccccccggctgtcactcagactctcgcgttcagacccgcccgcccggccgccgtcactcacagatgtagtagtactcgtggccggcgtggaactcgtagcccagagagaaggcgctgtagcgctggaacttctccgagaacttgatggggctgtgcggggcgtgcggccggttgcactcccagcgcttgaagccctggct

SEQ ID NO: 56320 - DNA, 1853 bp, Homo sapiens
agggcacaggtgaggggggcttgctccccagccgtagcaaggggagggaatcctggccctgactctcccctcctctctccccacccgcaccccaccccgcagcatcgcactccggggagaagccggtccccactctcccccagttcaccatgggccccaatgtgaagatcaacgtgctgggtgagtctgcgcagcgccctctggtggccactgctggaaccgcagccccccgccccggtgcctgctcacctcgcatgccttccctgggggcactgatacttcctaccctgtgggtggtcacgtccctggctccattgctgctgccgcgtgcccctgccctggcgcgcaacccagccctcaccagtctgtctgttcctctgtccacagaagactttgagggagagaaccctcaggtgcccaagcttgagaagagcatcagcgggaccagccccaaacgggaacacctgcccctggccgtgggcatcgccttcttcctcatgacgttcttggcctcctagctctgccccctcccctggggggggagagatggggcggggcttggaaggagcagggagcctttggcctctccaagggaagcctagtgggcctagacccctcctcccatggctagaagtggggcctgcaccatacatctgtgtccgccccctctaccccttccccccacgtagggcactgtagtggaccaagcacggggacagccatgggtcccgggcggccttgtggctctggtaatgtttggtaccaaacttgggggccaaaaagggcagtgctcaggactccctggcccctggtacctttccctgactcctggtgccctctccctttgtccccccagagagacatatgcccccagagagagcaaatcgaagcgtgggaggcacccccattgctctcctccaggggcagaacatggggaggggactagatgggcaaggggcagcactgcctgctgcttccttcccctgtttacagcaataagcacgtcctcctcccccactcccacttccaggattgtggtttggattgaaaccaagtttacaagtagacacccctgggggggcgggcagtggacaaggatggcaaggggtgggcattggggtgccaggcaggcatgtacagactctatatctctatatataatgtacagacagacagagtcccttccctctttaaccccctgacctttcttgacttccccttcagcttcagaccccttccccaccaggctaggccccccacacctgggggaccccctggcccctcttttgtcttctgtgaagacaggacctatgcaacgcacagacacttttggagaccgtaaaacaacaacgccccctcccttccagccctgagccgggaaccatctcccaggaccttgccctgctcaccctatgtggtcccacctatcctcctgggcctttttcaagtgctttggctgtgactttcatactctgctcttagtctaaaaaaaataaactggagataaaaataactgagtgtgtgtgatttcaaggggccatcacccttctgttacactggttaaacctcacagggcacagggcctgagtaggagagggaattctggggccaaagagtcacaacgaggtgttcaaatcttgttctggggctcatcttcattacaaaggcagcgctgcttggaaagagcaagaggggcctccaggcagggcctggttgactttgggcaaatcactcaacctctctgattctcaggtatcccaccagaaaaactggttgtggtatctctctcttagggttggtgtagggattaaatgacgcagggagttaaaggctccatcaattatggtttccac

SEQ ID NO: 56321 - DNA, 1027 bp, Homo sapiens
aattacagcatggaaggggaagaaaaggtggaaaccataattgatggagcctttaactccctgcgtcatttaatccctacaccaaccctaagagagagataccacaaccagtttttctggtgggatacctgagaatcagagaggttgagtgatttgcccaaagtcaaccaggccctgcctggaggcccctcttgctctttccaagcagcgctgcctttgtaatgaagatgagccccagaacaagatttgaacacctcgttgtgactctttggccccagaattccctctcctactcaggccctgtgccctgtgaggtttaaccagtgtaacagaagggtgatggccccttgaaatcacacacactcagttatttttatctccagtttattttttttagactaagagcagagtatgaaagtcacagccaaagcacttgaaaaaggcccaggaggataggtgggaccacatagggtgagcagggcaaggtcctgggagatggttcccggctcagggctggaagggagggggcgttgttgttttacggtctccaaaagtgtctgtgcgttgcataggtcctgtcttcacagaagacaaaagaggggccagggggtcccccaggtgtggggggcctagcctggtggggaaggggtctgaagctgaaggggaagtcaagaaaggtcagggggttaaagagggaagggactctgtctgtctgtacattatatatagagatatagagtctgtacatgcctgcctggcaccccaatgcccaccccttgccatccttgtccactgcccgcccccccaggggtgtctacttgtaaacttggtttcaatccaaaccacaatcctggaagtgggagtgggggaggaggacgtgcttattgctgtaaacaggggaaggaagcagcaggcagtgctgccccttgcccatctagtcccctccccatgttctgcccctggaggagagcaatgggggtgcctcccacgcttcgatttgctctctctgggggcatatgtctctctg

SEQ ID NO: 56322 - DNA, 1172 bp, Homo sapiens
ttttgggccggcgccgcccgacaccccgccccgccctcgccccgcccggcgcgcggctgcctgggggcttgggggctggggaggtggaggaggggcggggtggggaggcgaggaggctgggggtgcaggaaagagcgaagcgcgctcctctgcccccgcagatctgctcagagatgtgtgttcgctcacttgtgggtctgcgtggagctttgtgagcctgtcccggtggtgggcttgcgtccctgggcgcagtcgcgtgcgggagaagggaagaactcgcaagtgcgagtctgcgaacgcgggggtgcgggacacggctttgctgctccgcgcgcggaccttgcagggtgcgaggttgttgacatgccccgcacctttctgagcctcgcatgcccaggctcgggcgcccgcgttcccacactctcctcctcccccatccccttcccggactctgcgcttgactgcccctccccacacacacgcggctgtttgtttttgttgggtttgtcaatgttgtctttgttctggagattgtgtcatcgcctagatgccgggaataaagtgcaacgctttgtgtgatcgagtgtgtaacgtgtgcggccggggctaaggacgcctctgtccatcacatcagtgcctgcccgcaggagcgacacgcgggaccctgggctcgagagggggccgttcttattttagataagtcaaagagcgctaataacctgagtatatgtaacaacacacgcgtacaccgtgcgaacaggctcttgaatatggactgtgagaatctgggcatgaagggtgacaaactgtaaccacacatgaaatacgtgtgatggcgcgctagcatgaaagcatttgtgagtagtatcacagccgcgtgtgtggaagcgtgtgaaactctttgacagacgtatgctaatgtttgtgaacagcgtgtgaagaggaggggagacgcgtaccggcgtgcagcgggggtggggtggaacggaggggcgtttgtgcgcagtcctcaggctgcacagctggagctggcccagtctgagctggggctcccagtcagtcgggccccagtacccggctcaggccccctcccccgcgctgtgtaaacaaacccactggaatttgcctctcggggctcttctccccgcctggatctgctgccgtctggagag

SEQ ID NO: 56323 - DNA, 1021 bp, Homo sapiens
aaggggatgggggaggaggagagtgtgggaacgcgggcgcccgagcctgggcatgcgaggctcagaaaggtgcggggcatgtcaacaacctcgcaccctgcaaggtccgcgcgcggagcagcaaagccgtgtcccgcacccccgcgttcgcagactcgcacttgcgagttcttcccttctcccgcacgcgactgcgcccagggacgcaagcccaccaccgggacaggctcacaaagctccacgcagacccacaagtgagcgaacacacatctctgagcagatctgcgggggcagaggagcgcgcttcgctctttcctgcacccccagcctcctcgcctccccaccccgcccctcctccacctccccagcccccaagcccccaggcagccgcgcgccgggcggggcgagggcggggcggggtgtcgggcggcgccggcccaaaaggcggagtcgctaggcgaaggggccagatctgtgagcccagcgctgactgcgccgcggagaaagccagtgggaacccagacccataggagacccgcgtccccgctcggcctggccaggccccgcgctatggagttcctctgggcccctctcttgggtctgtgctgcagtctggccgctgctgatcgccacaccgtcttctggaacagttcaaatcccaagtaagcctcgagactcccgctggcagcctgggctcccggctggcactaccccaccgggataactgtcccggccaaaccctgagctgagcctagagtagatgaccgaggtaggagggcggctgtagattttcctcccctcacttctccgtcatatctgggagcaccccaccccggggcatgcttgtgtctacttgcatgggcttatatctgcccttcccttccttctctctggcacccctattactctaaagtgagggactcatgctgggcagttcctgccttcagcatagacttcgcccctggcagccagggcccttgttccaggccccccacccccccactgtgaaagcctccacgcc

SEQ ID NO: 56324 - DNA, 1338 bp, Homo sapiens
tttgtttggaggtccaccgccgaaggcgcacaggcctgtgggaacacgagcgttgagactgggggcgtctagatgatccaaggggtaggcagagtgtgagcagcggcaggtatcggggacacacccgcggagccctaggaaggggactgaccgggacatggaagaggtctggaccagggtactgggaaggcgctcggaggagaggggcgcgagttccggttcggcgtcggagggagggtggggcttcggcgcagtttccggagggacggcccgagcgtgcgggggcggagccgagtgcgcggggcggggctccagagccgcaggtctgggctgcagtaggtcccggcaaccgcaggctcgcggcgggcgctgggcgcgggatccgactctagtcgtaatggaggcgggcggctttctggactcgctcatttacggagcatgcgtggtcttcacccttggcatgttctccgccggcctgtgagagtgcggccgggctgggttggggaggactaggcagtcaggaaaggagagagaggggacagagacgtggccacagcacctggctcgtccggaaccgggatcaaagtgggatcgggtcgaggggaccggggtacaagggcgaggctggtcactaggcctgaaggagaaggcaggatagctggcgggggggagagggggcggggtctgcggtggtccggaaaggatgacaggcattgggcatccccctctagcactctgcttctcccttcccacccccacccctcccttcggggccccattacagctcggacctcaggcacatgcgaatgacccggagtgtggacaacgtccagttcctgccctttctcaccacggaagtcaagtgaggggccgacggctgcggtagtgggaaaggctaccagagggaggtgggggcggggcaggaggagcaagagtgaaagaggtttggccgggcgcggtggctcacgcctgtaatccctgcactttgggaggccgagacgggcggatcacgaggtcaggagatccagaccatcctggctaacacggtgaaaccccgtctctactaaaaatacaaaaaattagccgggcgtggtgccgggcgcctgtagtcccagctactcgggaggctgaggcaggagaatggcgtgaacccaggaggcggagcttgcagtgagccgagatcgtgccaccgcactccagcctgggcgacagagcgagactacgtctcaaaaaaaaaaaaagagtgaaagaccctttgggtcctcctctcacactgaaccctttgagccatgtccatcccctccaccctgcagcaacctgggctggctgagttatggg

SEQ ID NO: 56325 - DNA, 1050 bp, Homo sapiens
tggggtagaggtaagtgtaggttgaaggctgaatggggagggcgagagatggggagtgggtctcaaatatagagggggtagcaaggtggaaggggcccttccaccttttgtgggcactcaagttcggacctctgggatcggcgattcccctctggccagggctggttttaatgctctccgtgggcgggcttcggttgagtttggtccgcttttcctttctgctcctcaggggagcattgcttccttctctcgcagtgaccatgacgaaattagcgcagtggctttggggactagcgatcctgggctccacctgggtggccctgaccacgggagccttgggcctggagctgcccttgtcctgccaggaagtcctgtggccactgcccgcctacttgctggtgtccgccggctgctatgccctgggcactgtgggctatcgtgtggccacttttcatgactgcgaggacgccgcacgcgagctgcagagccagatacaggaggcccgagccgacttagcccgcagggggctgcgcttctgacagcctaaccccattcctgtgcggacagcccttcctcccatttcccattaaagagccagtttattttctaacttcgtttagtttgagtatggaaaacgggtattggggattctatgtactaacggtcgagaagtgaatgtgaaagaaccaccttcttgaggccatctcagcctttatctttgcatcttgctggtgttcccatttttgctcccaaggaggcaaagaccccttctcaatatttctcaggatggaaatgacatttcactttcctggtcctttcaaccctgtaggaagtacttctttttttttttttttgagacggagccttgctctgtcgtccaggctggagtgcagtggcgtgatctcggctcactgcaagctccgcctcccgggttcacgccattctcctgcctcagcctcctgagtagctgggactacaggcgcctgccaccacgcctggctaattttttgtatttttagtagagtcggggtttcaccgtgttggccagga

SEQ ID NO: 56326 - DNA, 1324 bp, Homo sapiens
gcccaggctggagtgcagtggtgcgatcacagttcactgcaactttgaacttcctggctcaagggttcctccaacttcagcctcctgaatagctgggactacaggcatgtgtaccactgtactacctggctaaattttttttaattcaattttttttttttttaagagatgggtctcactttgttgttcaggctggtctcaaactcctgggctcaagtgatctgcccacctcagcctcccgaagtgctgggattccaggtgcaagccaccacactcaacctcctacctccatgttctgggtatcattaaggtaatcagaatcctcctgctgtagtcacgcttacccttctaagcaggttccccaggattcagagagccccggatttctcctggactccatgtgcagatgcctagtatttccattctgaccgttgccctccttgttcttcttgcctccctagttctcctgtgcctcctgttggctctctttgcatctggcctcatccaccgagtctgtgtcaccacctggtatgttcttgacagctgggtaaggggtgtagcattccgttttttggcattggatcttactgtgatggtgccagagtttttccttccacacctacctctctctctgttctccctccccgttttcctaaacttgaacttggattctttccttgatgctagtgtcttccctaggaggcaccaggctggcagatgcccactggtgccatgacctttctgtcttcaccatatagcttcatcttctccatggttggtctgtactacatcaacaagatctcctccaccctgtaccaggcagcagctccagtcctcacaccagccaaggtcacaggcaagagcaagaagagaaactgaccctgaatgttcaataaagttgattctttgtagctctgtgagttgtgatatgttgtgggtgtcatctaccagtatccagcttagatgtacagaatgttaagacatttgggcaccttctgttttcagaccttgggaatagtgaggctttccttcctcccacattaatttttaccagttatctgttgaatactgtcagtgccactggagtggcatatacttgtgtgagtctcatcatggaagaaaagtacatgaatgttctgcagtcgtgttctttggggaaaggggtaaaggctgcaatgcaggaagtcctgtccgtcagtaccagaagggatcttggagcaaaagagtaaaggaaggaaaggtcccgtatacctacactgtttcacggggttccacgtggtatctttgccactccagctccctgccttaagcaaatcagccccct

SEQ ID NO: 56327 - DNA, 1681 bp, Homo sapiens
ggggaatatggaaaggtatttgacgggggagccatttcttacattctcatttttcattggctcctaattttactcatataaagcgggggattagtttcggaggaaaatgagttcctggttgggagcactaaattttaggttgggagatgttgaggcatggggcagggaggtttgaggaacgtgcactagagatgaaagaaatggcaaagaagacagagatgggatagatgccacaggcatgggcccaatgacttaaagagataagtgcaccttgtacagagtggcagcagacgcaccaggtacgaggaaagcctgaggaccagggcggtggccgaggatgccccctcgacgcattatttcctccctgtcgcaagagggcgctgcgtccaggcactgagaggaagaaagaggagaacgcgaggagtagcaagtccgcggtaagcgctgacgcatgcgcatagctaaccgcacccggttcagctcgcctttcttggccagaggcgccggttggactcacgggcggggcatgatgggtaacaggaccggtggggtccccaggaagtcctagagggggtcggggtttgggtggacaagctttcctcgtcctctcccgacagagctgacgtgtcctgggttccaccgggagcgggcatttccaccggacgggagggttcggggtgtccggggctggggaatacgtaggggttgccgcgcggtgtggggagttggggcgtgtggctgcagtcccgggagttcttggagggggtcggcccaccgagcttccggaccggctgatctgcccgtagcttgccggagggagggcggagcctgactctccgtcccttctcccatcccctccagtggtgggtacgggcacctcgctggcgctctcctccctcctgtccctgctgctctttgctgggatgcagatgtacagccgtcagctggcctccaccgagtggctcaccatccagggcggcctgcttggttcgggtctcttcgtgttctcgctcactgtatcctccctgcagttggagggggcgggccacgtaggcatgtgcccttccccttccccacacagctctgtccccgttgcacaccctactccttaactccctcaaccaggccttcaataatctggagaatcttgtctttggcaaaggattccaagcaaagatcttccctgagagtaagtgaatattggagcttgagtatttgaactttctcctctttaacctcctgaaacatgatattgaatttccagatgcttaggtgaaaggttgttaaggagaaatatatttactgaagctgtctgaagacagatgacgcttttcgattctgcaccttgtatagctcctggagttggagctggaagagaaggcctttgaaagcaagaaactttggtaccttctggccagctcccagggaaggtttgaggggaacaggcaaatttgggctgatgttttgcatctattcgctgggaggcggtccttgttcccaccagaagaagcagcaggaccaagttcactatggagttctgatgtgaagttaactcaatattagagaattctacttatttgagggaattgtgaagagcctaaatactagaggcaccaaatatctatggcagcaggaatcctgaccaaatcagaataactgttagattatttcctgtttggaa

SEQ ID NO: 56328 - DNA, 1027 bp, Homo sapiens
atgtgccaagtctcccttggggacccagctgagtctgggtgttcccattgggttgggccaggcaaggcctctggtgcccgctgccgtccccctgcagtgggctctgctaggcctgtgctgagcaacagctgttattgtcatggtttataaacaataaactgtgatgccaggcacatctctgccttccctgagcgcaatcattcctgtgagtttctgtgctgggtgtggtaggcgggagggagcagggtgctaggctgtggttctaggcaggagcaaccaatggatctggtgcctgagagaggaaggccccaggccaggtgctctaagcctcctgccacacgtgtcctggcccggcctgagcgcatcacagctgccaggggacatagctctctggctgctggtggcaggccccaatcagggcttccaggcctgcagcacaggccctgggggaatgcggtcaagggacaggcaacgtgcctgggcccaaaggggtcagggaaccagaaccacttccccattcccagggtgttgtggagcccaccccaggggcagcaggctggtggggcagccggggtcagggagggggctgggcctggtgccagcgcccggatctgacccagcctctgcttatctcaaccctgttgactctgggctgttatcactgcccaaggatttacttcacacccggacagctaagaatagagccacctggggggcaccatgccagggggcaaggagggcgtgggccaggcgaggagaggggagagccactggcacacagagctcagtcacggagcccagtcacgctagccctccaaagcccgcctgggtttcgtttcctccttcctcttgtgctgccagggttagccagaggtggctcctcaggccacccctactccccaatgtcacctcctcctcacatctcctgcttctcaaacaaactcgctccttactgcctcctggcctccctgtctcctcccccagccccctcacacacattctgaccgccctgctgcccacgggtcac

SEQ ID NO: 56329 - DNA, 1091 bp, Homo sapiens
gctgggggggcggtggagcccggggccggcctggtgtccggggccgaggtgacaccgtgggctgggggggcggtggagcccggggccggcctggtgtccggggccgaggtgacaccgtgggctgggggggcggtggagcccggggccggcctggtgtccggggccgaggtgacaccgtgggctgggggggcggtggagcccggggccggcctggtgtccggggccgaggtgacaccgtgggctgggggggcggtggagcccggggccggcctggtgtccggggccgaggtgacaccgtgggctgggggggcggtggagcccggggccggcctggtgtccggggccgaggtgacaccgtgggtggagcccggggccggcctggtgtccggggccgaggtgacaccgtgggcttggggggcggtggagcccggggccggcctggtgtccggggccgaggtgacaccgtgggctgggggggcggtggagcccggggctggcttgttgtccggggctgaggtgacatcgtgggctggcggggtggtggagcccagggctggcctggtgactgggaccgaggtgacatcctgtccccaggtggcagctgaacctgaagctggttccgtggccggggccagagtgacatcctgtccctgagtggtggaggagcctgaaccggggctgtggctggagagtacgctgctggtcatactcacagcattcttctcagtagagctgggcactgaacttctctgggtagccgaagtctccttttctccacctggggtagagcttgcatgaccagaacccgtaacaactgttgcgggtttaggggctgtggtagctgtaagaagttaaagtcatagggttgggtctttatgaaggaaaaataagagcaagaagaaaatataagctctggccaccagagaaataataccaggaggactggggagtgggcagcctcagtaacccctgggttggccgcctccttccctgcagcagcctccttctctctgcccataggccttggctcatggcccctgcatttcttcccctcttaagccttccctctccctactctcttccccctagac

SEQ ID NO: 56330 - DNA, 1021 bp, Homo sapiens
aggggccccaggcctgagaaaagcaccccccttccctctccttcctgcctccctttccctccctcccttctctctcaggcctggtgagctcaaggggggctggggaaaagcaaggccccaggcatggtggcacagtgcccactggcaccctagcaccaatggatactcctatcctggaatcctggacagggtgaagctctatgagggaccccagcttgtggcggattctggggtgatcattgacacatccatgcgaggggggcgtcttggtgtattctgcttctcccaagaaaacataatttggtccaatctccagtatcgatgcaatggtgaggtggctgattgagatcaacctaatccttcatgccttgtgggagagccacatcctctgaccttacttatttccccttcttcagacacagtgcctgaggactttgagccattccggaggcagctgctccagggaagggtgtgaggaggaggccaccagattcagaattcagaattttagaccctttggccttggggtccatcctggagaccctgaggtctaagctacagcccctcagccaaccacagacccttctctggctcccaaaaggagttcagtcccagaggggtggtcaccccacccttcaggggatgagaagttttcaaggggtattactcaggcactaaccccaggaaagatgacagcacattgccataaagttttggttgttttctaagccagtgcaactgcttattttagggattttccgggatagggtggggaagtggaaggaatcggcgagtagaagagaaagcctgggagggtggaagttagggatctaggggaagtttggctgatttggggatgcgggtgggggaggtgctggatggagttaagtgaaggatagggtgcctgagggaggatgcccgaagtcctcccagacccacttactcacggtggcagcggcgacactccagtctatcaaagatccgccgggatggagagccaggagggcgggggctgccccgc

SEQ ID NO: 56331 - DNA, 1105 bp, Homo sapiens
cagagcaagactccgtctcagaaagacaaaaaaaagaaagaccttgcgtctcttgaccaagaccttacctgtcttcattagtatcacagacatcccccaccaggtcgctgtctgcatctgtctgagagagagggacctgttctcaccatctcctcttgataactctgaagagggtgatctgaccactttccatccaaagggctggggcttcatccatcagtaccctcatccctcccctgtccttaccatctccctgtacctgggtaggattgctcatttcagggcagctgtcgcaagcatctcccaccccgtcctcatccctgtctgtctgtagtgggttggggactttagggcaattgtccaatccattggggatgcctagaagacatgggtagcacaaggttgttactagaacatgccatattctctcttctaggttggtgaaagtcccgaactttgtctccccacccagaggacaactggccaggaaatctgcctgtttcttgtctcaccctctagtccacactctgcctaacactacgccctacctcacattcctattgacatctgctgcaggtaatctctcctcacccaggccaacgtccacaagcctgcctccctatttcacagagacttcctagcttccctgcttcatccccacctgatccaaattctcacaggtcccccagccaccccttcagccccaggcctgcaccatccccatccacgtcgttgtcacaggcatctccttccccattgccatctgtgtccttctggtcattgttgggaacgttggggcaattgtcacaggcatcaccaaatgaatctgtatctgagttctgctggtctttgttggggaacagccggcagttgtcctgggcagaggggtgggaggggaagggtcaggtctcccctaaatcacttgtcatcttgcacctaccttgtctctgtatccttttctaagatcacacccttgtgatggacaaactgctcagtacagtcccacccacccagcctccttgtcctgggcacgaggtttttgcctccctgatttggagtatttggcccttactagagagctgccagatgaggtaagtgaggcaca

SEQ ID NO: 56332 - DNA, 1009 bp, Homo sapiens
gaacgcaatggtgcagtgtcctgccaggtgagctaggcttcaggcgtggaaggaaaagggagggtctggggaaaggagtagggctatgtttagggcctgggttgggggtcttcataggagagaggtgggcctgggcccaggaactgtttggtggggagaataggacctgaagcagggaaaatatagggaggaggggagccagaccaaactgctagctcctaccctttgtgttgccctagtgtaacgtgggctgggctgggaatgggaacgtgtgtgggactgacacagacatcgatggctacccagaccaagcactgccctgcatggacaacaacaaacactgcaaacaggtgcagggagcaggcgggcaagggggcgtagtggggagcccaagctgggtcaggccagaactcatccatcctcttcccctgaactttaggacaactgccttttgacacccaactctgggcaggaagatgctgataatgatggtgtgggggaccagtgtgatgatgatgctgatggggatgggatcaagaatgttgaggtgactcccagactgccctgccccttgaagctcctctcccctcctcctgtcctctctgtgcctcacttacctcatctggcagctctctagtaagggccaaatactccaaatcagggaggcaaaaacctcgtgcccaggacaaggaggctgggtgggtgggactgtactgagcagtttgtccatcacaagggtgtgatcttagaaaaggatacagagacaaggtaggtgcaagatgacaagtgatttaggggagacctgacccttcccctcccacccctctgcccaggacaactgccggctgttccccaacaaagaccagcagaactcagatacagattcatttggtgatgcctgtgacaattgccccaacgttcccaacaatgaccagaaggacacagatggcaatggggaaggagatgcctgtgacaacgacgtggatggggatggtgcaggcctggggct

SEQ ID NO: 56333 - DNA, 2014 bp, Homo sapiens
gtttggtctaacaaacaatagcctcagtaaatgctgttaagtgaggaggaagaggagaagggggctgaggagaaggcaggaattccaagctagagtaggtccctgagacagtccagcctagtaaacctccgaatggagaaaaaaaatgcccaaagagaaaggatctccgcaaggtcacacagccagtgaatggatgagcaaggactagaacccatcacctgaactcccaaccaggcgtcttttcattgctgcattaagcctagaaaactacagcatagggcactgaggccatatcggccacgtacgctctttgactgcctcagtttcccccactgcgcccgtgctgagtagccctggcaaggtttggatgcttggctagttcggccccctccccagtcatcagggcacagcagagggcgccggcgccacccctcaccagcacggccaggctgtccaggtccactgacggcagcccccagccccctgaccagcagaacagctccatgggcgccgccatcttgcccaccctctgtcccggaaacacttccttgtgtgcttctgccctcccctgcctgggcccgccccccgccaccgcccctccgatcgttgcggtcagggggcctggggagatccccggggaggcgaggcttcttctggcccgactggcagctgaactgcgggggactgggccgcgggcctcgggggagggcggccgccggcccatccagaggtggcccacgtagcgggacagcgctgtcggcccggcgcgcctcggagtgtcacggcgcctcgtccaagtggagccccgaacccctgaaggcgcggcaggctctggagagcggggtcttgtgcgcctgggccaggtctgggggctcttgccaaactgcacgtggcctgtactgctccagggccccttggggctcgtccccgagcggggactgcgggggggtcccccgagcagcatgttttccacagcgcgttatgtttggagcgggccctgcgccgcctgtcgccatggaaacaaaacaggggcggtggcggcggccggagcggaggccgggctggggcttgggtgggggaggggaagagaggctcgcaggctgtcgcttaggtgacgggaactcaggcgcccctctgcttcatccgggtcacggcccgtccgctagtacccacagtgttccacagtctggtccttggctcctcgcctgtacccctggtcttctgcgcctgtccctggtgtccctttcctcttttttggtttcttcactctgacctcactgaccactgctttagattctcccttcagttcccgtcagacgcttccagactcccaagctttcctacgaatgagggaaaatggagaaacaggcacttgtcaggggaccccccaccctaataaagagcacttgctccgccagaacagcaaaattcatgccatgtgggcatccctgggcactatagcaagctagttgcggccactcccttggcatcctttcctgccagctgtggaataatgcccactgtctagcactgcccctgccaggggttcttgccttccacaatcgtggcttccagaaaacagtggcattcggtagcgctgtgtgccgagacccccaacaatgatgactgcggagagggaggcacctgggggaggatcattagggagaggtagaaagcagggaggcctccaggattctttcccagtgcccctggttcccagagctgatgatgcctccagggtgattggcagctctttgtttcagccccccctcacccgcctgctggccccccctccaattctgtccctccgccccccggctcctgctctctccgcctagccttttcccctcccagctgcctgcctgccaggggtagtgagccggctgagaggcatggagacgcaggaacttcggggggccctggctcttctcctcctttgctttttcacatctgccagtcaggatctgcagggtaagcctgtctccatcctcttagaccgctctctgcttcttcc

SEQ ID NO: 56334 - DNA, 1982 bp, Homo sapiens
ccagccggggaggggacgggaacacacagacccacacagagactcaggagagcatggaggtcagaagcccaccttgaatcagacaggtgcactggctcagacctgcctgtttcttcctgcccacccaatccaggtacatactttttggatagacaccaagaactacgtagaagtgacccggaagtggtatgcagaggctatgccctttcccctcaacttcttcctgcctggccgcatgcagcggcagtacatggaacggctacagctgctgactggggagcacaggcctgaggacgaggaagagctggagaaggaggtagctctgagaccgggggctattgtatgagatgagccccaaggatgctggccaggaatgggagtgcttaggtgcggaggtggcactgttcccgcagctgcaagcctacctgtgtcgcccctacagctgtaccgagaggctcgggagtgtctgaccctgctctctcagcgcctgggctctcaaaagttcttctttggagatgcgtgagtctgactccaagagggtaatgggtggcttggaagaagatacaggttcagatggagcagctggagctggggctggggctggggctggctcaggctctggataggaggtccctgagacagatactggccctggtgacagtggggctgtgcgtggggccagagccttctcagaggtacaaaagggtagggtgggagggcagccaggcacaggaagggcctgaagagctgtggggcactgagtgtgccctttatgcagccctgggatagagccctattcagggccaggctggcgccacctggggatctctccccataccaggtctagaactgtgtgtcctgtccttccctggtggccgcctgctgcccagagcccacctcccaaggctgactcttcctccagctccatctttaccccttctaccccagtggttctcctccatcccacccttctctctctgctccagccctgcctccttggacgccttcgtcttcagctacttggccctgctgctgcaggcaaagctgcccagtgggaagctgcaggtccacctgcgtgggctgcacaacctctgtgcctattgtacccacattctcagtctctacttcccctgggatggaggtaaggggcagatgggaggggcagccctggggagagtgggcagggatccaagaactagttctcctaacacaccttccttccttgaccctcagctgaggtaccaccgcaacgccagacaccagcaggcccagagactgaggaggagccataccggcgccggaaccagatcctatctgtgctggcaggactggcagccatggtgggctacgccttgctcagcggcattgtctccatccagcgggcaacgcctgctcgggccccaggcacccggaccctgggcatggctgaggaggatgaagaggaatgatttgtcctcacgctcccaagactggtttttctactctcatgcattccagaggcccccgtgcctcctcgttgttggtacagccggacacggggtgctgccacccagaataaagccactcacactgactgggctcaaacattttctcctttaagagctgccatttttcctggctggtgccataggaatcatctgggtgcctgggcacacccgctgctgctttaaggcttccgccctgatgctgacactgctgctccacgggcccagttctgcatctccaggaaagacaaacagtctccagttttgggcccagctttcctagtctcttcttttccttaccctcagccctgatcttgtgtttgtacggacagtgagctcaccctaggcctggacccaggcccagtttccaaagcaagcagcacacagcgcatgttcacataagcatgggggctggggggacactggggcttactgatctttttctaggggcctccagcccctggcaccacctagaggggaaagtgagtcacccaaacc

SEQ ID NO: 56335 - DNA, 1630 bp, Homo sapiens
cagcctgggaggctgagcgagactccatctcgaaacaaaacaaaacaaaactatctaggctgggggtggtggttcatgtatgtatgtgtatatacatatatatgtgtttatatgtatatatatatacacacacacacatacatacacacacatacacacacaaattagctgggtgtggcacccgtgtagtcccagctactcaggaggctaatgtgggaggatcagttgaccctaggaagtcaaggctgcagtgagtcgtgattgcgccactgtactccagcccgagtgacagagtgacatcctgtctcaaaaacaaaaaaaaatctccccaaacctctctagttgcattcttcccgtcacccaactccaggattcctacaacaggaactagaagttccagaagcctgtgtgcaaggtccaggatcagttgctcttcctttgcaggtactgacagacccagaagcagctaaatatgttcatggcattgctgtacattggtacctggactttctggctccagccaaagccaccctaggggagacacaccgcctgttccccaacaccatgctctttgcctcagaggcctgtgtgggctccaagttctgggagcagagtgtgcggctaggctcctgggatcgagggatgcagtacagccacagcatcatcacggtaagccaccccagtctcccttcctgcaaagcagacctcagacctcttactagtttcaccaaagactgacagaagcccttcctgtccagctttccccagctagcctgcccttttgagcaactctggggaaccatgattccctatcttccctttccttcacaggtctgcacacctcattgccccttttgcaactactgaggcacttgcagctgcctcagacttctcagctccccttgagatgcctggatcttcacacccccaactccttagctactaaggaatgtgcccctcacagggctgacctacccacagctgcctctcccacatgtgacccttacctacactctctggggacccccagtgttgcgcctttgtctctttgcctttgtccttaccctagaacctcctgtaccatgtggtcggctggaccgactggaaccttgccctgaaccccgaaggaggacccaattgggtgcgtaactttgtcgacagtcccatcattgtagacatcaccaaggacacgttttacaaacagcccatgttctaccaccttggccacttcaggtgagtggagggcgggcacccccattccataccaggcctatcatctcctacatcggatggcttacatcactctacaccacgagggagcaggaaggtgttcagggtggaacctcggaagaggcacacccatccccttttgcaccatggaggcaggaagtgactaggtagcaacagaaaaccccaatgcctgaggctggactgcgatgcagaaaagcagggtcagtgcccagcagcatggctccaggcctagagagccagggcagagcctctgcaggagttatggggtgggtccgtgggtgggtgacttcttagatgagggtttcatgggaggtaccccgagggactctgaccatctgttcccacattcagcaagttcattcctgagggctcccagaga

SEQ ID NO: 56336 - DNA, 1026 bp, Homo sapiens
cttgggcctgtcaatcttgcccactccatcaggcttcctgttctctcggtctggcccactttctttttatttttcttcttttttttttttttgagaaggagtctctctctctgtcacccaggctggagtgctgtggcgccatcttcactcactgtaacctctgcctcctgagttcaagcaattctcctgcctcagccttccaagtagctgggattataggcgcctgccaccaggcccagctgatttttctatttttagtagagacggggtttcgccaggctgttctcgaactcctgaactcaagtgatccacctgcctcggcttcccaaagtgctgggattacaggtgtgagccaccacacccagctggtctggtccactttcttggccggatcattcatgacctttctcttgccaggttcctggatgcctatgctgagcacaagttacagttctgggcagtgacagctgaaaatgagccttctgctgggctgttgagtggataccccttccagtgcctgggcttcacccctgaacatcagcgagacttcattgcccgtgacctaggtcctaccctcgccaacagtactcaccacaatgtccgcctactcatgctggatgaccaacgcttgctgctgccccactgggcaaaggtggtaaggcctggacctccatggtgctccagtgaccttcaaatccagcatccaaatgactggctcccaaacttagagcgatttctctacccaactatggattcctagagcaccattcccctggacctccagggtgccatggatcccacagttgtcgcttgaaacctttctaggggctgggcgaggtggctcactcatgcaaacccagcactttgggaagccgaggcgggtgatcacctgaggtcaggagtttaagaccaccctggccaacgtgttgaaaccctgtgtctactaaaatacaaaaaaaaaaaattatctgggcatgatggtgggtgtctgtaatcccagctactcaggaggctgagaagggagaa

SEQ ID NO: 56337 - DNA, 1640 bp, Homo sapiens
gtgagatcatgggtccccaggggcgtgggtggaacattcaggagcaactggcacaggtcaggctgctgggttgttctcagctaatggacctctggggtgtgtgtttctgtgtgtgagtgtgtgtgctgggcagcaggctgctgagtggtagtgatgctgttaggctggggtggggaaccagtggctggaatgggcggtaatgtctttgtcctctacttgcagatccactccttataccgccgcacaggtgccagctttcagaaggcccagcaagaatttgctgctggtgtcttctccaaccctgcggtgcgaaccgcagctgccaatgcagccgctggggctgctgaaaatgccttccgggccccgtgacccctgactgggatgccctggccctgctacttgagggagctgacttagctcccgtccctaaggtctctgggacttggagagacatcactaactgatggctcctccgtagtgctcccaatcctatggccatgactgctgaacctgacaggcgtgtggggagttcactgtgacctagtccccccatcaggccacactgctgccacctctcacacgccccaacccagcttccctctgctgtgccacggctgttgcttcggttatttaaataaaaagaaagtggaactggaactgacatccccgtttcctgaatcttcattgggaattaggccttatgaaagagaaaggagagtgtggagtgaggtgggaaggtcggacccggctttagtgtaaactgggagatatgaggggcggggcggtggagcccgagtggctggcgcaggaaggaggtgggaagtccacggaaacgcgaaacccggagacgccagggagccctgctccccacccctctccattaatgacggggaagagccaccgcctctgccgggaacgccaaggaatacgcgggcctggagcctgaaaagctggatggggctcaagtggaggcccaaaggatcactagcagcctagccagggtccagagcgaggcagggactggaggagcgcttatccgactgcctcgccctgccgcgggatcccccaaccccgacagggtctcagtcccgaactacaactcccggggtgcaccgcgccggccctcgccgccatgcccctccttcccgcaccatccccattcccatcccccttctctagtccccgacctgcggcagccggagctcggggagcggagcgtggtggggaggggagcgggacaggcgacacaggagacagcggcgccgcggcctctccccaccaggcggccccggatcctactggacgccctgagggcacaccgaccgcgcctctagagtcaccccacgccgacccctcccctcttctctagacttatttccatccttcccgcttttaccctccccacccctccctgggctccaggccgccgccccctcctcactcctggaccggcccttctcggtgcccctcttccctagggagatgcgatgagccggtgcccccgcgtcctcatcgtcgccccgggcacggtgcccgtccagtgcccgtggtggggagggagcactccgcggtccctccgtgacgcccctcgcttggccccccccacagctggcgtccctcggccatgccccaggggaccc

SEQ ID NO: 56338 - DNA, 1340 bp, Homo sapiens
gaggtaggagaatgggcgtgaacccaggaggcagagcttgcagtgagccgagatcctgccactgcactccagcctgggcgacagagcgagattccatctcaaaaaaaaaaaaagaaaaaaaaaaattagctgggcgtggtggcgggcgcctgtagtcccagctactctggaggctgaggcaggagaatggcgtgaaccggggaggcggagcttgcagtaagctgagattgcgccactgcactccagcctgcgcgacagagccagactccgtctcaaaaaaaaaaatgtctttgcaaggggatcacacattattgacatttgctttctccatctcccctgttgaggattccatgaaggcagcagctgccttcatttccttactctgccatgtttggtgaatattataggatgagcatagatgggaaggagccttcattgcagtccagaagggctcctcatcctgtccctctgccccttaggcagcacgctggctcttctcctgaacttcctcgcctgcctggccagcttctgtgtggaaaccaacaatggcgcaggctttgggctttctatcctctgggtcctccttttcactccctgctcctttgtctgctggtaccgccccatgtataaggctttccggtaagtgtgttagtggtgggagagtgatggagacctgggatgggccccacgtctgcccatccttcagctctaattcttctcccaccctccccatttttttcctctttgtaggagtgacagttcattcaatttcttcgttttcttcttcattttcttcgtccaggatgtgctctttgtcctccaggccattggtatcccaggttggggattcaggtttgtgaggctgttatccaccctcacctttccctctagatccagccagcactgggtgctgggataggagttgttcagaaaaaggaaatgtggttttaatccttgggaggtactagtttaatgagatacaagacatacttccaggatagagcgcagacagcactcttgacacatatagattgaagggaagaatgctgcatttggccaatctaaggtggcttcctggaggaggcatagaaccatggttgaaaggaggaagaagaatccccagatgagtgcctggaagagcttggagagctcagggctaatggttcagaaactggaattaaactatgaagagattagatacagtttgggattgtggtgcttggaatgctgctcgattgacagggagccactgctgatgggaagggtaggaacaggggatgctggtgacataaccagtggagaagctgaggagcccctcttcactggtacatccttccctt

SEQ ID NO: 56339 - DNA, 1205 bp, Homo sapiens
tgcctgtaatcccagcactctgggaggccaaggcgggtggatcacctgaggtcaggagttcaggaccagccaacatggtgaaaccctgtctctactaaaaatacaaaaattagctgggcgtggtggcatgtgcccataatcccagctactcaggagactgaggcaggagaattacttgaacccgggaggcggagattgcactgagccaagatcacaccactgcactccaacctgggcaacaagagcgaaactctatctcaggagaaaaaaaaaaaaaaaaaaaagctgaggtgggagggttgcttgagcccaggaggttgaggctacagtgaaccatgatcataccactaccttccagcctgaacaacagagaccctatctcaaaaaaaaaaaaaaaaaaaaaagagaggatccagggatggagagaagggggagtgattcctttgttggtctctgttttacttctggggtccacctgtttttttgtgccttacagctcgacagaacaattggccccctctaccttctttttgtccagttcagccctgctttttccaggacatctccatggagatcccccaagaatttcagaagactgtatccaccatgtactacctctggatgtgtgagtagtgagaagccttttggaggaagttacaggtagatctcttaactgccctggggtccgctcaccaagaaccaaacacttcacctctatttagaactcaccagcctgctagcaaatgttcttgccctctccccactttttattgtccatatgcaggaatatattttgaattctttagatgtctttgggctgggtgcagtggtatacgcctgtaatcccagcactttgggaagctgaggtgggtggataacctgaggtcagaagtttgagactagcctgatcaacatggagaaaccccatctctactaaaaatacaaaattacctgggcgtggtggcacatgcctgtaatcctagctactcaggaggctgaagcaggagaatcacttgaacccgggaagtggaggttgcaatgagccaagatcatgccattgcactccagcctgggcaacaagagcaaaactccatctcaaaaaaaaaaaaaaaaaaaaaaaaaaaaaaaaaaaggccgggcacggtggctcacacctgtaatcccagcactttgggaggcccaggtgggcagaacatgaggttagg

SEQ ID NO: 56340 - DNA, 1032 bp, Homo sapiens
gaaaagaaaaaaaaaaaacacagttaagtggggagatatggtaaatgagtgatttgagtcctcactaaggaattggatatgagggatgataaggctgctacaggtcatcatagagttctctgacagaaattcaacagaagaactagcttcctaacaaatgggggaaaggctgcttccttacatcatgagttctgggtctaaaggtattcaagcagactctagattcctgtgttatgagggactagatgatcactaaggtcttttcctcaacagccaccaccagcctatgagcctccagcccctgccccattgcctccaccctcagctccctccttgcagccctcgagaaagctcagccccacagaacctaagaactatggctcatacagcactcaggtacaggaggtgtgcaggtgagggctggggagaagggccagtcctggggcccagggctcacatctccgtctgctcacactgggcaggcctcagctgcagcagccacagctgagctgctgaagaaacaggaggagctcaaccggaaggcagaggagttggaccgaagggagcgagagctgcagcatgctgccctggggggcacagctagtaagtaatagagtggggaagagcatctgagagtttgggaggagcaaaaacaggtcttaagggcctgggctcggctgggtgcggtggctcacacctataatcccagcactttgggaggctgaggtgggcggatcacgaggtcaagagatcgagaccatcctagccaacatggtgaaaccctgtatctactaaaaatacacacacacaaaaattagctgggcatggtggcgcgcacctgtagtcccagctactcgggaggctgaggcaggagaatcgcttgaacccgggaggtggaggttgcagtgagccgagatagcgccactgcactccagcctggtgacagagtgagactccatctcaaaaaaaaaaaaaaacacaaacctgggctctggagtcagactgctgagtttgaattttagagatactgct

SEQ ID NO: 56341 - DNA, 2215 bp, Homo sapiens
ccggacttcttttttgagatgtgtatttctgtgaggtaggaaagctcggctcctttgactaactggagataatggagatctcagacctaaagaagctctccctcctttgacccctttgctacatgttacatatttttagagaaactcctttgctacatgttacattttttcagaaaaacccatttgctacatgttacattttttcagaaaaacccatttgctacatgttacatgttttcagaataactatatatctggcacttgagtgtagtcttcagatgcttacagatgtgcacgctgttctataatcatttcttaatccttttgctcccctacttctaaaagtattatgctggatgtggtggaagctgtaaaacaggaatttcccagggcttgtaaggccaggcaggagatcacagtaccttttttaaggctcagaagcaatgtagagaatactggtggaatctcagtctgggtgcagaggttcatcctctttctcctctgctcctagaagcgagatgagcgcagtgtgaagagcacagctgtgcgggtggtagactttggcagtgccacctttgaccatgagcaccatagcaccattgtctccactcgccattaccgagcaccagaagtcatccttggtaagggagggcaaggctgtccaagtgtgtgagatgatgtgagggtggggccacctaagcctcataacaccttttccctcccattctcacccagagttgggctggtcacagccttgtgatgtgtggagtataggctgcatcatctttgaatactatgtgggattcaccctcttccaggtaagtgatgggatgtcttacttgactgcctggcattcttctacctggttcctttgttttctgctgaggacctgcctactcagttctccacattgcctgccttcctggcagctgatccttagcatgcccttttcagtcccatgctcagttctgtttttgtttcccagacccatgacaacagagagcatctagccatgatggaaaggatcttgggtcctatcccttcccggatgatccgaaagacaaggtgaaccttgagggggcactagttaactcttttccttttctctccacagaattggtctatttcacatcattttcttttttctttgatacctcctctccccccagttactttcagatggggaaataagggaattgtaacaagggtgaccttctgattcctcaacctccccttcccctctagaaagcagaaatatttttaccggggtcgcctggattgggatgagaacacatcagctgggcgctatgttcgtgagaactgcaaaccgctgcgggtgagctgggctcgggataaatagtgcccaccgtccagaagtcacttccttcttagggtggtttgccccctggaatgctcttcacaagcagagggttaggaaaggaggggaggaaagctgaaagaagacatctttggtcaacagaggaaacataagagggagtggttttgtggagggaaggaggttagacagcctaaccttgagacaaccagagatcaaagcaatgtcctggattctttaggtcagacagaaaagaataaactacctttgaagagcttacattttaatgaggaactaaagaagattcatgaagttgacaaggatatacaagtagaaagaactttcaaagattatggagtaattgtgctagtgggaaggtaggttgagctataatatcagaaacgttggtcctggtgtggtcgtggttaggtagccttcaaattggttgcaagcagagccttggttctccaagaatgaaaggtagggtcttgaagaaggcagggtttgtaaggcatcctgcctcacctttttcctgccctcctccaccagcggtatctgacctcagaggcagaggaacaccaccagctcttcgatctgattgaaagcatgctagagtatgaaccagctaagcggctgaccttgggtgaagcccttcagcatcctttcttcgcccgccttcgggctgagccgcccaacaagttgtgggactccagtcgggatatcagtcggtgacgatcaggccctgggcccccctgcatcttttatagcagtgggtgtccagtccaggacactggtgcttttttatacaagagaacgagccagagttcactccttcctcctggctctctatatacctgtgaatatgtgaaatagtgtaaa

SEQ ID NO: 56342 - DNA, 1049 bp, Homo sapiens
aacttgggctgggcatggtggctcacgcctgtaatcccagcactttggaggccgaggcgggtggatcacaatgtcaggagttcgagaccagcctggccaatatggtgaaaccccgtctgtactaaaaataaaaaaattagccgggcatggtggtggacaactgtagtcccagctacttggaaggctgaggcaggagaatcgcttgaacaggaggcagaggttgcagtgagccaagatcgcgccactgcactccagcctgggtgacagagtgagacgccatctcaaaaacaaaaaagaaaaaaacctggcagatagtaccattcttcttgggtctggtagaggctactccttagctgaactgaattttggtgttagtactagctggcatggttttacacaagtatgtggaatcaacagctatgaagtacctccttgttggatggctgatgggcagatgggagctcatcagacaaccccccttcccccatctctcttctcagcctctgtgtccagatgtttgactggtttgactaccatggccacatgtgtatctcctttgagcttctgggccttagcaccttcgatttcctcaaagacaacaactacctgccctaccccatccaccaagtgcgccacatggccttccagctgtgccaggctgtcaagtgtgagtggggtgggccgaagtggactctggggcagtccctcccttcattggatctctctgtcggttgtgcactggtgaagcccctaaacagtcagctgtctgttatctgcagttctttgatttactgtcatcttgaaacgtcttctgacttaactccttgactgatgtctttatcgtcactgattgctcttactctacacctagcctagcagcagctagaagagaaagcctttggaatcaaagcacttaattaccctccccttttcctttctccctttcttgggaaagcatcagtcagacagcaaacataaagagacaaaaatacactccttagggtaaaggcttacatttgtctgggatgagatgttcattcacagcaaag

SEQ ID NO: 56343 - DNA, 2536 bp, Homo sapiens
gggttaaggatggtttagagcaaggggggatttcattcaggaaagcttgagaaaaaaatggctctttgtttctttgtatcactgcagcgggaaaaaggccccaatagggagtggttctgcagatgccttttcagaggttttggtgacatggcagatgtgcttgttacctcacttctctggtcccttggtcctctcagtgactcaacaagtgtctgagaacagttttctagcattactctttgtcctcactaaggcaggaccttgtcacagggtatggtagggaatgtgatctgaacagatacacctcattggtatttgttatccaacagcagttatgatgatcgttcgtccgaccggagggtgtatgaccggcgatactgtggcagctacagacgcaacgattatagccgggatcggggagatgcctactatgacacagactatcggcattcctatgaatatcagcgggagaacagcagttaccgcagccagcgcagcagccggaggaagcacagacggcggaggaggcgcagccggacatttagccgctcatcttcggtgagtgccagcccaggcccttcctctccccactcttctgcaggccctctaggactctggtaagtgagcagtatccttgttctcagctgaacattggggcatgaacactgaggtgggcactgagtttgcctactttcttggaagctctccgactcttgaagggccctggatctgctttggagatggatgggcacggagcatttgtgacccccagtgctctccctggcatgttgggcttattgtgttgggagcagcttctccgccccagcggcctccactctttaatggggaccttgcttgtgaactgcctttttcccccaagccctgggctctgtagcccccttggcaggcgggcttgggtgggggcaaggggagatctgtgtctgcccggaagggcattgtgtagagcatggggttgtgggtgacattggcaacaacaccacttctctgctctgcccatgcctctccctgttcctgttttgggtttggggacttgggattatgcgccgctctctcttctcacaccgatccaccttactgcatctgacgtgttcccttccactgtcccccatcatcgtctgtcccccctggctgggcgcctgtgaccggtgacccctctaccacccaccccgcctccctccggcccccgctccgacacctggcttgctccgaccccccctgccccccgacagcagcacagcagccggagagccaagagtgtagaggacgacgctgagggccacctcatctaccacgtcggggactggctacaagagcgatgtacaagccaaatcgtaacaatcctatagcctgtaatggtcccatagccatcctaacgtcccaagccaacctgagtcacagcctcttgccttttctcagtggtgttgtttatctgggtggtttgagttgctgttgagaattgacctctgttgtccactcccagctctcacggcccctgggttaaaggtggtgggaatcacgcaggggttttcttcccctgtgaccatctgtatctgttccccttccttcatctccaccccaggttgctgtccccttttttcttccaactcagctcattccccaccttctctccctccctctccccgaccctgctctctttcatttcagatgaaatcgttagcaccttaggagaggggaccttcggccgagttgtacaatgtgttgaccatcgcaggtaactgtcagtccctccctactatgtggggctaaagagatggttggggttatatggggcttttttgctaattaacctgaggtagaatttcttagtccccctacagccctgttcattttgagacattcttgagaacccagcaaaagcctctcctgccaacttacaggggtggggctcgagttgccctgaagatcattaagaatgtggagaagtacaaggaagcagctcgacttgagatcaacgtgctagagaaaatcaatgagaaagaccctgacaacaagaagtaagcaagcaaggaagtatgtagggaggctgagagccccaacccctacacgggagagacttctagacctggtttaggcagacaggggagtcctagaccttctcatccattcatcttttgttcatcatcttagagtagtagaacatcagggtaggaaagggggggggcccatgacattccttaatccactccccttgttttcagggaagttagattgctctgtcgtttgaccccagcctagaatggcttctgtagagatataccctggacatagccctaggactgagcatcaacctcatcgaacaatgaattaagcttttataagtagaactatgctgataaggccacagacatttatgcagtaatattttgttcacatacattcacagtccaaaaatagaataaggactttaagccaagatatgaggccagtaggtataaataggagcccagtggtagctagtggtgaatgaatatcaggagttgggctggggttggga

SEQ ID NO: 56344 - DNA, 1110 bp, Homo sapiens
agtggaatatcaaagttggactcgggtccaatcaaagctggaggggaggaatacatcaccgtgtcacttggaacatgcaggaagaatttgcctgtaggagttctggattttctgagtaagaaaggaaaaagcaaaagatttcaaacttgagaaaggtaggctagtgatgttttgaggggacagtgctgtgaggccgtttgatggtagtatgtggtgagatggcatttatgtggctatgctgattaggataactatgctgggaaaatcttgtgcttgcagcttggtatgctaccggccccagttacaccaagaatgcatcaaataccaccctcctcaatttggggaggttgggaagaagtgatacagaatggtggtcagacatcggaatcattaaaccttttgcatacgcgattctcatacacccccaccaagacttatgtccctgggcctgtttcattttattgtgccttcctattctcatcttcctggattgtgacagtgatttttctcttttttccttgaaggaaaaaaaggatttgtgaaccatcccattccaattccattaactggaaggtggccagctgtcagctaagtagggctgatattaattaaaaaccacttactggccaggcgcggtggctcacatctgtaatcccagcactttgggaggccaaggcgggcggatcacctgaggttgggagttcgagaccagcctgaccaacatggagaaaccctgtctctactaaaaatacaaaattagctgggcgtggcggcgcatgcctgtaatcccagctactcgggaggctgaggcaggagaatcgcttgaaccctgcaggcggaggttatggtgagccgagattgcgccattgcactccagcctgggcaacaagagcaaaactccgtttcaaaaaaaaaaaaaaaaacacaagaaacagttgttatctacgtcttaagcacaagagtggaggggccagatgggatgctgactgtattttgtggcctactacattaaaacctctcaagggagagttggccaaagatgtgagagatgattaagttaattcaaggggcccgacccagatccctggagctgatagtatttggcgttta

SEQ ID NO: 56345 - DNA, 1055 bp, Homo sapiens
aaaggccaacgctaggccacgccctctccctggctcaggctgcgctccccgccttctttgctaagccacgcccctctcggagttcctccaggatcccggcgtcccagccccgcccggtcttggcgcggccctcgccagggggcgccgcgcagcccgcccgccgcccgccagtctagcacacaccccctccgccccgcgcgccggcgattccgagcctacgacgcctccgctagagcccgcggggctgcgccgactcctgctctggaggggttgcgggtacctgatggccacagagggctctaggaggccgagcgtgtaagcggggtgggcgccatggaggcagagcagcggccggcggcgggggccagcgaaggggcgacccctggactggaggcggtgcctcccgttgctcccccgcctgcgaccgcggcctcaggtccgatccccaaatctgggcctgagcctaagaggaggcaccttgggacgctgctccagcctacggtcaacaagttctcccttcgggtgttcggcagccacaaagcagtggaaatcgagcaggagcgggtgaagtcagcgggggcctggatcatccacccctacagcgacttccggtattgggggcttggcggggagggcagggtacatcaatcccaccctcgcgggcagcgacaccgggacccggcccgccccaccctccacggtcacttcatttccagcccggggtcccttggtggggcgggagagtcacttgcaccagtctagcctgggaattcctgggcgggtatcccctgccggaggtcctccgtgcctggacaggctgggggcaccagaaggggcaagcagacatcaggggatctccagagacctggatttcctctttcaggaacccgggaccccatccggaccaaaggaactaccagagtttgggacccctgcctcctccagtcctgcttgctggagatctaggaaattatattctaagtatcggggccagtctgagggagaagccgagctccgccatctcccatccccacacccgctccttagcacctgcc

SEQ ID NO: 56346 - DNA, 1044 bp, Homo sapiens
ctctgtcctcttgcccctggcaatgggctggccctccagtacaagcaggtggagcagtacatgtccttccacaagctgccagcagacacgcggcagcgcatccacgagtactatgagcaccgctaccagggcaagatgttcgatgaggaaagcatcctgggcgagctgagcgagccgcttcgcgaggtggggctgggttgggcctggaaggggggctcttcagggacctggagtgctgtctggtggtaggggctattggtcagcaggtgctcctatagggaatgaggcctgcagagggccccgtgggaggccaggtatttgggctttcaggggctagggtctttcttgaaggccctttgagggtgaaggatacatgaggagggactatagggatctctgtttttgggggatggtcctgcaagggctcatgggaaagatctgaaggcaggagcttagggatggtcccaggcccactgatgcctccccatcctttggcagaacatgaccccaggggtggggtttctggaagcggatgagctcggtgggatcatctcaggtcaggggcacagcctgcctgacaggcccctcccctgtccaggagatcattaacttcacctgtcggggcctggtggcccacatgccgctgtttgcccatgccgaccccagcttcgtcactgcagttctcaccaagctgcgctttgaggtcttccagccgggggatctcgtggtgcgtgagggctccgtggggaggaagatgtacttcatccagcatgggctgctcagtgtgctggcccgcggcgcccgggacacacgcctcaccgatggatcctactttgggggtcagcaggcctcagggagggtggcagggtcacgagcagacagtggagagggcaactgctcccaggctctgggtccctgcctcagtacgctgcagaatcacagagctccagcccctccccaggcctactcagtgagaatctctgggctggggtctggagctctatagtttttgtttgtttgtttgtttgtttgttttttgaggtg

SEQ ID NO: 56347 - DNA, 1010 bp, Homo sapiens
tctgtctctactaaaaatacaaaaattagatgggcatggtggtgggcacctgtaatcccagctactcgagaggctgagccaggagaatttcatgaacccggagacagaggttgcagtgagccaagatcgtgccactgcactccagcctgggtaacagagagagaattcatctcaaaaaaataaataaataaataaataaataaaaacaaaaaataaatttactagggtagaccatgcagaaagaatgtgcctgggtactgggacctcttctagctttgctccagaaatttggggaaggagtaaagacagtagcaattccagaggctccttgaagaggagttggggttggggaggataaagttaggtggtggttggaaatgggagagagcaaggagaaaactcacagtagctgctgtatggaccctgataccctgtacctctttccttgccctccaggtcctggagtacaatgccattggaggcaagtataaccggggtttgacggtggtagtagcattccgggagctggtggagccaaggaaacaggatgctgatagtctccagcgggcctggactgtgggctggtgtgtggaactggtgagaggggtagggcaagggagaagaagtttcctgcaatggtggtgacttgggtgggaaggggagggatgggcctgaaacttatttctgggttgtgtttgtgtttctttgtctctagtgtgctacggccaaatttagagtgaatcactccaagggttaactaatgtggggagcctcttttggcattaggtatgaagatggctgtagatagttgtagacagtgtggactggggcctcgagactgggcagagaggtgtcagctctttcctctgagcagaggatggctataaaagtgacagaggaggccgggcatggtggctgacacctgcaatcccagcactttgggaggccaagggggaggatcatctgagttctggagttcgagaccagcctgaccaacatggagaaacccc

SEQ ID NO: 56348 - DNA, 1242 bp, Homo sapiens
gccgggcgtgggtttggatgccatcaatgatgctaacctcctggaagcatgtatctaccgcctgctgaagctctattgccgggagcagccctattacctgaacctgatcgagctcttcctgcaggtgtattgcagacagggcccgatgcccagagggtgcccatggtagccttggcctctataggacatgctcatctagctggtttcagggtacaggattgcagcgtgcctggaagggaaagaaagcgaggaagggtgttgggaagtggggttgtggtagtggcaagaaagggcttctctgtcctgtgtaattggaagaaagggtgataaaggactgtgtgtatgaatatgggccttaagttttggggctttctccccttctgttgcctttctgattctgcccagttgtcagctggtatgggatgttgggcttgggataccagggtttcgcatatctggagaaagcctggctcatggaccgtctttgtcttgcttagagttcctatcagactgagattgggcagaccctggacctcctcacagccccccagggcaatgtggatcttgtcagattcactgaaaagaggtgaggggaggtgagggacagcgcgaaccatgtctggacagcgagggagggctcaggatgtgcattgccctcctgaggagtttctcttctccccttactcaggtacaaatctattgtcaagtacaagacagctttctactccttctaccttcctatagctgcagccatgtacatggtgagtgagcctcctcacccctctctgctctgctgatgggggcttttggacagcaaggcatagagcagaaaacgtgaacactgctacccctggtgaaaaactgtgtgaccttgagcaagtcggtctcgctcagtctctttcctcagctggggataaaattcctacttcacaggactgtaaagattaagcaaggcaagggatatgaaagtgcttagcacataataggggaacaatatatcctgtatctgagtatggataggagtgtggagatcatccaggttgagagggagaagagtggattaaagacagtcagtgggattaagtgtctaccctgaccttgcttctctacatttccttttcatcttgaaagaagttggaggtggcaaaaatattaggaaggtggatcagaatgacttggggactgacatttgtgagggaagagacaggctgtgcacctctagaatggattcatctcttttat

SEQ ID NO: 56349 - DNA, 1054 bp, Homo sapiens
tctagttggcaggagccaaagatgttgccaaacatgtagtacacagaacagctcccccagacaggattatctggtcccaaatttcaatagtgccaaggtggagaaaccctggagtagaggatgcctggtatgaggcaatatttgggatagggaagggaagcttgggattttagctacgtagagacacttgaaaattggagggaggaaaggagtgggtggctttggagatgttctggaatatgtgaatgaggggagtggaggggtcctggaggctctggggaaggccaagcccgttttcctgtctttcaacctcttccaggaaaattacgggcagaaggaggctgagaaagtggcccgggtgaaggcgctatatgaggagctggatctgccagcagtgttcttgcaatatgaggaagacagttacagccacattatggctctcattgaacagtacgcagcacccctgcccccagccgtctttctggggcttgcgcgcaaaatctacaagcggagaaagtgacctagagattgcaagggcggggagaggaggctctcaataaataatcgtgtaaccttcttgtggttctgttcttgctcggcccagccagagtctggctctttccagaatgtgcagggtggggtgctgggaggactcgctgcacggaaccaggacccaggggccaaaagcttaggatatatcaaaccctctaggtgggtgacaaaagacgctaaacgctgggggcgggtctgagctacgccacgcccatgcgcgaaggggtgcagctgcgcagcgcagggtaggttgtgctagtgcccctcccctcccgctctgtgccccgccgggcggggaccgtgggagccgcggacaagcccaaggccggagcggttccaggaggaccctggtgaggagggctcggcccatgggtgtagaccgatggacctgggcacgaggggcggggcaggacaagggagcaggagaaatgaatagagaaagggtgcggtggtggctgaacgatggagacgaatgcggagagaatggacataccgctgttcc

SEQ ID NO: 56350 - DNA, 1051 bp, Homo sapiens
cctcccaggtcttctgatagccgtcagcgtctccgttgataaaatcatctcgcatttcggggccgcccggaacttggtgcagaaggtgaaggtggctggggggaggctgttgggatgaggagagtaatggagctccgcggggggtgcgggaatggttggcgggaggtggctgggaggtgtctggagggatctctggagccatcggcatcgcgccacctccaggcccagttgggtgatagccggctgagcccggatgtggggcacctggtgctgaccaccctctgcccggccctccacgccctggtggcggacgggctgaagcctttccggaaggacctcatcaccgggcagcgcaggagcagcccctggagcgtggtggaggcgtcggtgaagccaggtgagccaggagggcgtgggacccggcagtgcgcagggcagggccgggcttggctgactgcaccccacgttctcaggctccagcacccgctcccttggaaccctgtatagccaggtcagccgtctagccccgctgagcagcagccgtagccgcttccatgcctttatcctgggcctcctcaagtgagttgccttctttccagtgcccttcccacgacctgggactgcaggagcgtcatgggtgggacacagtagtagtgcctcacatccccagagaaggccccccctcttccaatctcatctcccatcctccacccagagaggactggagtcctccacctccctgaacttccattccctcttttctcccctagcaccaagcagttggagctgtggttttccagtctccaggaagatgcaggtcagaggttcagatggtagaggatggggctgatgggctgggaggatgggaaggaaagagttctctcctgctggttcccactgctgccagaatgccattaatccagatctccgatcttattactcttctaattaaaactttctaaggaggcccatcgcccataggatgaaagacccaaagccttggctgtctggcctctgccctcttcccctgccttggagggtcttgccaaca

SEQ ID NO: 56351 - DNA, 1791 bp, Homo sapiens
tctctttaaaaataaaatttaaaaagctttgttgtcttttcagacatacatatgcatatatgttttagatgttcttataagagaaaagatggtttttaaatgtgccaagttgtgtgtgtgtgtgtatatatatgtgtgtatgtgtgtgtatatatatatgtgtgtgtgtatatatatacacacacacacacacacctgctgtgtgattggtaagcaatacaatagtaaacatgtccccattacttttttctaatattggaccaatgctgtcctaattgtacatttccccttatggtgacgatgctctgactcgtttaggtagacacattgaccaccttccattccattaaatattttttcctttttcccctttctgtgtcattcttgaggaaaaaacaaaagagagaggggatgccaatgatccccttgagcagagaaaaagcaaaataaatattttattaaagaaaaaagagaattaagaaaatagtttggagtattttcttactgtagagaagcactgtacattactaagagacctgggtataagatactcacatgtggagctggaaaaatcgcatgtccaagcccgtttgagtggtttcttttgtttttcattgcagggagtgggtgggagggaggtgggactaggggcactttgggggtctccttttagtcaaaagcgagaaaatgacaagaaagagattaaaattcaatgtttcctttatagtgttaaacactaaaattttaaaaaagatgaaaaagaaaaaaaaactttgtaaaatgcgagaacagaagcaaaagacactacgctctgtcattttatctttcttttgttgaaagactaaaaaaaaactgaaatgttttttagacaatcaaatgttaggtaagtgcaaaaacttgttttttcttactggtgtagaaattaatgcctttttttatttttcagttattttataataacgaaataaaaagaaccccccagctgccaggcgggttttggtgtttgaaatgcggggcaaagcactacatcactgcaaatagatacagagttagtctgcatgtctgtaggctgtgtgattgcggaaaatataaatgctgctaatatatttcctttttacaaaagcatatctaaatagatgattgttttgatgttaatctttgtaaattatgtattaccaattttaacattggatgtaattgcatacaaagcttgcatctcaatccttgaaagtctagtattaaatggaaaaaacttttcctaactgtggactgatgagcttgctattttttcctccttcttatcccccatttatcttccaagacaacctcatcctgtttccaaggggatctttctgaaacaacatcataaacatgctaggctgcacatgagcacactcactgccgttgactactggataaagtcatttcttcagtactaggatctttctagtctggactcagcctaatcaatcagcacagtaataacacacaccaaatgtccagttgcttttttgttttttgtgtttgagacagagtctccctgttacccaaactggagtgcaatggcacaatctcggctcactgcaacctccacatcccagactcaaatgatccttctgcctcagcctcccaaatagctggaactacaggcatgcaccaccatgcctggccaattcttgcactttttgtgcagacggagtttcaccgtgttgcctaacgtagtccagctgttttgttgggttttttttaatttttttgtttttgagacaaggcatcactgtgttgcccagg

SEQ ID NO: 56352 - DNA, 1009 bp, Homo sapiens
aatgtttggcttccttggaccctgggcattaaataccagtagcataccccaatcattgtaataattagtctcccttcacacattttcatatggcccctagattacgtagagcaactacacaattagtgcttcataaaacatagattgagatacttagcctatcagttttgtcctctaccttcacttttccaggtttaacagctctagttgctttcatcttttttgtatatctgtggtatattgaaatgactaaacagtaagttttgattgagaattctaggttgagaaataagtaggctgaatgtagtaattccagcccttatacattggctttctgctcctatcaggaggttcccatgatccctcggccccactatgcccaacctggctgtgtctacttcatctgtttgctccgagatgacttgctgcttcgtcagggtatgtatacaggagctaatcctacttgtcagaggtgacctttctgaatagtaggaagtctctgctgtctccatcatagtcattgtctccatacggcctcgaatagcaatagaatataagtttttatatctgtagtccttgtgcttacatgcatcacctctccaccaaataatactaatttgaaatgatagacatgttacaaagctaattttaagactgggaaaaacatataggaagctcaagaaatggaatgcctcccttatattattgtcatagtctagaattgattatcatcacttaacactgctgcttttagctctctgtatttatactgtttcagattatgagttctatgtagaccctgagtcagataaacagatgcctaacagaattcatacaagaattgttttatgtttcttctgtgttctgggtcttcctaggtgactgtgtgtatctgatgagggatagtcggcgcacccctgatggccacccggtccgtcagtcctatcgactgttatctcacattaaccgagataaacttgacatctttcgcattgagaagctttggaag

SEQ ID NO: 56353 - DNA, 1022 bp, Homo sapiens
tctttccttctctcctctcttcttgtttttttgttttgttttgtttataagataggatcttgctctgtcatccacactggagtgtggtggcacgatctcagctctctgcaacctctgcctcccaggctcaagcaatcctcccacctcagcctctcgagtagctgggattataggcatgtgccacgtgccaccatgcccggctaattttttgtactttttgtagagatggggtgtcaccatgttgcccaggctggtcttgaactcctgagctcaagtgatctgcccacctcggcctcccagagcgttgggattacaggcatgagccaccacgcctggctctttccttctttctgcccactttccactgtacacttctcacataatctggatcaaggaaaatgacagtatttcatatagtgctttgccttttgaatcattagtgataatacactctattaattgaatcctctgatagagtgaaatatgttaatacatgtagggctcctgatgaagaagtcaaagcctggatttgagccttagtgtccccactaatatatgtgaatgcataactttatgtgtaaagtggctgtaagtaacgcacaggattgttgggaggctaaagttagacaggagtaaataaaacattttgtagctgtattctgaaagcagaatagctgtagcatttacttaaattacttagtaatagttcagtagtctatttgttttcctattctctgtccatctccccattttatttgcccagatctatagattatgagtcaatcggtatacttttgcttagaacagtcattattttgttttcctcctattttaccatttatctctaatttatcattcacccagttatcccttagttcctcttttactttaccctgacctattgctaattttttattctgggctcccaggacactctcaataagtcatagcctccatgttccccaaactgtatgtttttctacaggtatggcagcactgtgattgtatgggagtgaactcag

SEQ ID NO: 56354 - DNA, 1086 bp, Homo sapiens
gataataattgtcttttaaaattttctcatgccgggcacggtggctcatgcctataatcccagcacttgggaggccaaggcaggtggattacttgaggtcaagagttgaagaccagcctagccaacatggcaaaacccgtctctactaaaaatacaaaactggtggcgtgcccctgtaatatcagctactcgggaggctgaggcaggagaattgcttgaacccagaaagcggaggttgccttgagccaagattgtgcccctgcactccagcctgggtgacagagaaagattccgactcaaaaaataaaataaaataaaattttctctaagtatctagtagactaccatatttctattacttcttgtcaggagaagtctggtaccagttatttaaacatggccagataaggaagtccccatatctctttttttaattgctatggttttttttttttaagtagacaattatttgtaggaaaacttttttttcataataaaattatctttaaacttctctttctagctttaatgaagcaccagttgagattcccagtccttctgaaaccccagctaaaccttctgaacctgaaagtaccttgcagcctgtgctttctctcatcccaagggaaaagaagcccccacgtcccccaaagaagaagtatcagaaagcagggctgtattctgacgtttacaaaactacagagtaagtagtagtacctattagctaacatccctttttcttccacatttggaaaaatactttgactatcaaaaaacaatatagattcttttgtgtttcataagcgtgatgattgtgtttttgcactcatgtatgaggtacgcctccctcaaactttgtgtcaaggtcaatacattaccctttctgatgtggggggaaatcagtacaaaagtaatatgcacaaataccagtgttcactgtactactgtactgtcttatgttgtatgagactaattgtctttctgatggttatcttctctctgcctttctagattgagattctaatgatgcttttcttttctttttttgtttttttttttttttttgagacggagtctcgccctgtc

SEQ ID NO: 56355 - DNA, 1022 bp, Homo sapiens
acatcttcttgctatgttccttaggttgatctcgaattccttagctcaggcattcctcctgccttggcctcccagaatactgggattacagacatgagccactgtgcccactctttatccaacatttaagtcccttagcttaactggaccttaatttattttttatttattttttatttttgaccttcatttttgaagaattaaatttttttctttctaatccttacctcaaagtgagagttgttctttttaaatttacatattattagagaaatataggccaactttggttttatcttgttgtaataacctttttcaggaaagtaaaccatcaatttacctatgatgtgtaatcttgctatggaaaatagagtagtactcccttttatctgtgtaaaaacttatttaaataactagccgtgtccaattttgtctatgtgtgatttattgtctctttcagtaaacggagttccctctcgaagtccaagattagttgcttctggggatgactctgtggatagtctgctgcagcggatggtacaaaatgaggaccaagagcccatggagaaaagtattgatgctgtgattgcaactgcctctgcaccaccttcttccagtccaggccgtagccacagcaaggaccgaaccctgggaaaaccagacagccttttagtgcctgcagtcacaagtgactcttgcaataatagcatctcactcctatctgaaaagttgacaagcagctgttccccccatcatatcaagagaagtgtagtggaagctatgcaacgccaagctcggaaaatgtgcaattacgacaaaatcttggccacaaagaaaaacctagaccatgtcaataaaatcttaaaagccaaaaaacttcaaaggcaggccaggacagggaataactttgtgaaacgtaggccaggtcgacctcggaaatgtccccttcaggctgtcgtatcaatgcaagcattccaggctgctcagtttgtcaacccagaattgaacagagacgaggaagg

SEQ ID NO: 56356 - DNA, 1020 bp, Homo sapiens
tacagattaaagggctggcagaaggggatctaattagatagttactagttatggctgaggataaaaagttgagacttaaaggatgagaagccacagtgaagtccaggcgcggtggctcacgcctgtaatctcagaactttgggaggctgaggtggccagatcacttgaggtcaggagtttgaggccagctggccaacacggtgaaaccccatctctactaaaaatacaaaaatcagccgggcatggtggcacgtgcctgtagtcccagctacttgggaggctgaggcaggagaatcgcttgaacccaggaggcggagattgcagtgagcccagatcacgccagtgcaacagagtgagactgtatctcaaaaaataaaaataaaaaaaaagccacagtgaagaacatgttttaagattctcagttgggaaggagtttagatattggataaactgaaaaaagcttcatcgtggtgaaagaggaaatacagagagagtagtgagaaatgtggcaaaagaagagaccaaacaatgtgttaagaattttggattttatattaagaacaaaagacaaaggagtattgattttaggtttgcatttttaaatgatgattttgccttctgcatgaacactggatggagaggataaaaataatttgaaggaaactggttaataggcaattgcagtagtctagataacatgatggtgcttagattaggttagtggcaggcttatgtctgaacatatgggagattggagataacatgcactaagagagagaagactataggaggagcagatttagaggagaacacagtttttttttttcttttgtttttgagacaggctctcactctgttgcccaggctggagtgcagtggcacgatcttggctcactgcaacctgtttcctgggctcaagccattttccagcctcagcctcctgagtagctgggactacaggtgcaagccaccaatgccaggctaatttctttgtatttttgtagagatggggtttcgcca

SEQ ID NO: 56357 - DNA, 5049 bp, Homo sapiens
gtgtaaggtttactccctctttaacttttttcttgttcaaattttaggacccttcaaagttgtacaagaaagcagatgatgttgcagccattgaatgccagtctgaagaagtcatccgtcttcattcacagggagaaaacaatcctttgtctaagaagctgtctccagtacactcagaaatggcagattatattaatgcaacgccatctactcttcttggtagccgggatcctgatttaaaggacagagcattacttaatggaggaactagtgtaacagaaaagttggcacagctgattgctacctgtcctccttccaagtcttccaagacaaaaccgaagaagttaggaactggcactacagcaggattggttagcaaggatttgatcaggaaagcaggtgttggctctgtagctggaataatacataaggacttaataaaaaagccaaccatcagcacagcagttggattggtaactaaagatcctgggaaaaagccagtgtttaatgcagcagtaggattggtcaataaggactctgtgaaaaaactgggaactggcactacagcggtattcattaataaaaacttaggcaaaaagccaggaactatcactacagtaggactgctaagcaaagattcaggaaagaagctaggaattggtattgttccaggtttagtgcataaagagtctggcaagaagttaggacttggcactgtggttggactggttaataaagatttgggaaagaaattgggttctactgttggcctagtggccaaggactgtgcaaagaagattgtagcaagttcagcaatgggattggttaataaggacattggaaagaaactaatgagttgtcctttggcaggtctgatcagtaaagatgccataaaccttaaagccgaagcactgctccccactcaggaaccgcttaaggcttcttgtagtacaaacatcaataatcaggaaagtcaggaactttctgaatccctgaaagatagtgccaccagcaaaacttttgaaaagaatgttgtacggcagaataaagaaagcatattggaaaagttctcagtacgaaaagaaatcattaatttggagaaagaaatgtttaatgaaggaacatgcattcagcaagacagtttctcatccagtgaaaagggatcttatgaaacctcaaagcatgaaaagcagcctcctgtatattgcacttctccggactttaaaatgggaggtgcttctgatgtatctaccgctaaatccccattcagtgcagtaggagaaagcaatctcccttccccatcacctactgtatctgttaatcctttaaccagaagtccccctgaaacttcttcacagttggctcctaatccattacttttaagttctactacagaactaatcgaagaaatttctgaatctgttggaaagaaccagtttacttctgaaagtacccacttgaacgttggtcataggtcagttggtcatagtataagtattgaatgtaaagggattgataaagaggtaaatgattcaaaaactacccatatagatattccaagaataagctcttcccttggaaaaaagccaagtttgacttctgaatccagcattcatactattactccttcagttgttaacttcactagtttatttagtaataagccttttttaaaactgggtgcagtatctgcatcagacaaacactgccaagttgctgaaagcctaagtactagtttgcagtccaaaccattaaaaaaaagaaaaggaagaaaacctcggtggactaaagtggtggcaagaagcacatgccggtctccaaaagggctagaattagaaagatcagagctttttaaaaacgtttcatgtagctcactatcaaatagtaattctgagccagccaagtttatgaaaaacattggacccccttcatttgtagatcatgacttccttaaacgccgattgccaaagttgagcaaatccacagctccatctcttgctctcttagctgatagtgaaaaaccatctcataagtcttttgctactcacaaactatcctccagtatgtgtgtctctagtgaccttttgtctgatatttataagcccaaaagaggaaggcctaaatctaaggagatgcctcaactggaagggccacctaaaaggactttaaaaatccctgcttctaaagtgttttctttacagtctaaggaagaacaagaacccccaattttacagccagaaattgaaatcccttccttcaaacaaggtctgtctgtgtctccttttccaaaaaagagaggcaggcctaagaggcaaatgaggtcaccagtcaagatgaagccacctgtactgtcagtggctccatttgttgccactgaaagtccaagcaagctagaatctgaaagtgacaaccatagaagtagcagtgatttctttgagagcgaggatcaacttcaggatccagatgacctagatgacagtcataggccaagtgtctgtagtatgagtgaccttgagatggaaccagataaaaaaattaccaagagaaacaatggacaattaatgaaaacaattatccgcaaaataaataaaatgaagactttaaagagaaagaaactgttgaatcagattctttcaagttctgtagaatcaagtaataaagggaaagtgcaatccaaactccataatacggtatcaagtcttgctgccacatttggctctaaattgggccaacagataaatgtcagcaagaaaggaaccatttatataggaaagagaagaggtcgcaaaccaaaaactgtcttaaatggtattctttctggtagtcctactagccttgctgttcttgagcaaacagctcaacaggcagctgggtcagcattaggacagattcttcccccattactgccttcatctgctagtagttctgagattcttccatcacctatttgctctcagtcttctgggactagtggaggtcagagccctgtaagtagtgatgcaggttttgttgaacccagttcagtgccatatttgcatttacactccagacagggcagtatgattcagactcttgcaatgaagaaggcctcaaaggggaggaggcggttatctcctcctactttgttgccaaattctccttcgcacttgagtgaactcacatctctaaaagaagctactccttccccaatcagtgagtctcatagtgatgagaccattcccagtgatagtggaattggaacagataataacagcacatcagacagggcagagaaattttgtgggcaaaaaaagaggaggcattcttttgagcatgtttctctgattccccctgaaacctctacagtgctaagcagtcttaaagaaaaacataaacacaaatgtaagcgcaggaatcatgattacctcagctatgacaagatgaaaaggcagaaacgaaaacggaaaaagaaatatccccagcttcgaaatagacaggatccagactttattgcagagctggaggaactaataagtcgcctaagtgaaattcggatcactcatcgaagtcatcattttatcccccgagatcttctgccaactatctttcgaatcaactttaatagtttctatacacatccttctttccccttagaccctttgcactacattcgaaaacctgacttaaaaaagaaaagagggagaccccctaagatgagggaggcaatggctgaaatgccttttatgcacagccttagttttcctctttctagtactggattctatccatcttatggtatgccttactctccttcaccccttacagctgctcccataggattaggttactatggaaggtatcctcccactctttatccacctcctccatctccttctttcaccacgccacttccacctccttcctatatgcatgctggtcatttacttctcaatcctgccaaataccataagaaaaagcataagctacttcgacaggaggcctttcttacaaccagcaggactcccctcctttccatgagtacctaccccagtgttcctcctgagatggcctatggttggatggttgagcacaaacacaggcaccgtcacaaacacagagaacaccgttcttctgaacaaccccaggtttctatggacactggctcttcccgatctgtcctggaatctttgaagcgctatagatttggaaaggatgctgttggagagcgatataagcataaggaaaagcaccgttgtcacatgtcctgccctcatctctctccttcaaaaagcttaataaacagagaggaacagtgggtccaccgagagccttcagaatctagtccattggccttgggattgcagacacctttacagattgactgttcagaaagttctccaagcttatcccttggaggattcactcccaactctgagccagccagcagtgatgaacatacaaaccttttcacaagtgcaataggcagctgcagagtttcaaaccctaactccagtggccggaagaaattaactgacagccctggactcttttctgcacaggacacttcactaaatcggcttcacagaaaggagtcactgccttctaacgaaagggcagtacagactttggcaggtaagagggttattttgttacctgttatttgttaaagaaataggttattttccacaggtgcctgataaatgtagatgaacttttaatatatatatctttttttgttttttaataagtgtattttgaaatctcagtattccttttccttaagatttaagaagtagggaatgtctatattatttttttgttttgagaagagctattgtcaaaaagaaaaaaagaaagaaatatacataacttttggaaaccaggaaaaatcattcatcttttttatgtagacaggttattacacaatttttataaagacaaatggctcataggtctgttagtagtatgcaggatctcccaccaccccctgcccccaccaccccaagaggtaaaaggtaatgctggaaggatttttaatgtatattaatccagtagttataaatgcatctt

SEQ ID NO: 56358 - DNA, 1036 bp, Homo sapiens
cttatgttaatcagtagttgcctcttttctgataaatttttgttatgatctgttctgcagagaaagatgctggtttcgagttttggagatccttgttttttatggaacacagttctgtaaaattttcataagattccttggcaataacatacgcttgtgatggaccctagaaatactgctatgttaggattgggttctgattccgaaggtttttcaagaaagagtccttctgccatcagtactggcacattggtcagtaagagagaagtagagctagaaaaaaacacaaaggaggaagaggaccttcgcaaacggaatcgagaaagaaacatcgaagctgggaaagatgatggtttgactgatgcacagcaacagttttcagtgaaagaaacaaacttttcagagggaaatttaaaattgaaaattggcctccaggctaagagaactaaaaaacctccaaagaacttggagaactatgtatgtcgacctgccataaaaacaactattaagcacccaaggaaagcacttaaaagtggaaagatgacggatgaaaagaatgaacactgtccttcaaaacgagtaagtagaattcctaacaatatgtggttattgacaatattttcatttccctattaatttttatcctatatatgtatttccgggagtttgattttaatctatgttatttccagatagtttgtttttgtgagccttaaaataagccccaaggcttgtcaaagatgtaagttaatagcataaccatgtatgtatttgtacttgtaaaattattttaaaattttatttatttatttttttgagattaagttttgctcttgttgcccaggctggagtgcaatggtgtgatctcggctcatggcaacctctgccttctgggttcaagcagttctcctgcctcagcctcccgagtacctgggattacaggcacccaccaccacaccgagctaattttgtgtttttagtagagacggggtttcaccatgttggccaggctggtctcaaactcctgacctcaggt

SEQ ID NO: 56359 - DNA, 1034 bp, Homo sapiens
cacggtgagtagaacgatttgggccggcattcgggcctaagcactctctcagcgattgaatcctgggctttctgggagccactgtcatctcccggacctggatctctgagagagcagtggtgaagatgggggaggggagagcagggagggggatcctgagcctaccgggaagtccctccaggcggggtgaaggggtgtccctgacaggcagactcccggagggggctgggaagtaagcgagtggaggcggagtcggctgtgcccctgacaggttagtttgtgtttgtaggcatgatcggagcctcccccatagtccagtttgtgtgtgtttaattaagggataagagtggtcgaggacacgatcttgagaggggattttacctgtgtgacaaggtctgtggtgtccctgccgcgttgaacggtatgtgggaacgacaggatgatctcagtgttgtaagtttaataaatgtcactggttagtttgtacatggaaagagatgtttttggtctagcagacagatggtctgttggtgtgtagcggctgtgttggtgtgtgtatgtgaggatggcaagtgtttccgtaagagtttgcctttatttgtgtaagtgtaatggagttccccttataagttagcttatttcttgaataaatgttgggaggttccttgcaggttgatatgtgtgtgtattttagggattgggagcccctagttacttgttgggaaagagcggcaatggtagtgttctgtacagcatgtgtctgtgaggtcagggaggggagaaacttggcatagccagttgtggtcttaagaatagtttgtgcctttggttagagtgagttgtgtaaatgtgaagggccaaaatatctttaacagaatcattactacaaagttgtaaagaatgggtggccttatttgttgtcgcgggtttatagtaatagtttacaatacaataagaaagctctttcagtttttttgtgatactgaatctctgtgaaaatggtaggatgctttcttccattttacaaaatagga

SEQ ID NO: 56360 - DNA, 1058 bp, Homo sapiens
ttaaccctcctcggatttctcgaatttcacaccactgtccatatgcgatgatgtttgtttgcccttgacgcacttactcatggatggtacttcttcagcctcgttagacagcctggtgatggaggatgaagaaaccatgtgcttttcattcagttctggacttagtctcccttttcttccttcagcaagttatttttgttagttccttatcaaaaagtgtacataaaaattaggcaactccaaacatgcctccagggttaatgtgtgaaataataagataatatatgtaaagtggaattagctcctaggcatagggaaagtgcagaatattgccgtgttgtcatttacagttctgttgatgtcgataacgtttgtgggtgtaattggtagtgttctgtccctccaaggagttaataaaacaaagcaaacataggcctgttaggtttctgtggctactgaatatttgtttctcaaaacacttgactgatatttgataattgaatgcagcagaaatacggacgattaaagtccacaaataattccaaagtttacttgatctagtagtttttacctttacctaaagggtaaagcagaataaattaccggaaggatctacttgggtttccctttccttcacatttgtggactcctggggatccaggaagtaattcagaaatgactgttcaaaagcccatgcaaggccgggcgcggtggctaacgcttgtaatcccagcgctttgggaggccaaggtgggcggatgacctgaggtcaggagttcgagaccagcctggccaacatggcaaaatcccgtctctactaaaaatacaaaaattagccaggcgtggtggtggacgcctgtaatcccagctactcaggagactgaggcaggagaatcgcttgaacctgggaggcggagattgcagtgagccgagatggtgccattgcactccagcctgggcaacaagagcgaaactccatctgagggaaaaaaataaaaataaaaagcccttgcaacctccaaaattcaagtagacagtcccaaatttcccctttagga

SEQ ID NO: 56361 - DNA, 1045 bp, Homo sapiens
gcgaagtcccacagtaggccgtgagcaagctgaggagcaagtaagccagtccaagtcccaaaacttcaaaagtagggaagctgacagtgcagtcttcagtctgtggctaaaggcctgagagcccctggcaaatcactgttgtaagtccaagggtccaaaagctgaagaacttggagtccagtgttcgagggcgggaagcatctagctcaggagaaagatgaaggctggaagacccagcaagtcggctcatcctaccttcttctgcctgctttattctagctgccctggcaggtgattagatggtgtccacccacactgagggtgggtctgcgtctcccagtccactgactcaaatgttaatctcctttggcaacaccctcacagacacacccaggaacaatactttacagcctttaatccaatcaagttgacgcttaatattaaccatcacggtgatcttctagattggctcacaaatgctctttcagaaactgcaggatgttcattctggaactgtacagaggcaattgtacagatggttgttttctctggaaacaacagtctacttgagtgataacatatataaaactttaagaactaaagattccattttgctgtaggccaggcatggtggcttacacctgtaatcccagcactttgggaggccaaggcaggcagatcacctgaggtcgggagttcgagaccagccagaccaacatggagaaactccgtcactactaaaaatacaaaattagccaggcgcggtggcgcatgcctgtaatcccagctactcgggaggctgaggcagcagaatcgcttgaacctgggagacagaggttgcagtgagccaagatcacaccattgcactccagcctgggcaacaagagtgaaactccgtctcaaaaaaaaaaaaaaaaaaaaaaagattccattttgctagcttttaatttgcttcaaaaagtacctgtagtttcagctacttgggaggctgaggcaggaggatcatgtgggcccaggaatttgagactgtccggggcaatatagc

SEQ ID NO: 56362 - DNA, 1028 bp, Homo sapiens
aaacaaccctgcttatgtaacatccacattttctgacttacctttcaaacctgccagaaagcagaagtgatatttaatacacttggtatgttttatatattgattctaatgataatgtttagtctaagatggacctgacaaggccaggcatagtggttcaacagcactttgagaggctgaggcaggatgattgcctgagcctaggagttcaaggttacagtgaactgtgatcacatcctgccttctagcctgggtgacagagcaagaccctgtctcaaaaaaaaaaaaaaaaaagaaaagaaatatatatatgagaaactaaagtcatttcccataacttaaaagaggcatagaatatttcgagttgaatacagtttctgcctggcttgttttcttctgcctcttttttttaaagctcatctttgggtgaaaaattgtcgggatcttctgcagtccagctacaacaaacagcgctttgatcaacctttagaggcttcaacctggctgaagaatttcaaaactacaaatgagcgcttcctgaaccaggtgactagactcccagaagttgagtgctaggtagtccttacatggattctttgtgccctgagtaccaatagactatggagaactgatactggagttggaataactgtatcatttttaatttctttcatacgttttgctcacagtggactcataacttgaaactcatttatccatgtgaaataaataggcaacagtaagttgttcccattttgtgggtagcaaagtgaaatccagttgattcattgacttttcaaggtacagcctccaatccctcgcaagcacatttccaactacatgattttctccagacaatatctttttagggaaccagaaatgtattggaaaaattcttctttaccctggtgattcttagataccctgtctagaccaggggccttcaactctggatataaagcagagtcacctaagagcttgttaaaaatgcagatgccagagtctcattctggacattttcatcagaa

SEQ ID NO: 56363 - DNA, 1302 bp, Homo sapiens
agagcgagatatggtctcaaaaaaaagataaaagaggtcaggcgtgtggctcagacatgtaattccagcattttgggaggccgaggtgggcagatcacctgaggtcaggaattctagaccagcctggccaacatggcgaaaccccatctctactaaaaatacaaaaattagccaggcgtggtgacacacgcctgaaatcccagctacttgggaggctgaggcaagagaatcccttaaacctgggaggtggatgttgcagcgagctgagatcatgccactgcacttcagcctgggttacagagaaagaagctgtctcaaaaaaaaaaaaaaagaaagaaaagaaagcattcacttctacattgaggtctcttacagaacctgaacaatagattaaaatgaactcctgttaaccttagcctccaaccttttcaagggatggtttcacccttaggccaagtagccttttttttggtttttattttctttgcttgcttttagataaaagttcaagagaagtatgtctggaataagagagaaagcactgagaaagggagtcctctgggagaagtggttgaacaggtataagaaaaaacactgaatgtgtaacatgcgataacaagagaaggcctctggtagcactacaatccactgtctctcccaatagggcataacacgggtgaggaacgccacagatgcagttggaattgtgctgaaagagctaaagaggcaaagttctttgggtatgtttcacctcctagtggccgtggatggaatcaatgctctttggggaagaaccactctgaaaagagaagataaaagcccggtaggaaaactgggtgtctctatcttgtttctctgatttctgattccatcagtatggaggctgggtcttagccttgtagaccatgcaatatgttttcttgccctaggaatatttgaagataaacagtaaagagctgggtgcagtggctcacgcctgtaatcccattggctcacgaggctgaggtgggaggatcgcttgaggccaggagttcaagactaggatgggcactatagcaaggcccctgcctctaaaaaaataagaaattagccggtagctggcatggtggcacacacctgtagtcactgctactggaaggctgaggccagaggatcacttgagccctggagttcaaggttgtagtgtggcatgattgcaacactgcacaccaacctgggtgacagagtgaaatcctgtctcttaaaaaatatatatatggctgggcacagtggctcatgcctgtaatcccagcacttggggag

SEQ ID NO: 56364 - DNA, 1073 bp, Homo sapiens
tggggtgagggtctagaagtaagatctcttgggagatgataattacctcagaacgtaatttggatatggtagcctctgactacacgatattctggggaacacagtgcagcaggaggaaactgccacttacctgtgtttgtctccattttagctcctacagaagaagggaaaaaagagctgctgttcctaagtaacgcgaacccctcgctgctggagcggcactgtgcctacctctaagccaagatcacagcatgtgaggaagacagtggacatctgctttatgctggacccagtaagatgaggaagtcgggcagtacacaggaagaggagccaggcccttgtacctatgggattggacaggactgcagttggctctggacctgcattaaaatgggtttcactgtgaatgcgtgacaataagatattcccttgttcctaaaactttatatcagtttattggatgtggtttttcacatttaagataattatggctcttttcctaaaaaataaaatatctttctaaagtgttgtgttagattaataatatggaaggagtctttagattggccaaattgcatttctctgatattcctcttgttgcaggtcagaagagatcaattctacagaaatttccagtggttctgttgaggctttatggaattcagcatgtcaaaattcacagctggctgggcacagtggctcatgcctgtaatcccagcactttggaagcccaaggcgggcagactgcttgagttcaggagtttgcaaccagcctgggcaacatggtgaaaacctgtctctactaaaaatacaaaaattagccgggcacggtggcatgcgcctgtaatccaagctacttgggaggctgaggcaggagaattgcttcaacttgggaggcggatgttgcagtgagccaaaattgcaccactgcactccagcctgggcagcagagcaagactccgtctcaaaataaataaataaataaataaataaataaataataaatgtatactgtactgttttacatgaccgacttcagcatctaaggatgttgctacctggaggaagtggga

SEQ ID NO: 56365 - DNA, 1065 bp, Homo sapiens
ccgttatcttcaagaccctcccactttaccgagctccaggaccggagatgaggagctgagcacaacatgccaacactcgaggggcccacgacagttgctcaagagccatttcgggaataggctgctaggccctggagacagtgaggacttgaactgcagcactcctgtcagacccctggatgtggttccccccgcgtcccacagctaatgactaagctgggaaccgaaagatggaatctagattctcctaagccaaggtttttcccccaactagtgtatatcccagaaagcttggaagagccaagtgctggagagatggtgacagcaggttgtcaggtgatcagaggaaggttagctagaggggaagggtgcccaggctttgacctaacattgtctctgttatttctgtacaggtagtttgagctccctaaaagaggaaggtggactctacagggacaaacagttggatgctgcaatagcatggtgtgtaactgatgtatggataagggtggggatcgtgtatgtacgcagaacgctggataactctgatcagagtgcagtttctttgatcaatctccaaactctttcaggcaggggaagctcaccacacacaaagaggaactctatcccaagaacccttatctccaagactttctgagtgcagaggtgagggcctctgtcctgaactttttaacccggtgccacaacctgagggtctccataggggcaggtaaacggggattttaatcattttaaatgtcttagaatgatattttgggaaaaagcactccttttcctaaggactgcgactcggtgaacagaaaggaggctatgcggtgtggccagccaactcaaggaggatgaagcaacctttgcctctaaactgcctggaactaaatgtcgatttttctgacccctcccagggagtgctgagtagtgatggtgtctggagggtcaaatccattcccaatggcaaaggtgagacttctccagatactgatggatgggggcttgggtagagcagaaacatggagaaaggtacatttcctctgcttgtcttcaggt

SEQ ID NO: 56366 - DNA, 1383 bp, Homo sapiens
tctctactaaaaatataaaaactagtcaggtgtggtggtgggcacctgtaatcccagctactctgaaggctgaggcaggagaattgcttgaacccaggagacggaggttgcagtaagctgacacagtgccactgcactccagtctcagcaacagagagagactccgtctcaaaaacaaaaaaaaaagaccagtgaatacagccctcctcctttcttaggtttcccaccgttttcgagaactcatgcagctcttccacactgcctgtgaagccagctctgaggatgaggatgatgcaaccagtaccagcaatgcagaccagctgtctgaccatggggaccttctgtctgaagaggagctggatgaatgagactctgggaatcatctacacaggaccaaacccaacaggcgccctggcaccggggagggggtagttgtactctgcttgtacagtccttgagcccagtttacagatctggagagcaggaggccaggacaaggacaaaggctggaggatggagtaggacccaggggctctgccatcctaggcatcattcaaggtcttttatgaagactttacagatgtcctctgtaaatagcatcgagagtggagttcagctcctttctctacttttttttggtctgatggcacatatttattgttctgtggtctaatcacagtgtttctaaatgtaaaaagtgcatatgttggtgtagctagtcccgcgacattgagctcctctgcatgaagacactgggctcctgcatccagctgtttttattgcaaactagctcctttctcccacactgggaactttagtccacgaggctgtcaccaccctggtagcactgggccaggctttgtagctcctgcagcagctctgctacgtcatcgtgctccactccagcatccatgaagctggcccagcgccgcaagtcgagtttggtgaggtctctggccaaggcttccagggtctggtgcagggacgaagaggaacacagtgccccaaacactgggatgctctccactgctgtggagggagaggaaacagagacctgtagatggatgattattctgccctgggactcgccaaactgataaggaagtccaaccttagtagacttgattgtaaactcaacaaatttggtgtattgtccccttagtacaccagtactccagaggaagaatgcttttcttgggagccatagggtgaataaaggaatgtttaactgtggactttttcagcacttttaatccaggaatggagatagtaaaacctctcccatacttgaaatctcagttttcttcacctcctacatacctgctcccttgggggaaccatccagaaccatacccggtggactgcagcttgagaagaggtggg

SEQ ID NO: 56367 - DNA, 1050 bp, Homo sapiens
ttttattatttatattttcttgtagagatggagtctcaccatattgcccaggctagtctcaaacccctggcagtcccaccactttggcttcccaaagtgcggacattataggtgtgagccaccatgcccagccctcttttttattagaatttttgcacagtacctggccacaggtaatttctcgtgcttaggtgcatcttgaacctgacagtaccctgagatccttattttcctcctaagcaggattggcagtggggagcactttgccatcccctcgagaagtgactgttacagaacggctcctcctggatggcccaccacctcattcaccagagactcctcaatttccccccacaactggagctgtactgtacactgttaagagaaaccaggttgggcctgaggttcgctcctgccccaaggcatcccccagacttcagaaagagagggagggccaaaaggcagtgagtgagtcagaggctttgatgctggtctgggatgcatcagaaactgagaaattgcctggtaccgtggaaccccctgcttccttcctgagtcctgtttcctcaaagaccagagatgcagggagaagacatgtgtccgggaaaccagacactcaagagagatggctgccctcaagcagagctcgggtgaagacaagagacaggacgtgccctgtccatgaatctccatcaggaattgacacctcagagacttctcccaaagcccctagagggggtttggctaaagacagtggaacacaggccaagggtccagagggggagcagcagccaaaggccgcagaagctacggtgtgtgccaacaacagcaaggtcagctccactggggaaaaggttgtcctgtggacaaggtaggtaagggtggatgacgtgtgtttggaaaagagcatagaccacatccatgtggctccctagggttaatcatgatacctgggttacagggaagctgaccgtgtgatcctcaccatgtgccaggagcaaggggcacagccacagaccttcaacatcatctcccagcagctgggaaata

SEQ ID NO: 56368 - DNA, 1103 bp, Homo sapiens
tttaattctcacagtaatcctatggagagattgctcttgtttgcattttacagaagacataactgaagtgcagagaggctgttgtcagggtctcatatttagtaagtggtggtgctaggatatgaactcctcaggtaagccatctgtggagtctactggttgtcactgctcttcaagcagtattttttttttttttttttaattcgtgtttcctgaccaagcgttttttctcttttctggggagaaactgcttcttagtagctgtatgaccttgggaaacgtatttaacctctctttgtttcagtttcttcatcataaattgggatgataatggtacttacttacgtcttgggtttattaaacagtgtcactgagtaggctttccatgggtacaaagttctctctgaaggggattggaagagatgggagagctgaagtcacagagagacagaaacaaagacattatatctcatgatggagctctccagtgattttgcctcagattatgtctgacttaaatatttcttgaaacatctggggcaattgggatatgtcagtctttaggtcatttagggattgtttcagggattcataataggccttaatctagtttgggctattgatttccccaggcgatgtgaggagttgatacataaaagaggatggggtccgggcgtggtggctcatgcctgtaatcccagcattttgggaggtcgaggtgggtggatcacttgaggacaggagttcaagaccagccagagtaacattgcgaattcctatctctactaaaaatacaaaaattagccataggctaggtgctgtggcttacacctctaatgccagcactttgcaaggccaaggcgggcggattacttcaggtcaggagttcgaaaccagcctggtcaacatggcgaaatcccatctcactgaaaatacaaaaaaaattaggcttagtggcatgcgcctgtaatcccagctacttgggaggctgagacatgggaatcgcttgatcccggggagtggaagttgcgctaagctgagatcacgccactgcactccagcctgggagaaagagcgagactccatctcaaaaaaaaaaaaaa

SEQ ID NO: 56369 - DNA, 1765 bp, Homo sapiens
gctaccactgtgaagattgtgagccttggcggtggctgtaacatgatccagcctgtcaatgcggctgtggcccagagtccccagactattcccatcactaccctcttggttaaccctacttccttcccctgtccattgaaccagtcccttgtggcctcctctgtctcacccttaattgtttctggcaattctgtgaatcttcctataccatccacccctgaagataaggcccacgtgaatgtggacattgcttgtgctgtggctgatggggaaaatgcctttcagggcctagaacccaaattagagccccaggaactatctcctctctctgctactgttttcccgaaagtggaacatagcccagggcctccactagcagatgcagagtgccaagaaggattgtcagagaatagtgcctgtcgctggaccgttgtgaaaacagaggaggggaggcaagctctggagccgctccctcagggcatccaggagtctctaaacaaccctacccctggggatttagaggaaattgtcaagatggaacctgaagaagctagagaggaaatcagtggatcccctgagcgtgatatttgtgatgacatcaaagtggaacatgctgtggaattggacactggtgccccaagcgaggagttgagcagtgctggagaagtaacgaaacagacagtcttacagaaggaagaggagaggagtcagccaactaaaaccccttcatcttctcaagagccccctgatgaaggaacctcagggacagatgtgaacaaaggatcatcaaagaatgctttgtcctcaatggatcctgaagtgaggcttagtagccccccagggaagccagaagattcatccagtgttgatggtcagtcagtggggactccagttgggccagaaactggaggagagaagaatgggccagaagaagaggaagaagaggactttgatgacctcacccaagatgaggaagatgaaatgtcatcagcttctgaggaatctgtgctttctgtcccagaactccaggtgagagctggagaatattctcaagtatttcgtggactcagtaatatgtatcacttattgatatgccacctgcttgcttgctgcactatggatagtcctaaaatcatttgtatttgatttgtgaatgcattatgggacatgattgtggagttgaggtgaaatgagatggaaaggatgaaattttacttattatattaaactcgtttacacattaaattgaatcacctgaccatactttaaatgccttaaaaaatagtaataggctgggcttggtggctcactcctgtagtcccagcactttgggaggctgaggtgggtggatcacaaggccaggagtttcagactggcctggccgacgtggtaaaaccccatctatattaaaaataacaaaaattagccaggcatggtggcggacacctgtaatccctgctgcttgggaggcagaggcaggagaattgcttgagcccgagagacagaggttgcagtgagccgagatcacgtcattgctctccagcctgggcaacagagcaaggctctgtctcaaaaaaaaaaaaaaaaaaaaaaaaaaaaaaatagtaaataactgggcacggtggctcacgcctataaatcccagcactttgggaggccaaggcgggcagatcacctgaggtcgggagttcaaaaccagcctgaccaacatgaagaaactccatccctactaaaaatacaaaattagctgggcgtagtggcacat

SEQ ID NO: 56370 - DNA, 1045 bp, Homo sapiens
ggccttatcttcaggggtggatggtataggaagattcacagaattgccagaaacaattaagggtgagacagaggaggccacaagggactggttcaatggacaggggaaggaagtagggttaaccaagagggtagtgatgggaatagtctggggactctgggccacagccgcattgacaggctggatcatgttacagccaccgccaaggctcacaatcttcacagtggtagcaggaacagtgaagataacagatgcagggtggtggataacaggggcaggtttcatacagggagaggccttgactcctcttctctttgagggtctccgtctcacatatggctttcgaaacttagaaggggcaagggagggcagcattaccttgggcacaggggcagaagagagcaaagtctgggactcagacagagggaagcttgtcctggcctcagggggcacagcaggcagtgctgcaggagactcaaaactctcacctccactgacccccagtggagggacacctggaactgtctgtaaaacagtggctggctgtattgggtgaggaatccggagcaccattttgctcggaggggcttctgaatgagttgatcgggctggtgttttcccagggttgaagctgggctggagagaggggctgggttggataaggaggggcttcaggactgatgaacgcttctgtctccaagccttcctggggaaacgggtggcaactggcttcagtttcaggactacacccttaggcaatagcagtgggtaccgagattcactccccaactccaaattgtctttttctaggcttcgatctgagttgatctcagtggttccagtcatatttcctacctctctagcaccatcagccatgtgccgcagttcttcctggatggatggcagactggcctattggaaacaagaacactctgatccagcatatgtcagaatttgggaaaaagaggcttggcacagtggctcacgcctgtaatcccagcactttgggaggctgaagtgggcagatcacttgaggtcaggagtt

SEQ ID NO: 56371 - DNA, 1049 bp, Homo sapiens
tcaggagttcaaggctgcagtgagctgtgactgcctgggtgacacagtaagattctgcctctaaataaataaataaataacataaaataaaataaaagcgaacctcctgccttggcctttcaaagtgctgggattacaggtgtgagccaccatgtccggtctaaaatgctttaaaaatgtgtgtgacatctcccaaaaagcagtatttggcactgctagaacaagcacgtcctagagggctctgctcatctatattgcttttccttttgtcttttgtgtccgtgtcttattatacaagtcttacttcccctaaactcctcaaaggaactacatcttctccttgggatgttctgctgttttgatcccccagagtaaacacttacttgtcctcagccttggtgaagacgatcttatcctggggattctttgccttcagggaacacactggaagtaactctggatacatgaaaaccttgcttgtggccagaatccaagccacttgctttggcaaacagggaaattcattcgctataagaaaataaatctcggataaatcaacttctaggacaaaagagggcttcataaaagcctgtgaatgcatttttgcatttaggtaggagctatccttacctaacttgattccctcccatctgcccaccatccccccaaaagtttccagtctttcttaagctaacattatatctaaagggagtcccattcaatggcaataaaagttgactcattctttcttatgtggaacactttattcactaagtaaaacaaacacttaaaaagcacctagtaaaataaggtgctaacaatagcgtatgctcaaaaatgttttacctccttccccccttaaatacttgaaggataagagaccttcaacaatgctttctttcttccagaataagattccaacttctttaatctccctcacaaatctggtattccaaattttacttttatttgattcttacttaagttctcccagattcctcctgaggctgggaacaaaagaaccataaaaggaaggagacaattcagtc

SEQ ID NO: 56372 - DNA, 1033 bp, Homo sapiens
ttgtgggaatcctgaagtgagaaagttctgacattggctctttctgggtgccagcattattatagtcttgtaatctatagttttcactcttccttcccaatactggagcaacattcagaggcccattccccaggaaaaccctccctttcctttgcccacagttccaagatgagatgggattctccaacatggaagatgatggcccagaagaggaggagtgtgtagctgagcctcgtcctaactttaacacccctcaagctctacggtaggctagttgaagaccttgagatttggaatagaggaaaagtttatttctgaaaaggttttcagaagttgcaattgataatttttcatcccaaaccagcttctgttactgatgtaaggatgcagagccctgtcaggagttaggtgtcaagtgaagtctccttgttatggggcagtgcagctgtaggccaagctatatccgtttgggaagggagaaaaaacagtagctggcatccatatccacttctccgggtgagtggtgctggagaggtatgtaggactcaatgtggccagccacacaaactaccccatattgtaatatcctgtctgtcccttttgttctttttatgtgccattaatatctgctaaatgtgactgaaaatttgttagtcacctaggcattagtggagcaaaccctgaagcacctgcagtaaggagtctgaaacatacgtgctgacctttttgcctaaagttggcacttgtgttacagcatccagaaagtagaggctttaattttttcctcattttgtggtggatttgcatctgcactttattgtattgttatccattgcgagtagcagcatgtagtcattagatggatggctagatgtcaggatgcagtttgtgccataagtggaacaaagcaaagagaatagtccctgtaattcgtcctgggtttgaacctaacagcattactaagcagagagcttgggatccatctgaaagctagacctttagagatttttcaatttagtgaaaaaagataaga

SEQ ID NO: 56373 - DNA, 1073 bp, Homo sapiens
agctggaattaacaggcgtgcgctaccatgcctggctaatttttgtatttttagtagagatggggtttcgccatgttggccaggctggtctcggacttctgacctcaagtgatccacccgcctcggccttccaaagtgctgggattacaggcataagacactgactgcacctggcctttaagtttctatttaaattttattttctgttactgtaactagttgagtgatggattttatttatttatttatttatttttgagacagagtctcgctctgccacccaggctggagtgcagtggcgtgatctcggctcactgcaacctccatctcctggattcaagtgatactcctgcctcagcctcccgagtagctgggattacaggtgcacgccaccgcgcctggcttatttttgtatttttagcagagacgggtgttcaccatgttggccaggctgagtgattgatattttatgattccttctcttgagatacttcagactttgtggaatgaggtaggggcataaatattaaggcgaactggatttattttgtagagcttattggaaagtgatgttgaaagcactgcttcatctccacgtggggcaaagaaatccagattgaggcagtcttctgagatgactgaaacagatgaggagagtggcatattatcagaggtaaatcggcatcatacaaaagagatgttagacataactgtctaagtagattttttaactgtataagtagattatttatccatggtgattctgggctgtcaccctttttcaaagtttcttaagttagtaaacagttcagagaaggctagaactcagtgatagccaaagaacttttctgagttctcattaaggggccaaaaatgtgcaactagcagagtttcttttctcctacccttctcttctttcatatctgtgctttttaatattgtcctaaagccattgttattaatttcccacattttggtaaactaagtagcattctgttgacttctctagaaataggatgaaaactaattagatcaatacacttggtgtctttgtttttatgtaactctaacta

SEQ ID NO: 56374 - DNA, 1062 bp, Homo sapiens
gggcctgcaaccacgcccggctaattttttgtatttttaatagagacggggtttcaccacgttagccaggacggtctcgatctcctgaccttgtgatccgcccgcctcggcctcccaaagtgctgggattacaggcgtgagccaccgcgcccggccttgttattttattattattatttttttagagacagggtcttgctctgtcaccaaggctggactcaaactcctaagctggactcagcgatcctcccagttcagcctcttgagtagctgggactacaggaacatgcgactatgcccagctaatttaaaacaatttttttgtagggagggtgtctcactctgttgctcaggctggtctcaaactccttgcctcaagccatcctcccaccttggcccctaaagtgctaggattataggcatgagccacctcactgagctgtgatttttattgaggatttcctttctgtttttttctccttaggagcctaaaatgacacgctctaaactgaaggaagtagtggaaaaaggagtggtaagtattctgtttttttgttgttggtttttttttagcttggtgaataggatctaattcacccatagggaaaaatataggaaagattgtggtctgaatttgcctctttaaagaaatatttataaaagacagtagaattgtttctacatgatcataagctatgataatcatagtttattttagtagatatgaagcattgctttttggaattgctagatagataaccatttggaatagttgaaatcaataggtgagaccagtttttctatttatgttacaacacatgttgcaaagtgtttagtatttttcatagtgtgttccaggggccagttgcataaaaatcactttggtgtgggatccctcaggcatgcttattaaaaatgcatacttttggctgggtgtagtggctcatgcctgtaatcccagcactttgggaggccgaggcagatggatcacttgaagtcaggagttcgagaccagcctggccaacatagtgaaactctgtctctactaaaaatacaaaaatt

SEQ ID NO: 56375 - DNA, 1374 bp, Homo sapiens
tcgctctgtcacccaggccagggtgcagtggcgtggtctcggctcactgcaagctccgcctcccaggttcacgccattctcctgcctcagcctcccgagtagctgggactacaggcacccaccaccatgcccggccaattttttttgtatttttagtagaggcggggtttcactgtgttagccaggatggtctcagtctcctgacctcgtgatccgcccgccttggcctcccaaagtgctggattacaagcgtgagccactgcacccagccattgtatccctttcattccattctctcatcctttatttggtgtgtctggagatgtgtatggtcttttgtgattgggcagcagcttaaagggggagactactgcctgggacactgggaaaggctctactgagatgaatgacccttccaatttgaaagatgaattgcggtttaacagaaagtggtatgggcacataggccaagaacagtgcacagagatagactggcagaaaaggatggtgacatggttgcttggaacaggtggtgggagatgacttcttttttttttttttttttttttgtgacagtctcgctctgttgcccaggctggagtgcagtggtgtgatcttggctcactgcaacctccacctcccatgttcaagtgattcccctgcttcagcctcgcgagtagctgggattacaggtgcctgccaccacgtccagctaatttttttatttttattagagaggaggtttccccatgttggccaggctggtctcaaactcctgacctcaggtgatccacgtaccttggcctcccaaagtgctgggattacaggcgtgagccaccacgccctgccaagatgactttagagtagtagattgtactaaggttgtgaaaggttttgtttttcataccaaggcatttgagcttttcctgtaggtaggtgatagtcatttaaacgtctaagtagaacacatttatgctttagaaaagataccaacttctcttattcattttttttttgatacggagtctcgctttgtcgcccaggctggagtacagtggcgtgatctcagctcactgcaacctccacctcccctgttcaagtgattctcctgcctcagcctcctgagtagctggtattacaggcgcccgccaccgtgctcagctaatttttgtatttttagtggagatggggtttcaccaggttagccagcttggtcctgaactcctgacctcaggtaacccacctgcctcagcctcccaaagtgctgggattacaggcgtgagccactgcgcccggcctagattgtgaaggtttttgtttttcatactaaggcatttgagcttttcctgtaggtaggtgatagtcatttttttt

SEQ ID NO: 56376 - DNA, 1029 bp, Homo sapiens
acctcaggtaatccgcccgcctccgtctcccaaggtgccgggattacaggcgtgagccaccgcgcctggcccccaaattagctgttaatctaaaccactgaatcttaacctcagttttgagtaggataactccatgggcagagaaagctaagtagtgcctttaaatttttttgccaataactgacgcactaacgttgtggcttcactctgccctaaaatgggatggcgcatagtgttaggcgcatgctccttgatgcactgcggcgcggcgctccgaggctcggggacgcgcacgcaattcgctgttgttggctgacttccggtggtgccaaagccgtttccgtggaatcaggccggctggtgagggtacaggtttgtgtgtggtggggtgggaagaggcaggtgggagctgggacacctggacgaacgatgtccaggttgagaaggtcgggtctgagggtgggcgctgggtgcgtggcggaagttaagggcgtgaagtccagtgtctagttgggaatggggactggagccagccctgggcaccgaggtggaagcgcggttaggaccccttttgaaaatgttttcctaggagagggccgtgccggggctgcctccacattggcattcattcaccctgctggtccgacttgggttcccaaaaaagtggattctgtcgagctactgctgtgtttgaggtgcctggagctgaagtagctgtctttctttccttctttttctttctttctttttctttttttcccctttttttgatctcagtaattatctgtgaaataaaagagctgccctggctactcccattctatttcttataaggtcaccaccatctctcacaggaatcaacgaaatcttcatgttttattgagctttagttactgagttttaattacatcagttgattgaggggatggagaatctcccctaatgtcttggagaaacagaagggaggtttaaaactaactgtaggtcgggcgcggtggctcacgcctctaatcctagcactttgggagg

SEQ ID NO: 56377 - DNA, 1002 bp, Homo sapiens
tctggttttgaattcctggcctcaagatcctcttgcctcagtctcttgagtcgctggaattataagcacgacccactgtacccgggtacattttaaaataatatagataaggagcaaaacattattaacaaaataaatcaaggtgaccatgtctatatccataccgaataataatagtgtttagtctcaaagtattaaatgaaatagcttttagggaaagttttcacaaaatggagacagccttggtagtaagctacttgaaggcaggcaggaacaatatcctatggatctttgaatccctcaagagtctcttgcttctaataggagttcagtaaatatttggttgaacaactaattggattcagttgccattaagaatgggcacagcctaaggaagtggctctccattcatcaatcaggtgctttcctgcaaattgtttgctactcattagtgaaactgaacactgtctctatgagaagaggaacacagcaaactaccaagacaggcatattttttggaatgatcataaagagagatctgaaggcttagattaggagacacctgggcaattcttttggctctatcatagatttattccctgcagcagtgcggtggaggagcggggggcaacccactgctgcttacatatttacaatgcatcaacttttattgttagaaaatggagatagggtagaaaagagagaagatgaagaattctcatattccaggaggatagagaaggaaaagaagagaaacagatgaacgcatctttgaattatctagttgttccccctggccttgtttcctatttttgctgttctttcttcattttagtatttgttaactcttgcctctctccctgaaaccaagacaatgagctagaatcatcaaagatattaaaacctagagctctctgtcttgctttagtccaaagcttggtgggaaatggaagttgaaactaatggctgaagtgagtgttttaaagtagctataaattgcag

SEQ ID NO: 56378 - DNA, 1021 bp, Homo sapiens
gctctggatcttgtatagaccaattacccatcaaaatggactatggggaagaactaaggagccctattacaagcctgacccctggggagagcaaaaccacctctccatcatctccagaggaggatgtcatgctaggatccctcaccttctcagtggactataacttcccgaaaaaagccctggtggtgacaatccaggaggcccatgggctgccagtgatggatgaccagacccagggatctgacccctacatcaaaatgaccatccttcctgacaaacggcatcgggtgaagaccagagtgctgcggaagaccctggaccctgtgtttgacgagaccttcaccttctatggcatcccctacagccagctgcaggacctggtgctgcacttccttgtcctcagctttgaccgcttctctcgggatgatgtcattggcgaggtcatggtgccactggcaggggtggaccccagcacaggcaaggtacaactgaccagggacatcatcaaaaggaatatccaggtgagtaggaagtgtgtgttggggagcaatggtaggttgggggagaaaatatctcaggggataaatggaagtgggaggggagtgggttgggtggcaaagaagggctgtagagaggaagctcttggatgtcaaggataagcagtggtcagagtaagacagagggcctggcagatgaggtctcctctaagaagcaacttcctggtgagagaaggttcaatagctttcaccatttcacttagtggttggcatcctgatgctgtccagcttacttggaacaggctggcctaccatttgtagatccttcattatatcagggatatgggagctaatttcctctccaaaatgatgtgatcttcctccagtgaatttatttttcacagctgagaagctatgacaataattcagtaatttttccctcagcttccctttcccaaccctaacctaggggtgtaaatgataccatgtacatgtcttttttttttttttttttttttttgaga

SEQ ID NO: 56379 - DNA, 1050 bp, Homo sapiens
gtcccagctactcaggaggctgaggcaggagaattgcttgaacccgggagacagaggttgcagtgagccaagatcacgccactgcactccagcctggcgacagagcaagactccgtctcaaaaaaaagaaataatgaaacgttgcttttcccccacctatccttcctctgtatataaagttagaatcatatttaaagactgcatatttagtatttagatactcagtattgaaggatggccccagaaatggatatatcaaacctagctaacattttattattattcatggaaacagacgggagcagtagccaaaacaatgcaaaagtcctttctagatcagtgccgtctaatgatgatagaaatgttctatatttgcaccatgcagtgtggtagctactagctacatgtcgctattgagcacttgaaatgtggctagtgtaactgaggaactataattttaattttatttaatttaaattaaaatgtaaataggcacgtgtagctagtggctactgtattggatagctcagttctgaatgttttggaatccattcaattttcttttccatatgggattacttttcatttgatgtggctaatagtaaaaatgagtttatattcactgattacattctgatttctggcaaaaggaaaaagcccagaagtatactggttggcaagagcaaccagactgtaattcaaaactggctgagggccaggcatggtggctcacgcctataattccagcacttaaggaggctgaggtgggcggatggcttccactcaggagatcaagaccagcctggccaacgtggcggaaaccccagacatggtgattcacgccggtaatcccagctactcaggaggctgagacaccagaatcgcttgaacccaggaggtgggggttaccgtgagctgagatcgtgccactgcactccaacctgggtgacagagcaagaccctgtctcgaggggaaaaacaaacaaaacaaacaaaaacacattggctgagggaccaagcatggtggctcacacctgtattcccagcact

SEQ ID NO: 56380 - DNA, 1025 bp, Homo sapiens
cctgggctacacagtgagactctgtgtatagaaaaaagaaaaattagccagatgtggtggcacacacctgtagtcctagctactcaggaggctgaggtgggaggattgctagagtccaggagatggaggctgcagtgagccaagatcacgtcactgaattccaatctgggcaacagagtgagaacctgtctcaaaaaaaaagagaaatagtcaggatttgaatccaggctaatctggctccagaggtcatgctcataaatccaaggctatgtgggctctccatgcaaattatttaatatcagaattatggttataatgtttcctttctccctccttgttaaataaaatcataacacctttccaggggatgagcatctttccaaaaaacttatcatccctgcacttgtcctcccccagactcttcccactgctctgcacactttttgtgctctgccctgcaccctctgccaggattctcacctgccattttttcctcacagaagtgcatcagcagaggggagctccaggtgtctctgtcatatcagcctgtggcacagagaatgacagtggtggtcctcaaagccagacacttgccgaagatggatatcaccggtctctcaggtagcagctatttacttcaacctatttcttactgtctgaaccatccccgactccttgcctgtggcccagatagacctccacacttcaagatccttgcctctttcacttttaatctgctcctctttctgtagacattctcttcctgatgagtatctacgtccaatagatttccctggctaggaagattcttcagttgaacaaatggggtctttacatttggcaaggtatcctaaataatattcatgccaggtgctaagagagacttctcaaaaaggctgcaggcatttgtctctgtgccctttaatatacttcttggtatcatgggatttcttcagacctaacctgagaaagttgttctgttctattcctgcttggtttccttggcccctcatccaggcaggcag

SEQ ID NO: 56381 - DNA, 1024 bp, Homo sapiens
gagcatgcccggctaattttttgtattttcagtagagatgggtttcaccatgttggccaggctggtctcgaattccagacctcaggtgatccacccgcctcggcctcccaaagtgctgggattacaggtgcgagccaccgtgcccggcctctggttttgttttgttttttttttttaatgggggacaaaagagagggaaagacccctataaatctatatataacaatgtaaccatatacttgcatgtctaatacaaactgaagaaattagcctaactgccaatatcaagttgcagattttaatccatggaaattgtgttttgtgctgaattgtatttgctgattacctgaaattggcttctttttattgggcttctctggagaatttctcccactccccacctctgcagaagaaaattttgctcttataaaacctcatgttttcatcattcccatcttttctttttattgcctcttatatctctgctctttgacctcaaggtctagaggtctgcagtaagccaagaaacaaaggtggggtggatgaggcaaggtttgcaggagaaagaggaattgagaaatggggtatttttgctatcagctcttctgctatgaagtagtaaaaggcagtctataattaactgacagacctaactgaagcacagagaatacatcagacttatgcatccaagacatcagaacttggattttatcaaacttgatgacttctctaaaaggagctttggaaacttcaaattcagctataggatagtaccaatgaacacatccagctgatcccaaaagctgttttcaggtataaggacaaggagaggagacaagtgacgacagccattcccctttgcagctatctactgtagtgacagccatttcttggttgatgggttggaagtcatcagaggtttgaagaattacactggcctttgtttttctggaaatgccgaccatggagatgctttagagtcttctcaaatagcttagatgttgtaatgaggttagctttgctt

SEQ ID NO: 56382 - DNA, 2347 bp, Homo sapiens
tttgtttccaaccaacgtgtatctagaaaagagttagtcgacttattttatacatagcatcagtgaatagtaatgagtggtaggtcatttcaaaatcctgttgcctatattatgtgaataccaggaggtcatctgatacggacttaataaaggttgattttgctttatattgggagctgagccacacctccccttataactctattggtcagtaatggtcagtttgtggctgttaggaaaatgttgccttttagcattccagaactctaaatcctgtagaggtacatgggatattttattctttgcctgtactcataaaaatgaacagaagaaaatacgtttttttcttttcttaacttcttttcttttaactctttaaaaggtgaaatatcagccctcaagagactcacttgctaactttcctttttttctttttttttctttttttgtgtttcttttttctttctctgttttcttacatggttctggtggattcacatttgctgatgctggtgctgtttttcgtgtgatcttcaacgtttttgggtgaccattgaccctgtgacctcaaaatggtgtccaactaaccacttaaaattaacatcttttttttaattaacgaatttatggtatttttttttttcccttggcggggatggggttggggttgttttttctctattctagattatccagccaagaagatgaaaactacagagaagggatttggcttggtggcttatgctgcagattcatctgatgaagaggaggaacatggaggtcataaaaatgcaagtagttttccacagggctggagtttgggataccaatatccttcatcacaaccacgagctaaacaacagatgccattctggatggctccctaggaaacagtggaacagagttttgaccctcagtgactcttcttagcaataatgcatgcatttgatttaacaagactctggggcctgtgctgggaaccatctggacctttgcagaagttagagattcagtgcccccctttcttaaaggggttccttaacaaccacaaaaatccttatttctgcagtggcatagaatctgttaaaatttaattagaatcacaaatttatctcagaagctttttaacagttggtgaaatgtgcttgtccaacaaagcatcctaacagggtcgttcccatacacatttgacctggtcagccttttccaggtgaatagccccagttctgacataaagaaagttttatttgtattttactactgtttggtcaattttgatatataactggttacaaacagagccttactatttattagtggggaaatgattttaagaccgtccttttcagtatttaattctgacagatctgcatccctgttttgttttggattatttctgttttggaaaatgctgtctcatttaaaactgttggatatagctggatcctggataggaaaatgaaattattttttcattgtgttttttaattggggtgatccaaagctggcaccttcaggcacattggtctcatagccattactgtttttattgcccttctaagatcctgtcttcagctgggtcagagaaaacttcttgactaaaactggtcagaactcatcacagaaatgaaatacagtggtctctctctcccagaactggttgcagctaaaacagagagatctgactgctggctataggattttggacttaatgactgaaattgcaaattgtcctttttcttggcattacagattttgccaaaataactttttgtatcaaatattgatgtgtgaaagtgaaggagctagtctgctgaaccaggaatagtttgagatattgaactgtcatttttgcacatttgaatactttgcaggctggctttgtataaacttatcctctggtttcctatatgttgtaaatatttagaccataatttcattataaataaatctataaatattctgcttgtggtttctctgttttcttccacaacccatccatacactgaaattcataaacttttttactcatagcacaatgcaactataacattaccagaaaaatacatatacagaccccaaggtttgcatatagttcccagagttatgtaactgcaaaatgtacccttaaagttcaaatgaaaaggttaaggattattatgctggatattttccattttcatattttagccctcctttatttaacagcgtattaaaaggacttcatgaatgaagcgggttttaaaggaaatatgttattcttggaaagacattttatttttttttgagatggagtctcgctctgtcacccaggctggagtggaatggtgcaatcctggctcaccgc

SEQ ID NO: 56383 - DNA, 1105 bp, Homo sapiens
gtaatgatcattgctatgagcttaagtattctgaaactgaaatgaaatctttgaatcaaatatgcttctgtttgttgtaattgatgcaatgaagtaaaatatgataggccttttacagatttagaagcagttatattcggttttgaataatttattacttgttcagacatctttcttgacttccattgtctgcatcttggccattttcctaagggtagacagtaacagaaatgttacataattcagctatttttgctactttagagtcattagaatatcatggatggaagtacatgaatgtgggagttcagcctgccacacagtgcttgaattttcctttcttatattagtatattaaccttcataagaaaggagctgatatctttctataacagttcattcgatttttgtcatggcaattgctgtgtagacaggccttatacttttataaaggggctgggggaaggtggaaggggttgaaattaatggttaaaatgaatttgaaggattgtctgcagacataattgcacttctaatccactggataagttaagaaaatttaaattgtctgaaagaaagtttcattttgtttttcaataggcagttgatgcctccaccagcctttccagtgactggaataaaaacagagtccgatgaaaggaatgggtctgggaccttaacagggagccatggtgagtgtgatatagctgggggaacaggggagtggctaagactggtctaaagctattagttttctcagccgggcgcagtggctcacgcctgtaatcccagcactttgggaggccgaggtgggcagatcacctaaggtcaggagttcaagaccagcttggccaacatagtgaaatcccatctctactaaaaatacaaaaactagcgggcatggtggtgggcgcctgtaattccagctactcagggggttgaggcaggagaatcgcttcaacctgggaggcagaggttgcagtgagccaagatcagaccactgccctccagcctgggcaatagagcaagactccatctcataaataaataaatacataaataaagctattaattttctaacctgatgttcattcaggtgtttaat

SEQ ID NO: 56384 - DNA, 1288 bp, Homo sapiens
caagcattagcagcatttataaataacagaaagcttattacagaaagctaatcacatcgactgtcagtggttggagttctgtttgttaatggtcatgtttactcctagtagcccaaatgcataacagagttttcttaaaagttcaaagcactgtatataggttgtcaatttcatgtttccctaggatgaaggtgagaaggcttaggtgataatgttaccaaattatacatgaaggaaactaaggacctgaagatgcaaaattcatatgatacttattgatccttaaagtatattgtaatcattgtttacttattccttgggcattctcacactttttttcttccttggtttgttttggtcccagagtccgatgggtggtccttttattcctgctgctcctgtcaaaactgccttgcctgctggcccccagccccagccccagccccagcccccactcccaagtcagccccaggcacagaagagacgattcacagaggagctaccagatgaacgggaatctggactgcttggataccaggttaaataaaataccctgttttcctatcttcaccttattcttctactatattctccctttaaaaaagataaattcacatcattctcccagtactaggatttctgctttctggaattcattttggttaggttttttatcctattcaacagactcttgaaagcctctgagagttcttactttcttatacatctcactcaaagctcttgatctaccagtatgtggtttgtatttaaaaccttggctttcagtggtgctctctcttttaccctccacctaaaaaagagagtgatatctccctccagtctccccacccctcaagactgctagaaaaggagtgattctgtacatgtaattgtaaagttagccactaaagttaaaaagattcttaatttgtagttttggtgcaattttatcagaagtacctttccattttgccagaatccttgaatcattctttaaaccaaagcatttttttatagtttctagctaggtttatagaaactagtggagctatgggcagtcagttaaaaacaggccatagatagcataatgaattataacacccctgtccaagtcctatagagaaaaaaaaaaatccctacttttgactacagttacacagcagatcccaaagagctttgtagtagtttaacgtactacaacttatcagaaagatgaggcacttgacagttacattaaggagctaaagtcaatacggcagttgtagatttgctaatgccactgtatttt

SEQ ID NO: 56385 - DNA, 1035 bp, Homo sapiens
ggaggtcatggatgcagtgaaccaagatggtgccagtgcactccagcctcagtgacagagtgagactgtctcaaaaaaaattttaaaaagcaacattatgtaagagatatataaacttttcaaatgtaaggattataaatgctggtatgtttcttttataacttaagaaatgtatacttaaaaaaattttttttttgagacagagtctcgctctgttgcccaggctggagtgcagtggcgcatctcagctcactgcaagctccgcctcccaggttcacgccattctcctgcctcagcctcccaagtagctgggactacaggcacccaccaccacgcctggctaatttttttgtatttttagtagagacggggtttcactgttagccaggatgatctcgatctcctgacctcatgatccaactgcctctgcctccccaagtcctgggattacaggtgtgagccaccgcacctggccacaatttcttaaatcatgaaagtagaattttaggaaaagagtagatgtctggataataatctggatggattatatatactggtcttggaggcaggggagagacttaatgagagcatggtaatggatttatggtgggtccttctctgtgggcctctcatagtgtacccatgccatagcaaatggcagcctcgaaccattgcccagtccccttacctgtgggctgtgagcactgaagggggttgcacagtgtgtaacaaaaaagctatgaactaaattttatttgtggtctctagtcaaatttattttattttatttatttattttatttttgtttattattattttttgagacagaatctcattctgtcacccaggctagagtgcagtggcaccatcttggctcactgcaagctccgcctcccaggttcacgcgattctcctgcctcagcctcccgagtagctgggactacaagcgcctgccaccatgcctggctaattgttttgtatttttagtggagatggggtttcaccttgttagccaggatggtcttgatctccta

SEQ ID NO: 56386 - DNA, 1443 bp, Homo sapiens
ttggaccagcctgaccaacgtggtgaaaccccgtcacgaacattacccgggcatggtggcaggcacctgtaaccccagctacttgggaggctgaggcaggagaattgcttgaagccgggaggtggaggttgcagggagctgagaccatgccactgcactccagcctgggccacagagcaagactccatctcaaaaaaaaaaaaaaaaaaaaaagtgccaagtaatacatacaaagaaaaaaaaatcgtgaaattccaaattccaatcccgaaagttacctgccataggtattctgtttgtgtgttatccagctctccacggtataatgaacacctgatcacacatttcttcatattgatatattctagaaaggagattgatagagcagaaggtatacatgttgtacattttgaagttagtggttttaatttgtatttgtaaacttgatgacaactggaggactaagaaggctgagtctgatgaagtaagactttgctgatacattcctcctagaaaaaagggttggagagagcagccttcactgaagagtatcacagggctgactgtactacccaacactctaccccagttttacaggagactgtctttgctataatttcttattgacttatttcaaagattgaggatttaattatatattctgtttaatctgaagtattctgttcttcctacagatgcattatgttcaagataaattatttgtgggtctagaacatgctgtacccacttttaatgtcaaggagaaggtggaaggtccaggctgctcctatttgcagcacattcagattgaaacaggtgccaaagtcttcctgcggggcaaaggttcaggctgcattgagccagcatctggccgagaagcttttgaacctatgtatatttacatcaggtatggatggatagggcaggggacatgtgaattcttgtcaacttgttggtacagtcaggagtgattcagaaggagcaagagaaaactgggtgtaattaatagtaatgagggatttagataaatgctaggagtaattactttataattagttaaagaaattgtagaattggggcacggtggctcatgcctgtaatcccaacacttctggaggccaaggcgtaggaccacttgagcccaggagtttgaggccagcctgggcaacatagcaaaaccccatctctccaaaaaaattttaaaaattaggcgggcacggtggctcacacctgtaatcccagcactttgggaggccgaggcgggtggatcacgaggtcaggagatcgagaccatcctggctaacaaggtgaaaccccgtctctactaaaaataaaacaaaaaaaattagccgggtgtggtggcaggcgcctgtagtcccagctactcaggaggctgaggcaggagaatggcgtgaacccgggaggtggagcttgcagtgagct

SEQ ID NO: 56387 - DNA, 1015 bp, Homo sapiens
aatttttgtaatttcagtagagatggggttttgccatgttggccaggctggtctcaaactcttggcctcatgtcatccacccacctcagcctcccaaagtgctgggattacagacatgagccacagcacccagcttgccccattgatttggatagacgagaccacatttgtttataacctattagacaaccagcaaaaaggaattctgttcttaaatattgggttatctcaatagactggaaaataatggtagtgaatccataagaacagatttgatctgaactctgtgggccagttgacttttaaaatcaagaagtttatttgttccccagctgttaaagcatgttctgagacattagctagcaaaaacccttctaatgtatatagtcccttttggttatttggaaacttgaaacattacaaattagatctggtgacccatttgactccttttttggttttgaccacattgagatcatccttttttgtttctctttatagggatcgtccattatatcttcatgttcagggccagacacgggaattagtggacagtaagtaatgtttttggctcacgtagcactttttgtgaagagcaaagtacagggctctgtatagcaagttggcaaagtgtccctgatggctgttctaacccttgttcatgaactatacacgaatttgtatgggagtttagagggatggagagccacatatttgggtaacgtataaagcagatttacggtgaataattgaacactggcctgcctgggcactagtcagttcattccattcagttttactgtctgtgtttttctaaggagctgtaaaccggatcaaagaaattatcaccaatggagtggtaaaagctgccacaggaacaagtccaacttttaatggtgcaacagtaactgtctatcaccagccagcacccatcgctcagttgtctccagctgttagccagaagcctcccttccagtcaggggtatgttttggggagggatcgttaatagcatta

SEQ ID NO: 56388 - DNA, 1115 bp, Homo sapiens
cattgagactctttggggagggcggtgagtggattcagataaagaagacctctaaatagacaggcgtcagatatttattagtgggtttgggtcatagtctctaaagtcaggattgggtttaatttaacttcagaggaagataatggaatggatataaatgaattctctgggttggtttgagtaagaaaccatggaatcaaaatttcagatacaggagagaattctttccttctttacttggttgaatgaatgaatgggaagaaaatctgtctgccattgaaatcaaccaattgccacatttttttaattgaacatttccttttttagatcagccgacttagtggggctgcagtatcaactcgagggaggttcatgacaactgaggaaaaagccaaagtgggaccagggtgcgtattctcttatcttgtttatggaagggttgggtgtatgactcacgttagcctcatgttttttatccttaggtaatacgtgtacacaatatttgattcaaggtttgaggggtatgtgtgtgcacactatagcagaattctggatatcaaacagatacaagatgttgggacctgtttttggacttttatttcacatttaatgtttttattggaggaaacaaattataggaaagtgtaaaagaagatactaaccactaacatttaatgtatatactcttttttcttctttctgttccatatgatctgcagaaataatgtatatactttttttttttttttttgagatggagtcttgctctgtcgcccaggctatagtgcagtggcgtgatctcggctcacttcaaactctgcctcctgggttcatgccattctcctacctcagcctcccgagtagctgggactacaggcacctgccaccacgcctggctaattttttgtatttttagtagagacagagcttcaccgtgttagccaggatggtcttgatctcctgaccttgtgatccacccccctcggcctcccaaagtgctgggattacaggcgtgagccaccacgcccggcattgtatatacttcttaacttttttctgtggaaatagttcccctcacaaatgggctctttttttttttttttttttttgtcttt

SEQ ID NO: 56389 - DNA, 1055 bp, Homo sapiens
cggatcaggttttaccatcttactgttttttcattcttctttgttctgctgtaatagagtgaggaattattagttagatacaatttaagggtttttgagagctttacaaggatggagttagttggattttatgttaggattataggagtggcacaaagacaacttcctattgtatgcatgaggtatatgtattgtaggcattgctcctctaccttctattgtgttttactccatgtacagccaactaactgagctatagagtatcataacttggccctttaattttctttttgaaggttgtagcttctagtccctagagcttctgtaattaggtggtcataaaaatgcacatagggccaaggtcacagagaaatcttgattgtggccttcaagcagattgactttattattgactttatttaatgtcattttagtgagatttttgtttgcttgttaattcgtttatgaagaatgaccaactgtgtttacaggcagatgaagggaagggtagggaggtgtgggacttgggaaaggatagttgtacattggatgactaaaaggctttatctcagctgggcacagtggctcacgcctgtaatcccagcactttgggaggccgaggtaggtggatcacctgaggtcaggagttcgagaccagcctggccaacacggtgaaaccccgtctctactaaaaatccgaaaattagctgggcatggtgctgcacacctgtaatcccagctactcaggaggctgaggcaggagaattgcttgaacccaggaggcggaagttgcagtgagctgagatcacgccactgcactccatcctgggcgacagactccatctcaaaaaaatgaaaaaataaataagtaaataaataaaataaaaaaatagactttatctcatcataaaaactttttaatctaatttctcttttttctagcttcaggctcctggcaaaggcctaactagcaataaaagcaaggatgacctggtggtagctgaagtagaaattaatgatgtgcctctcacatgtaggaacttgctgactcgagg

SEQ ID NO: 56390 - DNA, 1007 bp, Homo sapiens
gagtttgagaccagcctgaccaacatggtgaaaccccgtctctactgaaaatacaaaaattagtcgggcatggtggcacgcgcctgtaatcagctactcaggaggctgaggcagaactgcttgaacccgggaggcggaggttgcagtgagccgagattgtgccagtgcactctagcctgggcgacccaatgagactccgtctcaaaaaaaaaaaaaaaaagttgtttgtaatcctgtaatcgcataataatttgtgttagtaaaggataaatggatatagtagttgagagatcatttagttttggaatgttccagaacacattttgttacaaatacatatttacgaggcgtttttgattgggctgattacatttatggaccaaataccttgtcttgtccttgttcacttagttcagcttaagctgtatttccatagtcatttaaagcaacataacatgtttttaatatatgtgctttttccctgaagtcagaggagttcaggtaaatcaagtgagccccatagtgtcatctctaattagaacctgtagggttttatttatttatttatttattttgatagagtctcactctgtcaccagcctgaagtgcagtagtggggtgatctcggctcactacaacctctgtctcctgggttcaagtgattctgattctgctgcctcagcctcccgagtagctgggattacaggtgcatgccaccatgcccggctaatttttttttgtgtttttagtagacagggtttcaccatgttgaccaagctcatctctgcctcccaaagtgctgggattacaagtatgagccaccaggcgcagcctattgtttgcaaagattgtgtgagtcagtcatccatttataaggtttatgaggaaaaattaaaagcatcttgacaaagatgtagtgctccttgtatattaagatttttaatactgatgttaatcgtttaagctctttttttttcttaaaataataatctttaggtagttgacct

SEQ ID NO: 56391 - DNA, 1067 bp, Homo sapiens
ttagttatggggggagaggggagatttaaaggaccagggacatgggaaccaagccatagggatcagagggccttgtccttgaacactactggggtatattcaggctcatccacgcagctgctgggttcttgccctaacggccctcccctgcaacatccgtcttggaggagaggctgcagccacagcaccctactgccctttaaataaaggagggctgtgggcagggccatgtccctttctcctctcccctcaacctcttactgctgttctccctttctccgtccttcatggaagccctgggagataacctggcttcctggagttgatggaataaaggttggggtggccataatggtttgttgggggtgagggaaaaaacccacagggaccagaatgttttgttgttcttttgttttcttttttgtaccaaagtcaactgcacgtgttttatatttttaagagatcgtaggcaattagagatcgaagcctcctatctccacatctctgaagaagttgaggggtgggggagagaatgacttctgccttcatctgcagtaacggggggacctatactgacctcttccccagccatttagaaacaagttctagggtgggttggaaaatctccaagagccctgacctcatcttccacctcagcaaccatgacctgaaacctcagcgtgaatttgggggatttttcagtggaacccttgcccccaaatgtcgaccagcccccaaatgtcgaagaattttcttcttgccaattttgttgtttaaaaaaaaaattcagggaaaattaaaaacctggaactccataaggtactgtcttccataatgtctgccaattctgaggaggatggtagtagagagccgggcagtgacctaagttcctctgaaaggggccttttcctctcaccgcaaggacagcctctgcctcactgaagagagggggcactaacaaaagtaaccactgcaaatcttttttttgtttttttaattcacaaatacaaggataaaaacaaaggggcacacaggttccaatgttgggaattccggtatcaggaaaa

SEQ ID NO: 56392 - DNA, 1156 bp, Homo sapiens
caagaggtgagatgggaattgatggtataggagactgaagggaggatgttcttagtctgagtagttagagcccagtttggagtggggtggggaaagcgtctacattcaagtatgtctccggatcctactgtccccacacccacccttgttcaacttttgggcagttctcccatcctaaagctggggccctgttcccaccctgtctgtcctcaggaggcgttacagcgattggtcaatctctatggacttctacatggcctacaggtcagtaggacaagggcttgaatggggaaggggaggagccaggctagagatgcctgtttaggtggggcatggtcatcccaacaggcctttctaaataccctcccaatccaagctctccaggagcgatgatctgggccttggagggtgaaggcgaggggtagaagagcacaggggttctgataaacccttctgcctgcattctactcccaggcagctgtggcccagcaggacactctgatggaagcccggttccctgagggccctgagcggcgggagaagctgtgccgagccaactctcgggatggggaggctggcagggctggggctgcccctgtggcccctgaaaagcaggccacggaactggcattactgcagcggcaacatgcgctgctgcaggaggagctacggcgctgccggcggctaggtgaagaacgggcaaccgaagctggcagcctggaggcccggctccgggagagtgagcaggcccgggcactgctggagcgtgaggccgaagaggctcgaaggcagctggccgccctgggccagaccgagccactcccagctgaggccccctgggcccgcagacctgtggatcctcggcggcgcagcctccccgcaggcgatgccctgtacttgagtttcaaccccccacaggtaaggtggcctgcagtggtgaatggacctggggtggacataagggtccatggagcccgaaagaaattgggccattggggatttgagcccaaatgcaatcagtcaactgacttgaaggatattgagatactggttggagaactgaaaagaaatgtagatgggtgcaggggtggaggaaattaactcgggtcgtggtgctgaaagaggccagttggtggtggatctcctgaaggggact

SEQ ID NO: 56393 - DNA, 1140 bp, Homo sapiens
atcctgtttgcttgatgccaaagcctgtacttgaccctctgcactgtgctgcctttccaagcgacctttggagagatatatctcagtaaacgcagataatcagtgctaagaaatgggagaaggtcggccgggcgcggtggctcatgcctgtaatcccagcactttgggaggcggaggatcacctgaggtcaggagtttgagaccagcctggccaacgtgacgaaaccccatgtctactaaaaatacaaaaattagccaggcatggtggtgcgtgcctgtaatcctagctactcaggaggctgagacaagtgaatcacttgaacccaggaggaggttgtagtgagctgagatagcgcccttgcactccagcctgggtgacagagtaagactccgtctcaaaaaaaaaagaaagaaaagggagaaggtcaggactaaattaaagctagggtgtgaggctgaggagtcttatcagaagatggaagcataaggcatgtttgggaaggagggaaggctgattctggtctataacctagcttctgtctctcaatggcatgcgacctgttacccctccagatgcccatccagggaggacttccccctgattgagacagaggatgaggcttacctgcggcgaattaagagtaagtccacccacaaggagctccttagtaatttataatacattcacacaatggaatattatgcaactgttaaaaagatgagatggctctatgagggctggtgtagatccacaactgaaacatattaagtgaaaaaagcaaggtttaaaacaatgtaaagtgtatactaccatgtgtgtaaaaataatatggaagaccaaggttgggtgagtaacttactttttcactgtaaggccttatattagttagggtatgatttaactgctatactaaaagaccacaaaaatcttcttccttaaaaaaggaagtagattggccgggcgcggtggctcacgcctgtaatcccagcactttgggaggccgaggtgggcggatcacgaggtcaggagattgagaccatcctggctaacacggtgaaaccccgtctctactaaaaaatacaaaaaaaaaattagtcgggggtggtggcgggtgcctgtagtcccagctactcaggaga

SEQ ID NO: 56394 - DNA, 1050 bp, Homo sapiens
agacattcattcttcacctttctcagcacagacaagtgttttagtctcttcttgctttcctgcccaagcccacgagagctctggagtcccccagagtcaaacagctataattgttactattaccgtaataataaaaaataagagcagctcacaggtactgttactgtgcacaggcacttttacacctgtgggaaaagattattttcgtcctcattttatagatgatgaaagtaaagcttcaagtcagttaaataatttgtcaagggttgcacacatttctaagtcccttctggctggcaccagtgcctggctcttaactggtattgtaagatgactcttcagtcctttcagtcctcgtccagaaggattgaaggcctaaatatgccaagggacaggattcccaggcttaatccttcctttcccctgactggcaggacaagccttcagtggtatcgctgcagaatctaatcgtacgagacattgccaaccaggagaaagggatgtttctgatcagcgcagccccacctgagatgtacgaggtgcacacagcatcccgggatgaccggagcacctggatccgggtcattcagcagagcgtgcgcacgtgagtgtctgcctgccgcctgcatgtgcttatgacctcagggtacctgcagcattagatcccaaccatagaactccctgggaacagaatccagcattcagaggtgggggaagaggttgagggagagacaaaatggcccaagactggaaaggtcacctatgttcttatgtcctgtaaagccacattttatacattgccaacctcaactccctttcaaattcagcatgagctgacaagcaagggaatactttgagctgtcacatggtggcatacctgccagccaacagtacaatttcagctgcattcacatgttcatctgtaggcagagggctgttatttggattgtattgtattttacatttatttttctaaaaatgaatgaaaaagaggataatgaaagcatcgatactagagaggaacaagtctcataaacagactcaacacaa

SEQ ID NO: 56395 - DNA, 1943 bp, Homo sapiens
gtgatccttctgccttagactcctgagtaactgggactacagacctgcaccaccacacccagcacatttttaaattttttgtagagataagatcttgctatgttgcctaggctagtcttgctcagactcctggcctcaagtgattctcctgcctcagcctcccaaagtgctgggattgtaaatgtgagccactatgcctcgccctctgttttcttgattgtgacatccaagttttatggaattgatctttgtttcctccctcagtcttggagtgctgaccccataggatctgagagcttggagtgtgaagcagagaaagaaattgaagcaggggcctgctggggttgaaggagatgggtgggtgagggatggtctttcagtcctctgcgagaggaaggaaactttctccctccctaccaagctcaaaattagaagtgggaatatgccaggacagggagaatttaggtcagatagccgtaaaggtcttccttagttagatattagaaatggaatttaaaggctaaaaaatgtggtccaggctgggcacggtggctcatccctataatctcagcactttgggaggctgaatcaggcaggcagatcgcctgaggtccggaattcgagaccagcctggccaagatggtgaaaccccatctctactaaaaatacaaaaattagccaggcatggcagcattcacctgtagccacagctacttgggaggctgaggcatgagaatcgcttgaactcaggaggcagaggtcacagtgagcagagatcacaccactgccctccagccagggcgacagagcgatacttggtcccaaaaaataaaaaataggccaggcgcagtggctgatgcctgtaatcccagcacttcggcaggccaaggcaggcagattacttgaggtcaggagttagagaccagcctggccaacgtggtgaaaccccgtctctacaaaaatgcaaaaaattagccaggtgttgtggcgtgctccttaatcccagctgctcaggaggctgaggcaggagaatcgctttttcctgggagacagaagttgcagtgagccaagatggcaccactgcactccagcctaggcgacagagtgagactccgtctcaaaaaaataataatagaatcaaattaaattaaaaataaataaaaaataaaagtatggtccctcttgctctggggaaccttatgaatctcacaaaaatcttggaccctgtcacccaaaaaaatacacgagttatgttaatatgtaaaactatttacacaccttcagaaggtttacagagccactgaagcctgacatcccagggggtctgtaggccctaggttaagaaacctgaatcagtcaggtagaaagggttttctgtagacactgagtgatccctgtggttcctgctagcccacaacgctgttttgtctgatagcacatgaatctttctgcaccctgcccgccccccaccccccacccacactgtttttaagctgtaagaatgtgtgaccaggcgcggtggctcatatctgtaatcccagcactttgggaggccgaaactggtggataaacctgaggtcaggagtttgagaccagcctgaccaacatggtgaaaccccgtctctactaaaaatacaaaattagccgggcatggtggcacacgcctgtagtagtcccagctccttgggaggctgaggtaggagaatcgcttgaacccgggaggcggaggttgcagtgagccaagattgcaccattgcactccagcctgaacaacaagatgaaaactctgtatcaaaaaaaaaaaaaaaaaatagaatgggtgaggtgtgagaggtctgaaaaagtgcaagcagccagagggaagagaggccaggaagagggaaactgggagctctaacctgatgggataagcctggtccttgggaaagagggaagcagctgct

SEQ ID NO: 56396 - DNA, 1041 bp, Homo sapiens
tgtagaaagtgacccgccccgccgtgctcaagcggcacggggtacaggagtgcatcctgctggtgactcagcgcatcaccaagtacccgttactcatcagccgcatcctgcagcattcccacggtgagtaggcaggcccaggagagggccactgggagacggccacctggggtgaggaaaggctcggtatgaccacaggaagggtggggtcgggtgtgaaaccctgggcagcctctaaaggtggaatcaagacacgatgggaactggggtgtgagtgaaactggttgagccgttccccatgccaacccccggtgccagggatcgaggaggagcgccaggacctgaccacagcactggggctagtgaaggagctgctgtccaatgtggacgagggtatttatcagctggagaaaggggcccgtctgcaggagatctacaaccgcatggaccctcgggcccaaaccccagtgcctggcaagggcccctttggccgagaggaacttctgaggcgcaaactcatccacgatggctgcctgctctggaagacagcgacggggcgcttcaaaggtcagacctgctcggcagactaggcaggaattcaaagtcagatggagagtgggagatgcctgcaggtcttagaatcaacctctcttggccgggtgcagtggctcaacgcctgtaatcccagcacttagggaggccgaggcgggcggatcacgaggtcaggagattgagaccatcctggctaacacagtgaaaccctgtctctactgaaaatacaaaaaattcgccgggcgtggtggtgggcgcctatagtcccagctactcaggaggctgaggcaggagaatggcgtgaacccaggaggcggagcttgcagtgagcccagattgcaccactgcactctagcctgggtgacacagcaagactccatctcaaaaaaaaaaaaaaaaaagaatcaacctccctttatgcagcccatacaacagtgagactcagtgggagagaaaaataggatctctgtggcagaaaagcctgaattc

SEQ ID NO: 56397 - DNA, 1099 bp, Homo sapiens
tggtggctcatgcctgtaatcccagcactttgggaggccgaggtggggagatcacgaggtcaggatttcgagaccagcctgaccaatatgaagaaaccccatctctactaaaaatacaaaaattagccgggcctggtggtgcgtgcctgtaatcccagctactcaggaggctgaggcaggacaactgctcgaacctaggaggtggaggttgcagtgagctgagatcgcgccattgcactccagcctgggcaatacagtgagactctgtctcaaaaaaaaaaaaaaaaaaagataaaaatgattagaaaagtatctaagatcataataatgcagaatattaacctggaatggaccttgaaaacctcacgtgaactgtgaggtccttatcctagggccccacgagttttagccaagccagggtagaggccaaatgtcccaatgtcccccacagagctaatccagacagagctgcaccatgtgaggacactgaagatcatgacccgcctcttccgcacggggatgctggaagagctacacttggagccaggagtggtccagggcctgttcccctgcgtggacgagctcagtgacatccatacacgcttcctcagccagctattagaacgccgacgccaggccctgtgccctggcagcacccggaactttgtcatccatcgcttgggtgatctgctcatcagccaggtgggaaaaggcaggacccctgggtgacattcatggaaggaggtgtgactgggttgggcatttcttgggtccaaattctaggggttggaggggagccagggagagctggagaaacaggaagccagcctgtttggcaggaggccagaggtgtgtccagtgggtaaagtgtggctttgggggaatgctgacctaaccttactcgaccaacttctagttctcaggtcctagtgcggagcagatgtgtaagacctactcggagttctgcagccgccacagcaaggccttaaagctctataaggagctgtacgcccgagacaaacgcttccagcaattcatccgggtgagcggacctctccagatcccatgctcatggcccaaacccaccctccccaactca

SEQ ID NO: 56398 - DNA, 1005 bp, Homo sapiens
agggctcctgctgccccctctccctcaattcctcctgaagttatggcagagatgcctctgattagagcaggattgaaggtattgtgacctgctactgaatagcggacaaaagctctagcctgtaaatccctatgaaacttggggaaggaacccccagaaaggaccagtgatgggcaacccgctcgggtccccttctacgctgtgggagctttgtcattttgctcttcacaataaagcttgctaccgctcaaaaaaaaaaaaaaaaagaaagaaaagaaaaccagtgaagcctccctactttcctcactgttcaatttagagttgtgaggatgaggagggaaccccaatctagatccctatagagacctgacaaaattcccaatccggaagcttgttgccaggggaacaggggaggcgggcagcactattttgagagcaggtggaaagcggaggttcaatccagagacactgagtgttgggggtaggagaagggagctccaggggggtgggggcagctgcaacccccacttctgtctgccccctctgctccaccctgtttgccttgtatttgtggaagtgagcgtggtgctgggtattgtctgaaagagttagcagagtttccggtgttgttggatgggggaggggaagctggagagggccgggagctgagggcatgtctgggaagggcacggccagggtcccagtgcctaggctcagcgaatcctcctttcttcttctctcctaccccatggcaaggtggggtggaggatggcggagaagcagatggagtgtgggagctgtggatttgcctgagttgggggaacaggactccctgggcctggaagggagaaggccaggcttggtggggagttgcctgtcccttctttaccactggagccatcaatcagccttggagctgctgaggcccagccagagtccagggcatgtggtgcgagggaaggagcacggcctttggattcaggcccaccggagtgtaaacaccac

SEQ ID NO: 56399 - DNA, 1050 bp, Homo sapiens
agtggcaacaggaggcagcccagccgtaggggccaggtaggtcagggacccagaacccatccgggctggctgccccagagcctggcctggtcactcccggacagctgcctctgacacccagttgcaggctctgctttaggaactggtgtctttccagcatcctcaggctggcattttttccttgcctctgcccccagcctgtctctctggactccaggcaccctggcattttccagcctcacttcctctccctctcatcccttccacagacccgggaaaaggagaagatgaaggaagccaaggatgcccgctataccaatgggcacctcttcaccaccatttcagtttcaggcatgaccatgtgctatgcctgtaacaagagcatcacagccaaggaagccctcatctgcccaagtaagttgtttggaccctgagagtcacccagactcggtgcccactgaccctgatcttttcatctgttttttctgcctggatccatgagggtcactcttctctctgatccccagctgggcccaaatgccagggccagttgcttgatcccttgctccctgtcctcactctgaggggtggtggctgttggaatatggcataagccggactatctgggaatgtgggggaggggaggctgtgctggctcctcttgcagctgtcatccaccaggcaccccccttgctccccgaacagctgctaagggttaggggaactgattggagaaggagcaggaatgttgtatgtgtggagggggtggggtggggggtgacagaggaactgggtggaaagctgccagccttgcagctggctctgcctgtcttcctgcgcagagctgggcattcaggacttcacagtccccttgcccctttctttctattgactatgggtggagcctgaaatctctgctgtttcaagcagaagatgtgattaggacccttcatctcaaatttctagtgagaaagagggaatgtagcagggatgtgtgtgttgaggggcaggggttagaattcctgcccttcatccacatctgagtgtagt

SEQ ID NO: 56400 - DNA, 1009 bp, Homo sapiens
agtttaccctattctctaagccagaaccccgccaccaccccccactccccccgcccataggttaactcattacattttccttggagactacacagatggaaaataccatttcctccttcagaggctaacactccatagtcctggagtgcaaaatgatgcatatcagactagttccctttcccttccccacacctgttctcaaacccaagcctctgactcattggcctatcctccccattctcctgagcaagtcccaggtttccaccaggaacacaatgaacaaaagcaaatatatcctccttgcctgtaacctggccagtcttgggatgtccaagctgcagcccctgaaagagggatgtgagctggcagagggctactccatttggagcctctcgtctccatgttcttttcatcctcctgggcctggaggctctgattgctgggctaaagaaaggttaaaccagttgggcaggggagccgggggagcagaatctaaactgggaaactcggtagcagaaacaaagccggtgtttgttgggcttccctcttgcctgggaggctgttctcagaccacggcattcctgagttggacagagtcagctcagagtggcttctccccactgctgcagcagcaaaagtcactgcctttccacaggtcacgcttagagcccaactcaagggatccaggtacttcttccctgccagagctcaaagaacagaagcattacaagtaaattcaggccaggtgtggtggctcacacctgtaatcccagcactttaggaggctgaggcagacagatcacttgaggtcaggagttcgagaccagcctgaccaacatggtgaaaccctgtctctactaaaaacacaaaaatcagccgggtgtggtggtgtgcacctctaatcccagctacttgagaagctgaggcaggagaactgcttgaactcgggaggcagaggttgcagtgagctgggattacaccactgcactccatcctgggcaacagagca

SEQ ID NO: 56401 - DNA, 1531 bp, Homo sapiens
gcccaggagatcaaggctgcggtgagccgtgaccatgccactccactccagcctgggcaacagagcaagaccttgtatcggccgggcgcggtggctcatgcctgtaatcccagcactttgggaggccgaggtgggcagatcataaggtcaggagttcaagaccagcctgaccaacatggtgaaacccagtctctactaaagatacaaaaattagccaggtgtggtggcatgcgcctgtaatcccagctactggggaggctgaggcaggaaaatcatttgaaccctggaggcggaggttgcagtgagctgagaatgtgccactgcataccagcctaggtgacagggcgagactccgtctcaaaaaaaaaaactaagactttgtatcaaaaataaataaatttgggctagactgctccctttctcattggactcatattttccctggcttctcctgtgccctaatccagacttctaagcaaggtctttgttttcctttacagctggactgggcagcctttggggtcatgacccttccctccatcggcatccccctgctattgtggtactccagcaagaggaaatatgacactcccaaaacgaagaagaactgattggggcttccacagccctcctctcccaagaaatccaggctcctctcccaagaaatccaggtgctttccagactccaaagggtatcttaaatgcaatctcttctctcttagcccttggccactttctcctggatcctgccctgctctcagccatagtgaaggaccagccctaggagtctgcgagagcctccttggttccatcgtgaagccataaacaggaatgcctttggcaatagccttgagcctagagggccctctgatgccccactgaggtgctgttggtttattgctggcaacgtgaattctctcaggggtctaggaggggcattttggagactgcctgacaccacccctatcccctgcctccccctctcagaagagggtggaagatgaaatgaaagctatgggactcttggaggatacccagtgtctattctgggttagagaagtgcttactaaggggttttctaataaaaacaaatgccacattgacttgtctgttttcttagcccccgggtgaacacaggtgattattggaactcagtctttgcccagacccctgggcaagcgagctgggttctggccttgctgcaggggttgtgggcgggtcctgttcccatggagatatctgcccttttgaatcttttgcttccatcccttattttcctctgattgttgttctcatcagtcaccacctattgccgtacaccttccttgccaggcagctcctcttcacagctggagaatgtaggatggggaaagatggtctgcagaggaacagctattgtcatccccttagatctcatctgatttattgactcagtatttgttttttttgtgggttttttttttttttttgagatggaatctcgctctgtcacctagtggtgaacaccggtgcctggcacctgagtgttctt

SEQ ID NO: 56402 - DNA, 1050 bp, Homo sapiens
atatatttttgctatttcatttgagcctcacattaaccctgtgaagtagtggatttttgctggaggattaagtaaatgattaccaagggtaagtcattccacgcacaccttgccctgtagagggaccagtggtggtgagcaacttcactctttgcagagtctgaggctcagacagaagaatttggctttaatttcagttgcatgcctggcctaccttgtttaatatatgttctccatggggtatttctcaggtcttctggctcctaggtactcctctttataacacactaagagagaatcatccaactctctctagccaaaagctttccctcatcttcttgaagttcttctgagcctttgggaactaagactctaatgcatagagttgggttggttgggactgccctttctcagagtagatgaggtggaacttcatgaggtggacttcccttaatgtcgttcttttcttcttttcagattggctctaccagtgcacctggacagggaggaatcctggctcagcgggagtttgacaggcgattctcccctcattttgtaagctttctagtgttctctctcatcagttccttggtatgagaatgcccttttggttctggaccctcttggcttccacagatttgttttgttggttggttcttgccctgtgtgttttttggtgtctgatatagatactcatcaaatagattgatttagccatgtccagagatttttggcaatgagatcacaattgccaaaaccataaaactgacttaagtagagtcccatctttgagtagatacccatcttaaactcctgggtctattttgaggtttaaaaaaaaaaaatctgattagattcagagggtcatagatcattgggtaggttaagtgggaactttactgtggtctagtctaggaaagaattttttgaagatgagcctgaagtactgaatgctggaattcattcagtgaataagtatgatgttccagattatgtgctcattctgtgctctgctttggggacacagtgatgaataagacacagtccctt

SEQ ID NO: 56403 - DNA, 1020 bp, Homo sapiens
atatatatatatatttttttttttttttttttttttttttttttgaggcggagtctcactctgttacccaggctggagtacagtggcacaatctcggctcactcaacctccgcctcccgggttcaagcagttctcctgcctcagcctcccgagtagctgggactgcaggcgcatgctgccatgcccagctaattttttcgtattttattagagacggggtttcaccgtgttgcccaggctgttctcgaactcctgaactcagccaatccacccgcctcggcctcccaaagtgctaggattacaggcgtgagccaccatgcccggcaaagaagcctatattttttcattcctgcagaatattgccggcatgagatcagcatgtattggcaaatgttttgtaagtggtgcatttagtccacaggttgaaaggctgctacaactttagcttcatctctttccgttccttaactcttgagccagtgctagcaatgtctcccacactgtggtcctgcgccctctcaaggctggttatttcaacttcacctcggcaacaattacttacctggcccaggaggatgggcccgttgtggtgagttgcccaaacccttagctggatggaatttggatctgccttcccttaaaatctcttgtggtgggggtaagagggggatgaagagaggttgattaatagataccaaaatacagttaggactgggcgcagtggctcacacctgtaatctagcatttttggaggccgaggtgggcagatcacctaaggtcaggagttcaagaccagcctggccaacatgcagaagccccatctctactacaaatacaaaaattagctgggcgtggtggcaggcgcctgtaatcccagctacttgggaggctggagcaagagaatcacttgaacccaggaggcagaggttgcagtgagccgagatcacactactgcacttcagcctgggcgacagagtgagactccgtctcaaaaaatatatatatatagttagaaagaat

SEQ ID NO: 56404 - DNA, 1004 bp, Homo sapiens
gccaggctggtcttgaactcctgacctcaagagatcagccagcctcagcctcccaaagtgctaggattataggtgtgaaccactgcgcccggactattgctttaatttttttgtttgtttgagacagagtctcgctctgtcccaggctggagtatagtggtgcgatcttggctcactgcaacctccgcctcccagggttcaagcagttctcctgcctcagcctcccgagtagctgggattacaggcgctcaccaccgcgcccagctaatttttgtatttttagtagagacagggtttcaccatgttggccaggctggtctcgaactcctgacctcaggtgatctgcccacctcggcctcccaaaagtgctgggattacaggcgtgagccacggcgcccggcctgctttaattttatatccattacttactaaccctttttgtttcatccattttctagtgctgcattagacgtggaactatctgatgattccttccctccagaagactttggcattgtgtctggaatgctcaatgtcaaatgggaccggattgccccgtatcctcttggcacttggtgatgaagggtcggggggcagggagagccttgcctgcaaagcagcaggggtacttcaaataggctggatatgtgtggctgtcctcctgtcatctctctggataagatggagcaagagaggttggtgtaaattgtgtgagcatgatttagagtagacatgaagaaggaggatactgaagttcagattataagaccctgaaacaagctgggcacggtggctcatgcctgtaatcccagcatttttgggaggccgaggtgggtggatcataaggtcaagagattgagaccatcctggccaacatggtgaaaccctgtctctattaaaaatacaaaaattagctgggcatgatggcgcgcacctatagtctagctacttgggaggctgaggcaggagaatcacttgaacccaggaggcggaggttgcagtga

SEQ ID NO: 56405 - DNA, 1895 bp, Homo sapiens
gttatagtaggaatggagaaaaaaagatctacttttttggcacttcaaagggcttctaaataaagctcagggctcggtgacctgctggatgtagggaatgtctatgtgtcttgtctgagaatagaaaaaatactggttggaatagcttttctctaattctctgttcgacagtactagttgacattttagatagatgatccaaatttctaggtttgctagtttcccaaagcacctaatgaggtgcgggtcacatacagtagtgaaaaatcagcttgaaaagccccccaaagagggccgaataagaagcctggagaacgcacaaacctcttaggagcgctcacagcctctcaggcaggcgggcactacaaagggaaaggtggggcttctccaagaactacaactcccacaaggcattgggcggaacaccacggtttccggccagtgcttatttccggtctttcggatgctgacgctctcttcctgtctttgtggctccggaaaggcgtttgggatgccaacggtaagtccggaggcttagggcgtccgaacgggagaggcgagagcctcgtgtccgcgcatcaccccgtggctgggggttagctaggggagggcgggaagggcagaggacgcggtggctggaggacgtgtaaccttgcaagaggcgggaggcggggggcagaggtgattgacccccgcccccccgcccgtgggaccaagaaagggatgtgacaggcgaggacgaatgggatctcaggggctggactggagagtggggtacagggatgtgaggaggaccccgcgagtccgcggtgggatcccaatagagctgtggccaaggaggaggggagcagcgggaaggctgtgggcactcctgtgtgagggaaagctacaggctcctgcaggtccgagatcggccgaaatcaggcaccccaaggaagccctgctctggccacatggtgtcccctcagaagactccaccagccggtgggcatcccggggcttctgacaggaagagggcagtagatatattggtgcttgtaccggtttttcgagggctgcagggtgaagatggtaggagagtctggagaacgggtctgctctggtggcttatggactactctgtggaaggggctgctgttctggtagcatcgaaggagctttctacgggagcgctgtcaagaggattttggtgaatttgacgtacttggtttgataactcactttgcttttttctctaaagatgaggctgctgtcatttgtggtgttggctctatttgctgtcactcaagcagaggaaggagccaggcttttggcttccaaatcactgctgaacagatacgccgtggagggacgagacctgaccttgcagtacaacatctacaatgttggctcaaggtaactcgaggccctagagttacagattaagcctatttctggattcttagttttcagatgggaatagggagcatattggtgggtagtggtttctctttgggacacttccagcatcagatatattgagtgaatgaatacacttcgggatctacttttggaaaggaggacattcttacctaagctacaagaaaccatctttcacgtttcgggttggaagaattttagagtagggaagtggcaagaattgtggaaaaactaggagggaaagataaagacacagaaaatacacaatcccttgttacctcaggggtttaaagtgtcatcttccagcctggcatggtagctcacgcctgtaatctcagcactttgggaggctgaggcgggcggattgctggaggtcaggagatcgagaccagcctggccaacatggcaaaaccctgtcactactaaaaatacaaaaattagccaggcgtggtggcggacgcctgtagtcccagcta

SEQ ID NO: 56406 - DNA, 1696 bp, Homo sapiens
tgcaatctttaaactttcagtggctgtgcagagtcgagggaggaaccagctctctggtttactggaacatagtcttccatctataccactagggttttgtcttatgtttacttttggtaactctcttccttctttttctccctaccccccaacccctagcccaaccaatgctagaatttcttgctctgaaggaggagcaggtgaaacaggtggtaattttccttctcggcccctattctggttcattcagcactttttggtgggaactgttggaaattccagggtaaggaggaagatgcctgttctccctgtctgaagagggagatgagacagctctctggacaggaattaacaaacgctggagcagcccagaggaaattcgtgtgaaagaggagggaatgagattattcggaggaagggaatgggggagacagcctgagtaaaaggcttggaagttggaattaacagtggggagcagaagcactcatagctcttttaggcagaagaatccaggcccgagctggcagaagagacttagagatgctaatggaatttaaactgaaaaaaggagcccaatgaagctaagcgccacgccccacaaggggtcatattggctttagttcctcaagcatatgtgcttatatgcacacacacacacatttccatggacccaggtcttgcttgtgtccccaggcaccagtagtttgagcccccctcaaaagacatgaagggggttggggtctgtgtgagtagtggggaggtgcatgtgtatccacatgtgtgcatacactcttaagttgggtgggaagtggattccttgttggtttctggttcagagtgctctcccaccaccagagacaagtgggtaaaaaggtcagtccattgcaggaatatatatccgggagagctaggtcccttggggctctggatgctgggtaacccagaggtaatgtgggtaccctttctgaagctgtcagggctgtgactagcacccttatcacccctcactgccttgtgggaatagtagagggtttttttcctccagagcccctggcctttcagttcttaactatttccctccaggccagaaagttttctttgaggaaggagaggagagggtggcaatgatgcctttgatctggaattggacatttctctgtcagagcacagaggaggctcatatcacctcttccctctcctacttggcccagctgcttggaggaccgaccccatggctgagaatatgacggcaagaggaacagagtttgctccaagtgggaaagggtcccaagcagtccagagaagatgtctgtgtggctttccctccctgcctcccccagctcccacactggcctttgtaaataaatggcgtggtctttgttgtgagagtgtgttggcgtttgtttttttgaggaagaagctggctgaaaacaacttcttggttttccagggcaagagttgtgatctagaggaatttgaagtttggttcagttactacagatgttaagaaatattaaaagtggctgagatcatgccattgcactacagcctgggcaacaagagcgaaactgcatctcaaaaaaacaagaaatattaaaaggttttagcctggcaacatagggagaccttgtctctacgaaaaatttaaaaattagccaggcatggtggtgtgggcctgtagtcccagctacatggg

SEQ ID NO: 56407 - DNA, 1022 bp, Homo sapiens
cccagtcttcctgcagcaggtgagtgaggagcctagatgggtggaggttgagggcaaggggtagtccctgaagcccaatgggtggaaatgaagttggggcagagcttgactctggactcctagttgaggttgtctcctctttcctgccacctcttgatgcctttctctgcttatttcccaccagatgcagaacccagagtcactctccatccttaccaatccccgagccatgcaggcattgctgcagatccagcagggactacagaccttgcagaccgaggcccctgggctggtacccaggtgagggtaggggggcaggagggcagcaaggttctagcaacttctccccttcaactcttctctctgccactctctcagcatcctttgtgtctctgagggtctgttttcctgtttcttccaactgcttttccttctggatctcacattctcatccctttcttggatgccatctcctacctcttggtctctcttgcctacagccttggctcctttgggatatcccggaccccagcaccctcagcaggcagcaacgcagggtctacgcccgaggcccccacttcctcaccagccacgccagccacatcttctccaacaggggcttccagcgcccagcagcaactcatgcagcagatgatccagcttttggctggaagtggaaactcacaggtacatgaggcagtgggggcaggtgctgggagcaccactttgatcctgggaggtttcaagggaagcaatagaatagaggcagtagggcaagcttgggagtcaggtcctgttctgccacttgctagccttgggcaggttactgatgctccctgagttcagtttgtgcagatgtgaaatagagatgagaagagtaatggtacttacccgtgcactacatactgttctaaatgctttagattttggagctcatttacgactcatttaccacattcctcacaatagcctcatgagaaagctattattattatttctgtgttaaagatggggaaaactga

SEQ ID NO: 56408 - DNA, 1043 bp, Homo sapiens
gggatgtcttcagcagatgctctaatttctctgcactctgggggatatcttgattgggaaagttccttccctctgtgtgttttagtttccttatttgtaaagtaaggactggaacttgatccatgattttaaaattgtgctcctgcatcctggaaaggtcttcatctccaggatgaggaaggacccaatgggagaggctgcagccctcctgccccagctccagccagaccattaacacacttggtttctgagtgagatttagcatgaggaaagggtctctgctgctaagacaagtttgatctagatgatatttaatcatttctttccaaattggacataatttgagcttatggcaggaacagtccagagaggcataaatcagacccagttcctagctggcttgtccttatcaagtaaatggaaaaggggccaggccaaagcagggcaagatgaccttggacttgggagagacttggactcatgccacaatcctagggtgcccactggaccattgcttttctgagttttgtagtcattcggtgtctgaagtaaggtagattgaagtgaggccttcggtttccatctggaccctttctctcctgttttctttttttccgccttgtcctagggatgttcaatagcccagaaatgcaagccctcctccagcagatctctgagaacccccagctgatgcagaatgtgatctcagcaccctacatgcgcagcatgatgcagacgcttgcccagaaccccgactttgctgctcaggtatgaaaccagcatgaggagagtattgttggggagagagttcctcttggttgggggcagtttcttgtggtcaaaacactgtggagccagactgcctgggtttgcatcccaagctctgctgcttcccagctgtgtgagttaagcaagttatttagcctcccagtttctttatctgtaagatgataataacaatagttcctacctcctatagttgtgaggattaaatgagttaatacacgttaagtgcttagaacatggcgtgtgacagagtaagt

SEQ ID NO: 56409 - DNA, 1009 bp, Homo sapiens
gctgggaagcagcagagcttgggatgcaaacccaggcagtctggctccacagtgttttgaccacaagaaactgcccccaaccaagaggaactctctccccaacaatactctcctcatgctggtttcatacctgagcagcaaagtcggggttctgggcaagcgtctgcatcatgctgcgcatgtagggtgctgagatcacattctgcatcagctgggggttctcagagatctgctggaggagggcttgcatttctgggctattgaacatccctaggacaaggcggaaaaaaagaaaacaggagagaaagggtccagatggaaaccgaaggcctcacttcaatctaccttacttcagacaccgaatgactacaaaactcagaaaagcaatggtccagtgggcaccctaggattgtggcatgagtccaagtctctcccaagtccaaggtcatcttgccctgctttggcctggccccttttccatttacttgataaggacaagccagctaggaactgggtctgatttatgcctctctggactgttcctgccataagctcaaattatgtccaatttggaaagaaatgattaaatatcatctagatcaaacttgtcttagcagcagagaccctttcctcatgctaaatctcactcagaaaccaagtgtgttaatggtctggctggagctggggcaggagggctgcagcctctcccattgggtccttcctcatcctggagatgaagacctttccaggatgcaggagcacaattttaaaatcatggatcaagttccagtccttactttacaaataaggaaactaaaacacacagagggaaggaactttcccaatcaagatatcccccagagtgcagagaaattagagcatctgctgaagacatcccccaggccatgtgtacagtcatagtccagataaatggagcatcctctagggttgtgcagtgcataacctgttcttctgtacatggcaagccctgcacatccctttcccccag

SEQ ID NO: 56410 - DNA, 1214 bp, Homo sapiens
ggtttggagcaggaggggaaaacctagagagggcatattctgctggaggtgtgttctgctaggggccgccactgtggtgtgcctggatggacagagaatgccaggtaggggacctggggagtgagggaaaggttctggggagttaggattagtccaaggaggctggggaaagggaagatcggggttcaagtagagagccaggtttgacagcccactcccattaagccagtagttagttattgagcacctactagtgtcggggctgggggtgcacaggcaaatctgacattgcctctgccccttgaggtacaggaacacaaatatttggctacacaatgggaaaactgtgtgtaaagtgcggtgggttacataggagatgattagagaccaaatattgaaagccaccggggggatgggaagtttccaattatctgagaggttcagttatccagtcactagcatcagctagctcccaccctatggagcaaggaaggagctatccattgtggggcaaagaactgaactgaggacctctaaggtcttagatctctctcccttttctggggaaggggaggctattaagtgagaggagagaatgggcctagcccttgtccctgatttgtttcagtccttaacccaaaacctttccctcctcccagtttggcaacaatcccttctcttccctggccgggaactccgacagctcatcctcccagcctctgcggactgagaatcgagagcccctccctaacccctggagcccctcgccccccacctcccaggcccccgggtccggtggggagggcaccggaggatcggggaccagccaggtgcacccgacagtctcgaacccctttgggatcaatgcggctagcctggggtcaggtatgtcctaggatggaaggagcttagtggggtcaccagggcagcccctctgtcccaggactgaatggggttcatactgctccaggattttgaagacagaggtgagactatcgaggccacagagggggctctgccgtctgggatagtggccgggtgagggctggttctggccatgtcctgatatccctaggagtgacctaagtaatagctcatgagtaaaccaggccccacttcctaagctccatgagcacctctggtattatccagtgtaaaaggttcagactgctgtggggagagggggctggagaggaatcaaggcagacctgggg

SEQ ID NO: 56411 - DNA, 1065 bp, Homo sapiens
gtcccccttgccctaccatgctcctcactgtgctccccaggatatctcaggtccataccccatgggatggtgtgcttcccaaaggcaacaccggaacctcctcccctccagcacctagcacagagctctggctgagggagtcccagactcagttttccctactcagcctttcttgtggtctaagagctcagcagctctctttcctgagttcccaggtggtcctacctcagcccctccccaccgtagggtttcatattgagctgcttttcctgttcattgaaagtgggtcatggggaccggggctaaccaaggattctcctactctgagctgtttccttcacctcaccagatcctgttcagataacagagctcacaggccagggttcatgcaccatggtttcagcctctgtgcctgtttcagatttcttgttctgatacttgcctagcacctcaccccaccttgttctgggctcgctttattcttcctggtacactctaaggacgaaatctcttttcctgaactacccacagtgataacaaccatcatttattgagcacctactatgtgcctgacacatttattctaatgcttataatactcctctaatacaacagttctcaaagtgtggtcctgggacccctgcaagcattaaaactgttttcataattctaagacatgaatttgtctttttcactcttattctctcatgaggatacagtggagttttccaaagtctacatgacatgtgacattgcaaactgaatgcagatctgagaaccagctgtcttgtagtaagctagacatcaaagagaactacaaaaatgtaaaacaagtccatactttcctctacagttttgtttgttttggaaaataaagttatttttcaaaataatgttatttatgttaacttgtaataattttttttttttgagatggagtctcgttttgctgcccaggttggagtgcaaaggcacaatctcggctcactgcaacctccacctccagggttcaagcaattctcttgcctcagcctcctgagaagctgggatgacaggcacccacca

SEQ ID NO: 56412 - DNA, 1263 bp, Homo sapiens
aatttgaaaacggctctcattgagaggcagtgtgtttagttaagagcctggactttggtgtcaagacctgagttctggtctgcctggggcaagttaccttacctcgctgatcctcagttttctcatctttaaaatggagatacggctgggcgtggtggctcacacctgtaatcccagcactttgggagtctgagtctggtggatcacctgaggtcacgagttcaagaccagcctggccaacatggtgaaaccccgtctctactaaaaatacaattagccaggcatggtggtgtgtgcctgtagtcccagacactcgggaggctgaagcaggagaatcacttgaacccggaagatggaggttacagtgagccaagatcgcacctctgcactccagcctgggctacagagcgagactccatctcaagataaaaataataataaaatgaaaataacaatatactatatctttaactggtgaataggtagtgctcaataactggcatctatttgttgtagttgttaagagaatactgggaatagagaggagagaaaattgggtctcagaaggctgaaggtccaaagctgttgaaggagttgggatgggaggctgctctgccttacagagaactaggtggagggactgaagctgggaggcagatagcagcaggggctttctagggtgggagactctgggatggagctgagagaagagcctctcactggttcatctcctttgttaagaaaggagatgcttattgcagctggaggaatggcgtcgagactacagaaaggacttcccatgactagagatgagagcaagagagtgcagaaggtgttgaaaaagagtcagggtccctggtagggggagtccaggcagcctccacagtgacctctgcctcttgatcacagttcaaagaggaaatctcccggaggtttaaggctcagcaggatcagctggtcctgatcttcgcaggcaagatcctcaaggatggggacacactgaaccagcacggaatcaaggacgggctcactgtccatctggtcatcaagacccctcagaagtaagttcaggagcagagcagatccagcttctgattgggcctccccatctgatactttctcactcattgcttaactgtacccagagggcctaagctgaggcccaggcaggtagctcctggatgaatatgatctcatctctaggggaagggaacctgatttaccattcccagaatgccctgaagacagataatactagctcct

SEQ ID NO: 56413 - DNA, 1139 bp, Homo sapiens
caatctcagtaattgttctttaaagctgactcgttcttcacctacttgcaaagtgctttcttgtctcataaaagttagattccaagaaggacttcccacggagtggagtggaaacactgtccttgaaggcctgggagaaaggcatccccatgggcacagaggctggggaaaggcacagggactttgggtgaccctaaccctgaccctctgctccagttcacctccatctatatgtgttcaggtaggggtcatctactgtaccctggcctgggaacacattgccctccccacacaaaactggagggcttggcttctgcgtgtgagaaatcaacatttttaaagcacttgccttctaccaaccccagcttgcaatcactgggccttcccctcctatccaaggggttggaggggccccttggctctccttttggcaggaggagcctgcttcattacaccaatgactctgccatccccctccctggccctagaccccaaacacatctccctctacccaatttactcttctcgccccacctagggacagattccccctgctctttttgtcctagaaaccccgctagtttgggatggtagcgtctggggtggggagggcttccccttccccactcgagggtgcgggtggggaagggggggtgggtggagacagccctggggcagggaggatggtctctccactgtagaaagtagagtaggattgtggtcagacttaatttgaggcatctagtgaagacacgtacaaatccaccaaggaaaaagatttcaaaagcaaaataaaagcgggaaataaaacagacccaagaataatcaagtcaaagtgatgttgcacaaaatgcagagaaaccaagaagggggagggttaatgtattaaatgtgctattaagaacttaattttattaaaagtactattacttaaggctctgtcttcgttctctgcatgtaagtctgtgccatcttggggtgagtgggaggatctgggtggggattgcagcttggggtttcctctagtgtagctttgggctccctacacacctgtgagtagtggatgtctctggagttccttgccacccttaagctccccctttcagctctccatagctctgcttgagtctccaagctct

SEQ ID NO: 56414 - DNA, 1272 bp, Homo sapiens
ctcctgctcatttggggctgccaccagctctccaccctcctggttccgctggccgggccaagagaggatggagggatgggagtcccaggagatccttgtaaatagtggggtgggactgttctgagtgatcacccgagcacttaaagctccagagtcccattcttcctggatggagcaggtggaggtgcagaggggatttcctcctctccttcctcctgtcgagaattaacacctctccacagccttcccctccagaacaccagccagggaggggtggggaaggaggtcacagccaagaaaactgccctgtgacgacttccctccttcccgcctatgtgagccatcctgagatgtctgtacaatagaaaccaaaccaaatgggcaccctcggttgccggggggcaggtggggaggggggtgggaagaagggatgtctgtctgtcgtccccctccccctctccactctttacccacaaaggcagaagactgttacactagggggctcagcaaattcaatcccacccttaccaattgagccaaacctagaaacaaacacaaaacacgaatagtgagagacaaaatagaggagagaaagagagcatgagagggagcgagacaggcgaccaacacagaggagagaaaacaaaaatagcaaaaaaaaaaaaaaaaagcagttctttataatttaatattctattttaataaaggcgtttattaccatataaatgtagcaaagaacctgggctaatatgaaaaaaaaagactttttattaggtaatttattatatgaaaaggatattttattttatgataaagtgatccttaaaaaaataaaaaaactttagaaggtttagaatatatgtagggagagaagaagaaaaaaatacatttgtattcagagttaaatcttaaaaaaaaaaagtgtttttaatatatgtttgggtttacgttgcttttttcccccactttttttttggggaggaatgtcatttgcttttcttgggggagcatcccgggggtgaatggtggagagaggagctgggggaacccggtccctcctgggacccttccagtagattggatttcactccatggactcctcctcccctctccccctccccctcaggggagccggcagagccaaacaaagaaagggattaacaagaaaggaagaagctgtaggactaaggactgaggatcctggggtgtcccccaccactttcccctgccctgtcgcaggggcaagtgaggagggggaatccagaattaagg

SEQ ID NO: 56415 - DNA, 1385 bp, Homo sapiens
tggagtgtgcagtacgcatctgcgagaggacggacccagagtgtcccgtctgccacatcacagccacgcaagccatccgaatattctcctaagccccgtgccccatgcctccggggcccactccactgggcccaccctggacctgttttccactaaagccttttggaaagcggtgatttgaggggcaaggtgcttagagatactcgctcgctggggaaggggggagggaggcagtggtggctggagggtgcgccactttcagagcctctggtcaccctgtcctggaaagattgggagggggccagactgaaaattttactagagttacaactctgatacctcaacacacccttaaatctggaagcagctaagagaaacttttgttttgccagaggtggccactaaggcattctgacgccctctgcccacctcccccgctgtgtgtcactccaccccttcttccgaggagggggtgggtaaaagggagagggagaattaccacctgtatctagaggtgctctttgcaatccctaagccctctggtcctgacctccgacctcctaacatgaccctttacctcccaccccacccccatatcctgtttgggaaactgtcaccagtttccagcagtgtaagggagttggagtcctatcagaagttgcatagatcttctaggggttggggagagaagcatgtcaatcgtttctgtggctgaaaggctcagaagccatctgtccccacaaagctgggctagaggaatctggagaggagtcctcctctctgcccctgtcccctgcagtgtttcccttcactctctccgcctatcttcccttcctttgggatcttccctttcctcaactctttcctttccctccagctctttgctttgctttcttttggtggctgtcactcccagctctgtcttgttccttgtctttgtctttcttcccttccccctgcccctgcccctaccagcccagctttggggacaccatccttctggggagaagtagggggaggaatatttggatggtccctccattcctcttcaggcatctggaggccctctcccccactcctccaaagaaacatctcaaattattgatggaatgtatccccattctcagtgaaaatgtgaggaggggactaatactggggtaaagggtcaaacccccaccttcatcactatgggcattatatttagggagtagttcttgggctggattttctggttgtggaagtgggggcgccagagtagtgtgtctgctatttaaaggagcaggaaagggcgtgaggcaggaggagagactggtggagggaagagctgctcctcccatgcagtgcccgactccctgcacccctctcaacctgacctgaacctttat

SEQ ID NO: 56416 - DNA, 1027 bp, Homo sapiens
tgagtacctgggattacaggcgcgcacccccacgcccagctaatttttgtatttttagtagagacggggttttaccatgttggtcaggctggtctcgaactcctgacttcatgatctgcccgccttggcctccattgcactccagcctgggcagcaagagccaaactccgtctaaaaaaaaaaaagaaagaaagaaagaaagaaaggtctttgggactcggagggctacagaggttgggggagagaggtcactgtgagtccttctgttgttgtggatctgatctccaagggctttgcaggctcagcctaggtttggagatggacaaacgtctctgcttctcccctgggactacactggcacttcctctgccaggtcccctgcattgtctgatttccccagggagagtagctcagaggggctggggtggagtctgggccccttaggacagctggttgatgaggcccctctgggacttagggctggacccaggcgtccaggaggcgggtgatactggagctgtgacagttggtccccagattccacacccagtggcgccagctctggtttcgagctgcggtgagggagggggaggggcacctggtgccagccaggggctggatgctgtcttggggcagggagggggaggcagtaaacatgtccttcctaggttgttgaggattttctaattgccctctctgtgccaggcactgtgcaaggtactaacgagattctgcaatgcaagatgcagtctggcacagatgaattgacagcatacagtatagaattagaatgtcagagctggactagaagttgaatgaatgaatgagtaggggaatgagtgaatgaatagttcatcagttacctaatgcactcattttacagaggagactgaggcccagagaacccgagtcctgtgactcccttctgctttctgatctgtcatgcttcctttttcaggaaagggaagcaaaaggcagagagaggggtgggaagggacttgacgtttcctgagtgcatgtttggtgc

SEQ ID NO: 56417 - DNA, 1091 bp, Homo sapiens
cagtggtggaagaagggtgagtcacactgatgggcaccagcctcagccctccccccactttcctggctcccagccctgcctacctgaccctctcccttgctttgcgcccacttccctctctttctccccgacccttttgcccacccactctccctccttggctctgccctctagcccagaaggtctgaggcaatgggggcaagcttggagccgacagtgctgagcaggcaggagccaagagaggggaagcttgagcctcacgcagttaggggtgcgctggagagggtggggcccgactccgccacaccccaacggtccttccccctcctcaccactcccgcccccacccccaatggatctgggactgcccctttaagagtagtggcccctcctcccttcagaggaggacctattagagcctttgccccggcgtcggtgactcagtgttcgcgggagcgccgcacctacaccagccaacccagatcccgaggtccgacagcgcccggcccagatccccacgcctgccaggagcaagccgagagccagccggccggcgcactccgactccgagcagtctctgtccttcgacccgagccccgcgccctttccgggacccctgccccgcgggcagcgctgccaacctgccggccatggagaccccgtcccagcggcgcgccacccgcagcggggcgcaggccagctccactccgctgtcgcccacccgcatcacccggctgcaggagaaggaggacctgcaggagctcaatgatcgcttggcggtctacatcgaccgtgtgcgctcgctggaaacggagaacgcagggctgcgccttcgcatcaccgagtctgaagaggtggtcagccgcgaggtgtccggcatcaaggccgcctacgaggccgagctcggggatgcccgcaagacccttgactcagtagccaaggagcgcgcccgcctgcagctggagctgagcaaagtgcgtgaggagtttaaggagctgaaagcgcggtgagttcgcccaggtggctgcgtgcctggcggggagtggagagggcggcgggccggcgcccctggccggccgcaggaagggagt

SEQ ID NO: 56418 - DNA, 1082 bp, Homo sapiens
ctccacatctgccttaaaaccaaagagggcttcctctagaagccaagggaaaggggtgcttttatagaggctagcttctgcttttctgccctggctgctgcccccaccccggggaccctgtgacatggtgcctgagaggcaggcatagaggcttctccgccagcctcctctggacggcaggctcactgccaggccagcctccgagagggagagagagagagagaggacagcttgagccgggcccctgggcttggcctgctgtgattccactacacctggctgaggttcctctgcctgccccgcccccagtccccacccctgcccccagccccggggtgagtccattctcccaggtaccagctgcgcttgcttttctgtattttatttagacaagagatgggaatgaggtgggaggtggaagaagggagaagaaaggtgagtttgagctgccttccctagctttagaccctgggtgggctctgtgcagtcactggaggttgaagccaagtggggtgctgggaggagggagagggaggtcactggaaaggggagagcctgctggcacccaccgtggaggaggaaggcaagagggggtggaggggtgtggcagtggttttggcaaacgctaaagagcccttgcctccccatttcccatctgcaccccttctctcctccccaaatcaatacactagttgtttctacccctggctgctgtggtgtctttgttggtggacgtcgctgtgtgtactgaggtgcagactcgtgggcatgcgcgcgcgtacacacacacacacacacacacacacacacacacacacacacacagcgccgcacggtcactgcatcctcctgctcattgctgcccagccctgccctgctccaggggaaacaattagagatcagagcactttgggtgcacatctgggcactcggtggtggctgagggggaaggctttgatataaccatcaccacccactgtacggctctctcccaacggaagtccttcagagaagcagcacctgaaggagggcatttgctaactaacttccctcgtccaccagcacttactgagtgctttctc

SEQ ID NO: 56419 - DNA, 1043 bp, Homo sapiens
gtgatgcacagcagtctgcctcccctatgggactcccttctaccaagcacatgagctctctaacagggtgggggctacccccagacctgctcctacactgatattgaagaacctggagaggatccttcagttctggccattccagggaccctccagaaacacagtgtttcaagagaccctaaaaaacctgcctgtcccaggaccctatggtaatgaacaccaaacatctaaacaatcatatgctaacatgccactcctggaaactccactctgaagctgccgctttggacaccaacactcccttctcccagggtcatgcagggatctgctccctcctgcttcccttaccagtcgtgcaccgctgactcccaggaagtctttcctgaagtctgaccacctttcttcttgcttcagttggggcagactctgatcccttctgccctggcagaatggcaggggtaatctgagccttcttcactcctttaccctagctgaccccttcacctctccccctcccttttcctttgttttgggattcagaaaactgcttgtcagagactgtttattttttattaaaaatataaggcttatgtatgatgggtgctgtgtttgctggagcagagtgctccggcagagaattgctgggatgtcaagggagcaagcagtccaagcacatcagttgggaggaggactaggtttgtggggggattgttctctccaactccagactacctcctctgccctgccagctccccacccagaaccagcccacccagaaccagcccacagcactttcctccactctgagcattgctagagggtgctgcaaacttttgccttttgggccaaccacaggttggtgttgaccaggctcagcttgtatccttctgctagacaggcgatacctcatccatcactaactcccctgctgcggcccccacagttgctgtccacacctctcccacacttctcgtgactccaattcagccctgcttccccactgcagcagttggcttcaactgttggtagacaaatttatagaa

SEQ ID NO: 56420 - DNA, 1267 bp, Homo sapiens
ttacactactgagtaatggaagtgaaactcaacatggatctcctgattgctggtgttctttccgttgtatgaccttgccttctaggtgacactaccttctctcgagccagaatcttatcccagaacctagtgaatagtcagtcccatgtgaattttctggtacaaggagagtagaggtggagaggaggaggcatatgcccctgggcctatttgtccctttccattggtagggtcaatagtgagagctctgcctctaacatttcacttgattacttcaggacaaagtgctcactaattctgcgtcacctgttaggtcccttgaggaagcacgtcaacatttgtgcctgagcagtgttaaaaagtggaagaaaatccggaattggagccatgcacatgagggtctgagaaagagccctaaagaagttgggctgactaagttgggagaagggaaggctggaggaactttgcatacaggtatctgcaaagaggattttttcagagggtaaaacaagaagaatgggattgatatttccgcaggaagtttggaagttatgtaacagagcaggttgagatcctaccttttaggagcagcctgccccttttgaaggggtaaagggagtgggtgcagtgccctctcttctgttgtagtggcttatccctctaaggcatgacccttggataggggttacctgcctcggaaagtccccacttccttgtgggagtttaaaatagattggcatatgtgagagatggagacaaggtgggaaatcggatcctgtcttaggatttctcatcaggagatgctgatacttggtgtttcagcttgataaattgagaaggtgccatgaaaccaggtcctggaacagaatccctggttgctctgtcttttagctgctctgaccctctgccctgcagagcatgcattttgcatgtgcctggcaggaggccctcctgcttgagccctgctgtatttgtctgtgttgacaacgtgactgccagccattaagcttggtcagtccacagacacactaggaaagcagaggcagctcttggtttctctggaacagagctgcaagaagtctctgggcatctgcatggccaggagcttatgcttaactgttgagtgacctgcagccataagggcattaattctgccttccagaggtgggaatgacttggctttaaacagtgatttgtgtgagaattcttcaaatcccataaggtagaaggcatggtggagtagaggagaaatcttggctcatatctg

SEQ ID NO: 56421 - DNA, 1467 bp, Homo sapiens
cacagtggctcacgcctgtaatcccagcattttgggaggccgaagcgggcagatcacctgagcccaggagttcgagaccagcctggccaacatggtgaaaccctgtctctactaaaaataaaaaattagctgggtgtgttggcatgcgcctatagtcccagctactcgggaggctgaggcaggagaatcactcgagcccagaggtgtaggttgcattgagccgagatcacgccactgcactccagcctgggtgacagagtgagactttgtctcaaaaaaaaataaataaataaaagaagcccgcccagcacttaaagtacctggaatgcttctcactctgtctgctaccttgcatacctctcctccatcacatgcccatgcctccaggaaatcttactggtttcttccagcctttattggagtcctattccatagcctattagcatagcctatcaacgactctttcctttaccttgcaggtttgtggttataagaaatatcgatttcagttaattcataagtctgtctggtttttccagtaggccataagttctctgtggattatgagagtgacttaaataggtttcacagattttatggtgtggatgcagcaaaaccctgacaaagcccatagtaatggttgtcttcagtcagcttaaagacagttacacagcacctagaccagggaaatagaatctgaatgatgatatgtaatatgcaaatagtaggtgttgccatataaagttttatgtctgatttgaggtggagaatcaaagttgtacaagagaatgaagtcactgggttatggtgaggggaggagggaaggaagataaccttaacaggttggagataaaatcagcttccctagtaccaggatgttgggaagcagataagtaacaaatataggtatttttgttcctaggaaagaatgccccctcatttgaaaatgaatacactggcatctggttggtttgcaaataataaagtgcacagggtcagtcctcattctttcctgagccttgttctgggcgttctaggaggagatccaagggaaaggacaggtctctactttgaggagcttccaggctggaaagacccagaggcataggtgaaaaagtccttgacatggctgtggaaaaagtggaagggttagggaagcagagacggtcacatgagagagtattggagaggaagaagggagtgcggaggagggtgctgaaggaggtagggcggaagcgggggatgttcttagccatggctgggataccttgtgaaggtcatatcatataaagggaggtatgaacaaggagtgagtctgtcctgtattggccgaggggctgaggagtggtttctaaaggtgtagtttaggggttggggagggtgtgggactgttgagaaagaagagagaagtgatttctgcttggccaggctttcagtgtgagagggaagatgcctatatttgttcat

SEQ ID NO: 56422 - DNA, 1125 bp, Homo sapiens
acggatcattctgaatcttcctgcccctcctcactgcttaaccctgagaaccacaaatataatggaagcagttccccccaccctcaccccatctctttaagctcatcctagcaagacctctagagaccctagagactcgactttagtccttccccgccatggcacagtggggaaggtgtcaatggggagtgtcacggacaggaggtaggatcctgccgctcgcgtcttagtgtttctccctcaagactttccttctgttttgttgtcttgtgcagtattttacagcccctcttgtgtttttctttatttctcgtacacacacgcagttttaagggtgatgtgtgtataattaaaaggacccttggcccatactttcctaattctttagggactgggattgggtttgactgaaatatgttttggtggggatgggacggtggacttccattctccctaaactggagttttggtcggtaatcaaaactaaaagaaacctctgggagactggaaacctgattggagcactgaggaacaagggaatgaaaaggcagactctctgaacgtttgatgaaatggactcttgtgaaaattaacagtgaatattcactgttgcactgtacgaagtctctgaaatgtaattaaaagtttttattgagcccccgagctttggcttgcgcgtatttttccggtcgcggacatcccaccgcgcagagcctcgcctccccgctgccctcagcctccgatgacttccccgcccccgccctgctcggtgacagacgttctactgcttccaatcggaggcacccttcgcgggagcggccaatcgggagctccggcaggcggggaggccgggccagttagatttggaggttcaacttcaacatggccgaagcaagtagcgccaatctaggcagcggctgtgaggaaaaaaggcatgaggggtcgtcttcggaatctgtgccacccggcactaccatttcgagggtgaagctcctcgacaccatggtggacacttttcttcagaagctggtcgccgccggcaggtaaagtggacgcagccgcggtgggagtgtttgttggcaccgaagctcaaatcccgcgaggtcaggacggccgcaggctggc

SEQ ID NO: 56423 - DNA, 1131 bp, Homo sapiens
acctcaggtgatctgcccgcctcggcctcccaaagttctgggactacagacatgagccactgctcccagccgaatacagacttttaagtagagacggggtttcaccatgttggccaggctggtctcaaactcctaacctcaggtgatccgcccgcctcagcctcccaaagtgctgggattacaggcgtgagtgtatggcgacagttcttaagttcttagatgccatacttagagatgtccttgtggttcagtcttctggcctgggatatgccgcacagggtaagatgtgtaaagtgacttaaagcctacgtctggcagtgaccaagaaaagaaagcgaattgcatttgtaatgaactagtgccaaagactgttggtgttcataggaaatagttcatcacaggaaaaagagtggtttaatatataaactattctgactataaatgccctggaaatatctcaccctctttgaatatgcaggtgatgcctgctattggtggtgttttgtttctgaagggtgggcatgagtcatcaaactgtggtgtgtggctccaggcctggcatgctcatactttccctccgtatgtttccagaccatccacctctttctgtccccactgtttttgccttgctccaggctgctgttgtctcagctgtgcttcctgaagccaccctcacatagcagccaagtgcatgtcctaaggtgtagatctgttcatatcacatctctgcttcagtcccttttctagctcctccggtcatgatacatccacactccagactctgtgtctggccctgcatggaagccaacatggccagatggcctggattgagtcccagctggctccatcacatgctggttgtgtgaccttgggcaagcttctctctgcctcagcttcctcatctgaaaaatgggggtgatgataatagaaccccgcctcacagaatcatggtaaggattcagtgagttatgtagagtacatagaacagggcctggcactaatcagtcctcagtttcctattattactgcatcttcacacacatgcacatatgtgcacgtgcacacacacacacacacacacacacccgcccttcagctacactgcctgaacttagtccatgctgctcttct

SEQ ID NO: 56424 - DNA, 1025 bp, Homo sapiens
tgatacacattccatgtgagtacaccttggaagctaagcttaggtacctaaaaaacaatacagtaggccaggcgcggtggctcacgcctgtattcctagcactttgggaggccaaggcgggcggatcatgaggtcaggagatggagaccatcctggctaacatggtgaaaccccatctctactaaaaatacaaaaaattagctgggcgtggtggcacatgcctgtagtcccagctactcaggaggctgaggcaggagaatcacttgaacctgggaggcggaggttgcagtgagctgagatcacgccactgcactccagcctgggcgacacagcaagactccgtctcaaaaaacaaaacaaaaataaaaacaatactgtacacagaatagacgatgggcattccttcaaccctcagcagactcccagatatcttgttttgctgctggcctgactagccacgcagtctgtggctaccaggaggaacgtggaggaacacatgatgctgaccaagcagggctggaattgaaactgggtaattgtggcttaaaacaggtttggcttagacatgggagatcctgttcctccacccagcctactcagcaggcggagggtctgagctggacgcatctctcttcagctcaggcagctgacagcggatagggcccagggcaggggtgaagcaaattctgaccaccagcgctggctgtgacctgttctgaggtctcctttatggtatgataattcagtgaaagtgaaggaccacagaaacacacacactcatacacagacacaagatgaaatatatgctaacaggacaatgtggcttaaccaaggagaaaggcagccagactggtgccagtgtcagtgagtacaggaagaaggtgatgtctttcttgagagccaatgcagaattgggaatgttttgaatgcccttgtggattttctgaaaaatatactcagggagaagcaggaaagtgatacactaaaaaaaaaaaaaaaaaaaaaaaaaaaaaaaatcgccaggt

SEQ ID NO: 56425 - DNA, 1155 bp, Homo sapiens
cagggagggcccaggagccggctgggagggtggggtccctttgttgccaagacgttaggaaagcgaggaaagtgcttggattaggagagtcttgtgggcccctggccagccttcctgcctcagctcccctgctgtctccaggggcaggtggtaggcatgggtacctgcatttcactggaatgggttcttggatctctgaggggaaggaacagcaaaagaggcccttcttcctcacccaagatgcagggtggttggggccaggagtttggaccctctaggtcttgggggaagagctgggtaatacctggtgtctgagtgattctctgcagacccttcccctcctcaaggatcacccatcctcctttcagccccctttatggggaccaggcagctctggagccagccacaggggctgttagagaagcaaggcctggagtggcctgcaccgagtagcagggtcagggttcgtgtgctcctcctcctgctgcaggggctgcacatcccattgccccacttctgctttgtgtctccctctgtctagcttccagggcagggagcaggccccacctagggctgcaggcagtctggcctgtgccagcacggtctcctgtgcccaccagccccacaggtgctgtgctttgtgctcttggctgctgtgctgggacagaatgggatgccaggaagagaagaaagggggtgcagtctgaggccaccaccccccttcctatctaagggagggctgaagacaaggggccggcattcagtgggcagcagaaaggagaggctccttgaagctgctcagtcagaggcccccgtccctccttttgccttccgcaggactgaagacctgaaggggctggcttttggagtgttgaggtgaatatctgggagcagagatcatgaatagctcagggcagtgaatggcgcaccaagagcagggctgtgtgtgggaggctgcagccaggattgcctcagctcctccccctcaggctgggaggatagcacaggctaggggctcggggtggagggtctcagctctgctgcccccaccccagtactagcctagcttcccaagctgtggcttagaggatagttggcttcctgcctctctcctctaaaatagcaagtctgggaaatcctggggtgagtggagtc

SEQ ID NO: 56426 - DNA, 1963 bp, Homo sapiens
aggaaaccctcttggtcttcctgatcactggagaagggaaaatacaccccaactccttacagctcattttttccctcataggcacaggaggaagctcgtcggaacaggctcatgagagacatggctcagctacgacttcaggtaggaaatcaggacccaagtgcttcttctgcacttggtagagcttttgtgtcaaccctactggcaggtctcccccttccgctgtagtccccctgctctgttgcctctgtgtccctccgcctctcccagatgaccctccttactactcactcttcactcagccatttgcctcctttctgccttcatttctgtctctccctctttaactcttatttctgtttacttttcccccaaagccattggtagagagggtcctctgatccccttaacaacaggaggagccccatagagccaccttgagcaccactcttcccccggcccggctgcaggggtcccccacagctgtacccaccttgccctctctcaccagctcgaagtgtctcagctggagggcagcctgcagcagcccaaggcccagtcagccatgtctccctacctcgtccctgacacccaggccctctgccaccatctccctgtcatccgccaactggccaccagtggccgcttcattgtcatcatcccaaggacaggtaagtacattggagaggtaaggagacagagtatgactaaaagagattctgggcttgggattaagagaccttatttggggcccagtttatatgcagtaaccttggtcaagtcttactacctttgtgaacccgtcacttcatctgtgaaatggacataatccctattctgccttacaagacagttgggagaaacagaaaatgtaagtgaatataatgagaaagcacttggtaaattgccaagtatattgctggcagaaggtcatgttttcagagaactttgggagccctctagggagccagggtcccttctctgcctgaagagtgtactgaggtgagctcagatacttcctccagagccccttgtcacagcagtctgagcttatctgttttgtctttccctaccttgcccaccagtgatcgatggcctggatttgctgaagaaggaacacccaggggcccgggatgggattcggtacctggaggcagagtttaaaaaaggaaacaggtgagtgtggcctggctggacctgtgctgagccctgggtctgtcttttggataacacatgcttatgaaagccccttgctccctatgggtaagacacatacatacccgtctctactcacagttagctcacctcactgcctggggagtgataccagagataattagaagtcaaggttgtagctgctgaaatagagggtgaccaaagggatcaggagccctgtggggagcactgagctgctgtccttcctctggggcaagcctgtgatcagcacccactggggagaagggagcagacctccctcccccaactttagactgtgaactcctttataggaatttctcctgctttggggttgggacaggtgatcaggtttctcagagtgtgagggcctcatccaggctgcccaggggcttcccacctccctgctgagctgagggagtggtaagaccgaagccagccagggaggggcagctggcagcatgtgcagatgctcagccggtacaggcctgcccttctggcctttggggctggaggagaactaggcagagggtgtagggaataaggagaaagcttccctctccctgctagctggcccaccccctcctctgcatctgctctggctggccaggaagctgcacaaggtctgattgttcggaccttgtctccagaagccctgacttgaaaagcatctgctgcttctcccctcccagctcctcccctgagaggaaccaaataattgatgttatcaggaggaaaagtgagctgggcccagcagccaggaagccac

SEQ ID NO: 56427 - DNA, 1181 bp, Homo sapiens
accactttgatgatgccactttggtcatcaaagagtcttcagtgggctgggcgctgtggctcgcaccagtaatcccagcactttgggaggccaaggcgggcagattgcttgagcctcaggagtttgagaccagcctgggcaatatggtgaaacccagtctctacaaaaaataccaaaattagccaggcatggtggcatgtgcctgtagtcccagctagttggggggctgaggcaggaggatcatttgagcccgggaggcagaggtagcagtgaacaggaattgtggcactgcactccagcctgagtgacatagtgagaccctgtctcaaaagaaaagaaaaacataataaaaagagtcttcagtggctccccatatcttacaggataaagtccccatccttagcctcatcttatagaccatactaaggaatttgggctttacccataatacagaggaaaggcatcagaaaacttttaagcagggctataatgggcatcagatggtttttaaaagattgccttggttgtaggtggagaagagggattgaattagaggcagagaccagtacggtggttgttacagtagtcaaggagaggtgttggcttagactagggtttcacagtggaggtggaaggatttgcatgctgtttaggggggcacaattgacaggacagggaacctgataacttctggggctgagagaaagggaagattcaaagccaaccctgagctttctgacttgggcagactggtttatttactaggctagggaacactagaggaagagacgcaggttctgaggagcagatggggctgctgagtaggcagttgtatgtgtgggtctggagctcaggatggtcaggcctgggctgaatctgcagatttggaagattttggcaagtggatgggggtagaaggtgaggaagtgcatgggtaggatctcctgggaagggagaccagattgagaagagcagagattgaatcctgaggcacagccaggtgatgtcctgcatggtgacggcacatggctgtctgcttcccctcccctgcagggcctggaacatcatgacctgcatcgggttggtaatggaagttgttcagagtgcagtggaagaatattttttcttccatgcctctcctcccctcattcagcagcagtgctagagagtgactttgcatg

SEQ ID NO: 56428 - DNA, 2958 bp, Homo sapiens
gctcccattgggctcactgagaaaccagggcaagaggctcagaccctctggtggtctccacctgaaggacatagtaagatgcctagggagaggggaggggaggctgggagggaggcctgggaaggactaagggatgtgactgatagacagggactgagaggggttttttttttttttatgagatggagtcccactctgttgccaggctggagcaagtgacgtgatctcagctcactgcaacctccggctcccaggttcaagtgattctcctgcctcagcctcctgagtagctgggactacaggcgcacgccaccacgcccagctaatttttgtatttttagtagagacagggtttcaccatgtaggccaggatggtctcgatctcttgcccttgtgatccacctgccttggcctcccaaagtactgggattacaggcatgagccaccacgcctggcctgaaaggggctttgagcagaggctgcctagctcaagacctgtacccagactgacctggggttgaggccatctctgtcaccttttaatctatgaattgagcaagtcacttaacctcaccacgccagtttccttgtcagttatgtgggaacaaacagaatccactttatggagttttttgaagatggaatgatagtgggtgtgaggtgccttgcacattgtcttatggcacatgtgtgtgcctagcaaatgctccctctgttccctttcattcaagagggataaagactgaggaatagaagggagcggagggctcctgatataaggggccatgaaggaaccttcccatcccagacatggtcccatcccacaggggccccaaaggatggaaagtggcctgtggtacctcttttccatccagtaattcattccacgaatatttatcgagagtccattttgtgccagacatgacagtattctaggcactggggttatagcagtgaacaagacagtcctttctcttgtgggcaacaatctggttttcacagtggggcctgcacagccttgggcatgtttcccaacacaccaccctgagctaagtggcaccagaacattggggtgttagtgtctggcacaggaagtatgatgtgtctcagcaacccctcagggtttcttcttcatctcaagccaatcccctcctccacattcttcctttgcacctgtcccagggccagtagcttccacaccctgtctgagtgccatttcttgtgggcattctgcttggctggaaaggggcaaaagctccccagaaactcccttccttactgtctgaaaaacaagcacattttgttaaaaacaaacctttgttaaggcttttattgctagtccataggggaagacatggggagggggttacaaaaataattatggggaagttagcttcaaaaaatgttaggagtttttgcaggcatttcctctagcctaaagctcttgaagacactcttcctgtcggggggtagggagtacctgcaagcccttctcatgtggtgctagactccacatgccaagatagacacaggccacgttgcttgctggggctgcctcctctgcttgagtcacaggcttccaccccgaagggcttatccccagcccagaggagtgttgtcgttatcacatttatcaagagttttctctgtgcacagcctggtttgcatgtgacatctcaattaacccttgcagcagcccagtgaggtaggtgcttgcatcctccattttatagataagaaacagtaggctgggctctgtggctcacgcctataatctcagcactttgggaggccaaggcgggcggatcacttgaagtcaggagttcgagaccagcctggccaacatggtgaaacctcgtctctactaaaaatacaaaaaatagccgggcatggtggcaggtgcctgtagtcccagctacttgggaggctaaggcagaataatcacttgaacctgggaggcagatgttgcagtgagtcaagatcgtgccactgcactccagcctcagcgacagagcgagactctgtctggaaaaaaaaaaaaaaaaggaaaagaaaagaaaatgtagaaagacaaaggaacattcccaagatcagaaagtatagtcggtggtagagccagggctctggagttggacacactatggatttcttatcctggctcttttctgctgctttagagacttagcttctctgtaggccaagtgggcactaggagttgcggggggtgtagtacctgctgatgggacttctgaaggtaggctttccctctgaggaacgcgtaggcctacatctgtttgaaatgctgggttggtaatgtcagagcctcatattagcacagctccatcttcttgggtccaggcggatctcactcacctacactagttctctgggggagcttttacacaagtgcccccatccccctctcttgaatatggagtttcacaattaccattttagtctaaaagcaactcattggcttgatttctgcagtgggaagagggaaagtttgtctatggtgcctcccttgcttaccagtttgcccacagggcctgtgagaaaatggctgttaggttgaggctgcagtgagccaagatcttgccgctgccctccaacctgggtgacagtgaaaccctgcctcaaaaaaaaaaaaaaaaaaaaaaaagagagaagatggctctcacctaggctctggccttctgcttccattctttcatttgtttacattgtttctcaaggggacactcttggcaccttgggcaggacaattctttgttgtgcaggactctgcaggggggtgggagtggatcttgcaactatagatgttattcctctttccctagtcttcccactaatgtctgttttctctttgtaatccagtccaggacccacagtatgtttgactgtcatgtatccttagtctcatgcaatctctgacagttctcagtttttccttttctt

SEQ ID NO: 56429 - DNA, 1055 bp, Homo sapiens
atttttgtgttttttgtagagacaaggttttgccttgttgtccaggcttcttttgttaattttaaaatcaaacccccacaggcctctgaacataggccagatccctcagggtggtgctttccttgctcactgctgttctccaccactgtctctagctgaaggcctcctctcccttctctctccccagagctctcaaagtctgtggaaccgcctgtctgtgttgctgaatctgttgcctgctgctggtgaactccaggagtctggtgagtgggtccctggcactaccctcctttctttgctctctcattgtccccactaagcccatctcccctccccataacccagcccttggggtaaggaggttaatgggattcactgccagcctccctagcacacagcagtcattgtgtggtctaggcctctccggtttcccaccacaacactgctgtattgtgggcaggtggcctggtcagcaagggagtgtgctccctagggaatgcaagggcagagtgagagggccctgggagccagacctagctgctgctgttgcactgatgcctgtggtcattgagaattgactttgacctaccaagtttgtttgtctggctcatctcctaccaccttccagctggaaaactccacctgctcctacctgctaagacttgccaagggctattcattcatcctgagcgcctcctctcatttccatcccaatgtaattgtccctgctgtcaggaagccttcctgacctgagccatccttgttcttcctgagcccctctgctctgcctgactggctcttatgtgtccatctctctttacttcactccctccatctctccgcactgtcctagggtatgtcctgcctcatcatctcatcagcctgataattcccaaagggaagggttatgtctctctgactgggagttcccacaggacagatggtcttatgtgtccttcttctgcccaggcctggccttgtgtcctgaggtccaagatcttcttgaaggttgtgaactgcctgacctcccctctagccttctgctcccagaggac

SEQ ID NO: 56430 - DNA, 1647 bp, Homo sapiens
cctgcctcagcctcccgagtagctgagattacaggcatgcaccaccacacccagctaatttttgtatttttagtagagacagggtttcaccatgttggccaggctggtcttgaactcctaaccttgtgatccgcccacctcagcctcccaaagtgcagggattacaggcgtgagccaccacgcccggcctgaaagtaactcttttaaaaccataccccttgcttttctccctcccttatagctcccctctaactgtctgccctgccttccagcacagagtaggcatttcataaatcctagttgaatgaatagctgtagatcaacgtcacaaattacttgagtctataagaatcatatttaaaaggcaccatattttaaaaacaaccttggtaaaatgaatttgatgagattaaaaaacaacaacagttagtgggcctggaaaaattgaataagggcctgtaagtggttccccagatttttcatatccaaattccttggaagggcccaggccaggtggaagcatgctccctgcacagagctgaggcctgttcccaagtgtcagttgtttatcccagtttttttctcttccattcacccaccccccagcctctgaggagggctctgagtcggaggggagtgagtccagtggacgctcctgtcggaatgagcgcagcatccaggagaagcttcaggtcctgatggccgaaggtctgcttcctgctgtgaaagtcttcctggactggcttcggaccaaccccgacctcatcatcgtgtgtgcgcaggtgtgtcagtccactccattgcccctgtcaggtcccagggtcttggaggaggggatgagccaggatggggcctgaggatcccccctgatggccaaggcaagaattattgccaagcaattaatcacctatctgtgctgggcccttatgctctgacagggaaggattaggcatgatcttggccctcacaaagcctgtggccagggaacaattagcgagctgcttattttgctttgtatccccaatgctgggcataatgcctgccattatgagtaatgccggtagaagtatgtgttcaaggaccaaagttgataaataccaaagaatccagagaagggagagaacattgagtagaggatagtgacagaagagatgggaacttctgacaagagttgtgaagatgtactaggcagggggaacagcttaaggagagtcacacaggaccgagctcttgtcaagccggctgccatggaggctgggtggggccatggtagctttcccttccttctcaggttcagagtgtcagccttgaacttctaattcccagaggcatttattcaatgttttcttctaggggcatacctgccctgctgtggaagactttcttccctgtgggtcgccccagtccccagatgagacggtttgggtcagggccaggtgcaccgttgggtgtgtgcttatgtctgatgacagttagttactcagtcattagtcattgagggaggtgtggtaaagatggagatgctgggtcacatccctagagaggtgttccagtatgggcacatgggagggctggaaggataggttactgctagacgtagagaagccacatcctttaacaccctggcttttcccactgccaagatcc

SEQ ID NO: 56431 - DNA, 1034 bp, Homo sapiens
agaatcggggaggtcatcactatggaaaggttggtgtggggcatggggatgaaggaaaggaacacagactcgggggaagtggtgttggagagcacattccagcttccaggctccacctgttcctcgggctccacctgaccttcctctttccgcagatgaaccagagtccaaggaacctgtggagaaagaggaggagccagatcctgagcctcctcctgtaacaccccaagtgggtgagggcagaaagagccgtaagttctctcgcctctcctgtctccgccgtcgccgccacccacccaaagttggtgatgacagtgacctgagtgaaggctttgaatcggactcaagccatgactcagcccgggccagtgagggctcagacagtggctctgacaagagtcttgaaggtgggggaacggcctttgatgctgaaacagactcggaaatgaatagccaggagtcccgatcagacttggaagatatggaggaagaggaggggacacggtcaccaaccctggagccccctcggggcagatcagaggctcccgattccctcaatggcccactgggccccagtgaggctagcattgccagcaatctacaagccatgtccacccagatgttccagactaagcgctgcttccgactggcccccacctttagcaacctgctcctccagcccaccaccaaccctcatacctcggccagccacaggccttgcgtcaatggggatgtagacaagccttcagagccaggtatttggaccacttcatcatcctgttctggtccgcacctccatgccatagacactcaccagagaggccgctttcctatctgtgtgaatgacctctcgtctctacccttacctttggccctctgcctgtggtgtagcccatgagttttttcctgagggtccaccctcctgctcacttccttattcccatctcccaacccatttgttggttttatttcttttgcacttcaccctgtcctgtgggtttggggctttcctccctacacaacaattgcagctg

SEQ ID NO: 56432 - DNA, 1101 bp, Homo sapiens
gctcttctccttccccagcccccaccactgacctcccctgttactcctgcccctctgtagctccgtggactcagagctgacctcactttgccagtcagtcctggaggacttcaacctctgcctcttctacctgccctcctcacccaacctcagcctggccagtgaggatgaggaggagtatgagagtggatatgctttcctcccggaccttctcatctttcaaatggtcatcatctgccttatgtgtgtgcacagcttggagagagcaggtaaccttccctatgttcctcttttctcttccactggctttggggatcctcactccccttttctgcagctccttattcataaacttccttccacaagcagcctcttcactcctgtgtcactgcttggctgtgggcaagtaagggccaagggatcctaccctaaaggaggtcctggtaattgagtacaagcaacagcacatttccttcccccttctccttactgcctcccataaatatgcacacccttggccagggcctgtgcagacacaagggtcagggtacttagtgatcatccagacagaatttcagaccttctgttggaggcatttaggcaattctggaagcctttctggcagaagtgtatgtagagcaagattgggaggtaaggagggataggactggatgtgaaggctcttgaggcatggggaggaacctcagagccagggaggatgagatgggacaaaaggatatgcttatctgaaggagtacaaggtgagatggtaaattctagattatggaagggataataggacacgtacagtgcctcacgcctgtaatcccagcactttgggaggccgaggcgggcagattgagcccaggagttcaagacccagcctgggcaacatagtgagactcttgtctctaaaaagttaaaaaaaaaaaaaaaagaatctttgataagtagttggatccttggaagagttgagaacagatgagatgtggttggaattgatggtgcctactcctcatcagggccctaggcccctaatgcctggctttcctgacttcaggatccaagcagtacagtgcagccattgccttcaccctggcc

SEQ ID NO: 56433 - DNA, 1535 bp, Homo sapiens
gttggtaacacccattacatggttggagagcaggagggatagtttggcttctgataactttttccctcccatctgtttcagtgatcccttcttttcactgcccttccatgagtcagagaggatcagtgaatacaggaaaaagggaaatttctttgagctttgagcaaatgaagataataattctctttcagtagtgggttgggaagattttaatttgatatttttcttctttgagtgtttcttttatctttatggactgctagatgaatagaaacttcagcacagggattgaaattagacatcaaggaggacttaccttcctaacagatgtttctaaggatggaaaagtactcttttgctttatagcccctggggcctctcgtcctgatagacagtggtttctcattaggctgctggtgtgtggctgttgggtgcattatgtcttactgacctgggtctactatccttgcccccagcccactcctggacccctcatgagcagtgtgtgcagagagtcagctgtttgatatttgatgaaccagagtatcattagtagtgtcttctctgtgaaattgagcatttgcatttcagaactaaatatcagaggtctttgcaagcatttatgtgtgctgcagctccccttcattgggaagagattaccaagaagagcctattcaggctgggcgtggtggcacgcatctgtagtcccagctacttgggaggctgaggcaggaggatcatttgaacccaggagttggagaccagcctgggtgacagcaagaccccgtctctaaaaaaaaaaaaaaaaaaaaagaaaacaaaacaaaaaaagaagagcttatttacttcacaaacaatattctttacattttgaacctaccagcaaggaagagagttgaacaatttgcccatagtcatgcagatttaggactgtgccagagaccccagcaacctgcttcctagctcaggtaccttccttccaggctcttgttaccactctcagagtggactcccagatgtgggggagggttttctgaaacttaaaatcatcgagtttcccttcgttttctctcttgtgcagcccgatatcagaatgaattagctggcgtagataccgagctgctagccgagagattttactaccaagccctgtcagtagctcctcagattggtaagttgtccccaacttgggcctctgaatccagtagggttttcctagggaagacgatgttgttgagatggcaggcagttcatactcattttccccagctcctcttcattctcagctctctcgtacttcaccttgtttataccttttccctcttgtaacacactcagaaaatggtggaaggggaagataaatgggaaggtcttgaactaaggagtgaggcagagtagaaggaaaagagaagatggctttcctctccctgaggtctcttgtagaaagagaagcacaatgagataaagcataagactattatagagagagatggggatttgcatgtaggaacaagcattcagtgctgagatagagg

SEQ ID NO: 56434 - DNA, 2157 bp, Homo sapiens
atggtaccttaatggtctctgaaatctctggccttcctaagagaggagataggatccctcactccatctgcagattttacatctaatagactggtgccataaagtagcacagtctctacatctaaaaagtagagtaaaataaaataaaaagaatggcattcgaggcagggcacagtggctcacgtttgtaatcccagcaccttgggagaccaaggcaggaggaacacttgagcccaggagtttgagaccagacctggcaacataacaagacccagtctccacaaaaaaattaaaaaatcagttgagtatggtgctgcacacctgtaatcccgcacacctgtagttaggctgaggtgggaggatcatttgagcccagaggttcaagtttatggtgctatgatcccgccactgccacagagtgagtgagaccctgtctcaaaaaaaaaaaaaaacccaaaaatatatttgagtcaagggagtcggccatactgcataatgaagggaaaaatgggataaaaaagcagagaaaaagagagcgaagtgtacaaagggaaaaaatgaggaaaaacttagaatgtttagtgcttcgtgcttctgtcttttggggctcccactgccttcctaggctgctgttgtgctgggtcatattgaccctgcatgtctcttgggaagcaccgagatttgttggtgggggtgttggcacatgactccttgccctcagttcttatgtccctgctccaagggatgggctgtctctctcatgctcctctacaccctccaggctgcgtgagctctgcgtcaagcttatgttcctgcacccagtggactatgggagaaaggctgaggagctgctgtggagaaaggtatactatgaagttatccagcttatcaagactaacaaaaaggtaaggggaagtccttgtctaaagagggaaagccaaggaaggaagagacagctaggaaagtgggcgcagaacatggttggaggtaggggagccaagaaaacatggcagtaagaggctgggcacggtggctcatgcgtgtaatcccagcactttgggaggctgaggcaggcagatctcctgaggttgggagttcgagaccagcctgaccaacatggagaaaccccatctctactagaaatacaaaattagctggacgtggtggtgcatgcctgtaatcccagctactcgggaggctgaggcaggagaatcacttgaatccaggaggcagaggttgcgatgagctgagatcgcgccattgtactccagccagggcaacaagaatgaaactccatctcaaaaaaaaaaaaaaaaaagacagcagaaaggaaggaggaagagagtcagatgtaattaggattagggaaggaggaagagagtcagatgtaattaggattagagaaggaggggagcctggtcccagatggaaagatcagagagttagagctaagagtatgacagtaacttgtgagtgagagtagatgtagatgaagttccagagccaagtgagatgaacagggtaagggagggtgagtgcgactctgagtttattgcttaaccagccccttccctttcgcaatctgtagcacatccacagccggagcactttggaatgtgcctacaggacgcacctggttgctggtattggcttctaccagcatctccttctctatatccagtcccactaccagctggaactgcagtgctgcatcgactggacccatgtcactgaccccctcataggtcagtggaacctgaaaggtggacttgagcaggttctcatgcttctacctctggccttatccctcagggttcatgtagcttgcgacccagccaggcagagagagttctagcagaactacatacaaatggtttatgaagtttggatttatccagacaatcatatgagttagggtaaagatcttaaggaaagagagaggcctgggattgtggactaaggcagaggagggacagaaagacctagagtaggtctggcactggaaggtggtattaatacatttcttttcttctcccagttgaatttggccagcactgtttcttttgactttagagattatttcccaatgtttgatgaaagttttgaaatctttagatatgttgggaaaattgtggacagtctttcaacatagtacaa

SEQ ID NO: 56435 - DNA, 1882 bp, Homo sapiens
cacggctagattttgtagtttttgttctaagagagattatagtttagtggaggagcttatgatctgatggaaaatgagaaaaaagtggtgagccctctcatatttaagcgttttcaattagaacttcctagagtggtggttatttaccttcttttggattaaggatataaggagagctgtggagcttgtctataaaaatatacactcccattagctctttccatggcaccaaagataaaagccctgccctagggactgagctggtataaagtaaatcactggtgctgcccctggcatcgagggccaggttggccaaaagggcttggcatccatctctaggctgtccagtttgaagaaacatgattgcttgtgagaaggtatcgattaccatcccacctactctgctgggtgctggcagtcacttcaccctgtgtagggcagcttagtagtgtgcctcctgagccaccaccaccacagggtgccaactgttgtggcccacttttcctggcccgggagcacgtcttggtttgtttgggaatcttcactctgtttttgttgcttttgtgtccacagttgtgcctgattcacatgttcttatagctcctgcctgatgtcctctgggttttacccttccagatatgagacctacctctgggacttcttggccgtccattgtagagtttctgtggctttttctttgctgtgatgacagacttacctcttagtgcctggagtctccccctcagccttagaacaagaaggatggagactaacacttggagtgattactatataccagtcactgttatgggtgctttatgtattagctaatttaatcctcacaaagtaggtaataatattcccattttatggttgggtgaagtgagacgtaaggaagttaggtattttgcccaggaccacatagctggtaagaagtagagctaagatttgaatccaggcggtctggtttcatgcctacactcttaaccactatgttcaacaaataattccttcagcagaatctaggcttatcagaatcttgcttacggctaagcagcccaggagctccctctacttccccatcataccccacaattccatagtagaattttatactagaagtgtctttcctttatgtcagggataataaggccttatgtaataatttattcattccaccattattgaatgtttaccatataccagagctatatataaattattatttcatttaatcctcacaacagttctctgaagtagctattattatcttcgtttttattgatgtggtaactaaggctttaaaagggtgggtaatttgcccaaaggcacagagtaagacacagccagggttcaaaccctagattttctgcctggcatcacagcgtgtgctctttccattgggagagtcggccttaccatatcacagtttctctactttgacactgttgacattttgggtagggtaatgctttattgtggtggactgtcctgtgtattacaggagatttaacagcacccactaaatgccagtggcaaccctctttccacccagttgtgatgacaataaatgtttctaccattgccaaatgtcccctggtgggcggggggtggggaggggcaggggttactgtaacaagatggagactgtgttcatcttgttttgtacagagctcagcctgcagccttctcctttttccctcaccgctaattctgtagcttttcctctagaatcgtgtcccagcgtcatcctctgtggaccatgcatatggctgaggggatatttgcctgtatttccctacagggctgtggtggaggctgtgcatcgacttgacctcatcctttgcaacaaaactgcttatcaagaagtattcaaaccaga

SEQ ID NO: 56436 - DNA, 1133 bp, Homo sapiens
cccatgccctcagcatccttaagaaacacggctgtccacctttttccctgcaagaaaactaagtccatcccttatgactgtctcgggccccaaaggtgaagggcagctccggcaaggggagaactccgattgattggagtccctgttggggcagtagcagggttccacccaccgcggtcctaggcctgggggcgaagtccaggcctggccacaaggttcaaagatgtgtcagacccaagccgctaccccctactccgagggcgagggcggagaggctcagccccaggggcggggcctgtagtcggaggccgagcgggcgtggtccgggtagtccaggcggctctcggtggcagtgagcatgcgctccggctccaccacgaacatgtagtagaggttccacatcagcatcgacagcagtggcagaaacgtcaggccgtagccgaagcctcggaaggagcggcccacggcaaaggtcagccagtagatcagcctatgggggcaagaaaagggtcaggctactctcgagggaagcgcgtcagctgattggcaataggctgacggtggggggagtagataggggaggcagatgcagttggtgggtatggctggtacttccaaatacagccaaagtttatgcacttaacatgtattaggcacagcgctaattactataagtgattgatttgacttccccacatctttatgaagttgagtatgttattcctttccctcttttatttacttttcgatttatttttatttttttagagacatggtcttgctatgttgccagtctgggctcaaacttctggccttgagtgattctctcacctcagactcctgagtagctgggattacagatgcgggccaccacacctggctgtacaaactttaaaatgtttgagcaaattcaatgagtatagtaaaatatcttcctccctttaccgattcccaccctattctcccccacccccaccccaggcatcaatattatggtttcttgtgcactgagtgattttttaaattattattatttttttatttttgagacagagtctctctctgtcacccaggctggagtgcagtggtgcgatctcagctcactgcaacctccgcctcccgggttcaagcaa

SEQ ID NO: 56437 - DNA, 1053 bp, Homo sapiens
cccagaaggcatgcctctcccacaggaagaggggagcagacagggaaatctgcctaccaagaggggtgtgtgtgtctttgtgcccacacgtggtggctggggagtgcctggatggtgcggtggttgatgttaacctagtgtgtgtgtgtgtgtgtgtgtgtgtgtgtgtgtgtgtgtgtgtgtaacaataaattactaccagtctttgctggctcttttttcctgtttgtcccccagtctcgagtgtcccttccctgtttaattcagatgacgatagaaacctcccagctctacctggtggagcagggctggcaggttccttggttccacagcaaggaaatggagcctcaaacagaaacttgccttccaagcccatctcttagcccttccattccctggaaccagcccaagaccagcccaacaacactcacacatcaagagactggagccctgtgaaaaaaaataaatctattttcttgccttccagggcagccaaccagtcagaatgcctctcatttaggcctgcaagtcccatccaagggaaatgtgtggagatgcaagaaggcaacaccaaggggaccttatcaatagccctgtcccctgcccgcctccaaagtcccccaacaaagtatgaaggaagccccacctgggggtctccaggaagtcgaggctggcctctgaggttccacagaaaagcaagatgggggagtgaaggggccggctggaacttgatgctccaacctccagagtttcgaggcacagcaagacaggttcagtaatgtccttccctccagagagcgggccttaatttatggactggtactctgagtacttcttgtggtgcagcagcagaaccaagccgccccctagcagcatgagccctggggcacccagggccactgccatgatgcccaggactagtggggacaagccgtccactggagggaagcccacacccaggagcatcgacctagagcaagcagagagagagaggtaagcgggcttaggaggaaaggctgggaggctcagcctttgtccacttcaactccccaa

SEQ ID NO: 56438 - DNA, 1023 bp, Homo sapiens
agtgcagaggagagagttcatcccaattagagggtggaactaaagactgggggtgggtgaaatagactcagatatgaaagccttggtagggggtgagtgggaggtgtggtctcgggagaaaaactgaggcaagcccagttccaccctacccccaccctccagctgcttgagtttgacagcaccaacgtgtccgatacggcagcaaagcctttgggaagaccatatcctccatactccttggccgatttctcttggaacaacatcactgattcattggatcctgccaccctgagtgccacatttcaaggccaccccatgaacgaccctaccaggacttttgccaatggcagcctggccttcagggtaaggcgtgagaaatcggaaagagctcaaaaaggctgatttgtgagggtgggatttaatgatggaggtggcccttaagcacaggcatccagctatttcccacacctcccatgcttcttccttcctaggtccaggccttttccaggtccagccgaccagcccaaccccctcgcctcctgcacacagcagacacctgtcagctagaggtggccctgattggagcctctccccggggaaaccgttccctgtttgggctggaggtagccacattgggccagggccctgactgcccctcaatgcaggagcagcactccatcgacgatgaatatgcaccggccgtcttccaggtcaggcttcctggagagaggcagatgggtgaggaatgtaggtgggacaccattgggacctaaaactcattcaaccatttgccatttagcaacactttctttgggtcgtttaagagctaggcactgtgctaatgaatctgacccagtctctgccctcagtggagacagacagaaagtgcaatatgacttacactctggcagatggagatctgcaagggggctaggggccaagaggagggctgagtccagacttggaggtttggaaaacaactcagtcctcacccagtcgaactccccatttttacagaggagg

SEQ ID NO: 56439 - DNA, 1030 bp, Homo sapiens
tgaaatgttaggcagggaagaagaaccacattgttccacagggaagaagaaccacagagtttcatgtgctggagtagaaagaaggtgtatgagttccacaatgggacagggttgggaacttaaggcaatgtactggagtagttccctgttgggtttattttctttaacctgtctttgtgtcaaaatgagatttcacgttcctcttaaaacatgccgtttgaatactgtgtttttggcattgtccaaggaaaactgaaaacttgtagcatgaatgttttttttttcacttaaaatcttgtgaccatattaaattgtattacttgtaagagactgacgtttcctgttttaagatagaatacaaagctgttctttaatacattaaatggtgctgacgaaaggaaatttttttaaaaagcaaatagtttggcggctccgcccttgaaagggatcagctgaacgcgagtcatgtgaccctctggcacctcttccgtcggctgaattgcggccgtatgcgcggctctgtggagtgcacctggggttgggggcactgtgcccccagccccctgctcctttggactctacttctgtttgcagccccatttggcctgctgggggagaagacccgccaggtgagggccctggggctacagcgatagaagtttcaggaaacgctacccttgcagggtggctggaaccgggcatccaggggctaggggtggagggtggctgccaagaggagggttcttcaacctggagggtgtgggagatggtcatgggtcatgggacgggattgtggagtagggcaaatgtgagggtgatgtctggaccccgactcagccctgggtgacccaggtccaggcaagtgttgaatgttttcttcttcgcagccctgtgccctgacccgcccaccagggtcaggggagtcctggctgtaccctctaccctaccccttttcatcctgtccccactgccccttaccccagggttccctcagctcccgcacacattcctcttgtctagtccccaaaat

SEQ ID NO: 56440 - DNA, 1307 bp, Homo sapiens
ccaaccaaagtgctaggattacaggtgtgagccaccacacctggctgagaactgcattttacattcaggactgaaaaggccgggcatggtgggtcacgcctgtaatcccagcactttgggaggctaaggcaggtggatcacgtgaggtcaggagttcaagaccagcctgaccaacatgaggaaaccccatctctactaaaaatacaaaattagccaggcatggtggtgcaggcctgtaatcccagctgcttgggaggctgaggtagtagaatcgcttgaacccgggaggcggaggttgcagtgaaccgacatcatgctactgcactctagcctgggtgataagagggaaactgcgtctcaaaaaaaaataaaagactgaaaagatagatttcagacaaaatggcagttccatagtagcatctaggtgatagatctaaaggaaagaaaagtgtcctttccttctctgctgacctctttgcatctgtggtttttctcctagacggcagttctgctactgcgaattgatgacatcgtttcaggccacaaaaagaaaggcgatgaccagagccggcaaggcggggctcctgatgctggccaggagtgagtgctaggcaaggctacttcaatgcacagaaccagcagagtctccccttttcctgagccagagtgccaggaacactgtggacgtctttgttcagaagggatcaggttggggggcagcccccagtccctttctgtcccagctcagttttccaaaagacactgacatgtaattcttctctattgtaaggtttccatttagtttgcttccgatgattaaatctaagtcatttgagaaagttgttatgtgtttttcaaccttgggccatctctcttatctcctggcaaataggtggaggcagaaaaccttactggggagggaaaggagacctggaatgagggcatttagactcttttgccttcttgagggagtattcttcagacttctcagtaaattttggttggaaagacccttttggagttcaaaggataatactgtaaagcttacaaagcaccattttgcattcactgcccaaagaacaagaggaacctgtctaaagcatgggtgttccccatatgtggttgtatgtagaggaacacccagtacatcctagggctctggcatgtgtcctaaaggacatataactttttttttttttttggtgtagttttcagaattctccctttaccatgagttatttttctctgccctcttccaatgtttttacaattccagtcttcattttggcttgctgaccttttctcat

SEQ ID NO: 56441 - DNA, 2601 bp, Homo sapiens
gttgttttttggggtttttgtgtttgtttttttttagatagggtcccactctgttatctaggctggagtgcagtggcatggtcacagctcactgcatccttgatatcatggtttcaagggatccctcacctcaccctcctgagtagctggagctacaggtatgcatcactgtgcccagctagttttttattttttgtagagacagagtcttgttatgttgcccgggctggtctcaaacttctgggctcaagcaatccttttgcctggcctcccaaagtactgggattacaagtgtgagccactgtgcctggccccctgaaaatctttttcaccggacaggcaagacctcttaagtgatgtttccaacaatccacttttgcccttatccctagctacagaccctagagactagggaaatgggtacaagtatctgaaatcatctgattctccccacctcttccgtccattagagcctgtggggcccggatagtcagccgaccagaggaactgagagaagatgatgttggaacaggagcaggcctgttggaaatcaagaaaattggagatgaatactttactttcatcactgactgcaaagaccccaaggcctgcaccattctcctccggggggctagcaaagagattctctcggtgagtcagccttggatgtatgaccagatgaagtagatcactgaacttcttgagagtttcccaaagggcctaaaataattctgtggtccatttatagctatttaatttggacctatagccacaaattccttttctgcttcctttttttaattaaataatttaaaattttaaaaattgtagtaagcataaaatttaccatcttaatcattttaattgtacagttcagtaatgttaagtatattcatgttattgtgcaagagatcttcagaactttttcatcttgcagaactgagactctgtacccatcaaacaagatatctcatctcctactccctagcaacaactgttttcttattttttacgttgaagttataaatattacttttttttcctcattgaggctaagtaactttcccaaaggcacatagctagtaagtaggagagtgtacaacaccatgcaacctcctaaaagatacaactaggaaggggtggaataggttatggctcttatctatcaagatacatgctgtttatttccatataactggcaagggatgaaataggttattgctcttaatctagcataatggacaaagacctaactttatggttgggtgacacccccaaaccctttgcagataccactccccgccatcctatattatagtcgtgtgttatatattctcaggtaaataatctgccctgcccagtaggggttccaaggaccttttctagttgccctccttggtggtttactaactttggcagttaggaagtccttttggtgcctccgattttatgagtcatcaagctttggcttcatactgtctgtttgcttctccaaggaagtagaacgcaacctccaggatgccatgcaagtgtgtcgcaatgttctcctggaccctcagctggtgccagggggtggggcctccgagatggctgtggcccatgccttgacagaaaaatccaaggccatgactggtgtggaacaatggccatacagggctgttgcccaggccctagaggtcattcctcgtaccctgatccagaactgtggggccagcaccatccgtctacttacctcccttcgggtgagttcctctccaagcttttctcttgatggagcagggaaagctgtgtttgccctgaggggaagattcttatctggctatccaaattctctttatagtctattccttgaaatctttctctccttttagtctttgacttgtttgctgtcattgccatttttccctgtcccttccatactggtccattgttttttacttcatttcttacctgatgtttcctgttaacttattttcccctttacttcttgcttcaattgcaggccaagcacacccaggagaactgtgagacctggggtgtaaatggtgagacgggtactttggtggacatgaaggaactgggcatatgggagccattggctgtgaagctgcagacttataagacagcagtggaggtaaggcaccctaagatatgtacacgctgttttaattaatttatttatttatctatttatttatttttgagacgcagtctcagtcacccaggctggagtgcagtggtgtgatctcggctcactgcaatctccgcctcccgggttcaagcaattcttgtgcctcaacctcccaagtagctggggctacaggcatgcaccaccactcccagctaatttttgtattttttagtagagatagggtttcactatgttgttcaggctggtctcgaactcctgacctcagatgatctacccaccttggcctcccaaagtgctggagttacaggcatgagccaccatgcccagcctggtctagtcttgaagggaggggtaaagaaggcagaatattcctctaaggtattccaaggcattctatctctttaattatctttagctcgtactaaaagcaagataatatagcacaatct

SEQ ID NO: 56442 - DNA, 1022 bp, Homo sapiens
tgatataactggagctggccgggcgtggtggctcacgcctgtaatcccagcactttgggaggcagaggcgggcggatcacgaagtcagaagatcgagaccatcctggctaacgtggtgaaaccccgtctctactaaaaatacaaaaaaaaagttagctgggggtggtggcaggcacctgtagtcccagctactcgggaggctgaggcaggagaatcgcttgaacccaggaggcagagcttgcagtgagccaagatcgcgccattacactccagcctgggtgacagagcaagattccgtctcaaaaaaaaaaaaaagcaaaactaaagctaaattggcttacagaggtgttgaggtcatggctttaacataattctgactctgagatacgtgggagaggtgggtggaaggagtataatatgacccttagagcttcaccagtccagggattttaaaatcagtgtcttttctttaccacacagactgacattgagattacacgagaggaggacttcacccgaattctccagatggaggaagagtacatccagcagctctgtgaggacattatccaactgaagcccgatgtggtcatcactgaaaagggcatctcaggtgggactttgttactttttccagcctacctttgaggtagacgagggtgggtgatttgttttctcccctcatgtttggcaggggcgtaatagtgtcatggttaagagtactttgattataaaaccagttcagaacccagcttgacatctctactcttggatttgtagatttagctcagcactaccttatgcgggccaatatcacagccatccgcagagtccggaagacagacaataatcgcattgctaggtgagtaggccaggtaaaaacaagacttttcttcccgtgtgtttcctttttgtagttgcgtaacagtcatcattacctgaaaaggtttaataaaggatatagtaacaggtagaaataaccttggcttagctgcctgccctcttcagaagtcctctagtcc

SEQ ID NO: 56443 - DNA, 1079 bp, Homo sapiens
atggtctaaaattggtgtatttcctaatgggaaaaaaatgtgattccaataatatttttgagcttcatcaaagaaaggtactttagaaacctgaaacactgggccgggcgtggtggctcatgcctgtaatcccagcactttgggaggccgaggcgggcggatcacgaggtcaggagatcgagaccatcctggctaacatggtgaaaccccatctctagtaaaatacaaaaaaaaaaattagccgggtgtggtggcgggcgcctgtagtcccagctacttgggagtctgaggcaggagaatggcgtgaacccgggaggcggagcttgcagtgagccgagattgcaccactgcactccagcctgagcgacagagcgagactccatctcaaaaaaaaaaaaaaacctgaaacactagctgtttgggaaagatgaacatctgggaaggaaattaagaaattgtctcttgattgtggattaaagtgcagttgtcttttgttcagatacctggaggcatcattgaagactcctgtgtcttgcgtggagtcatgattaacaaggatgtgacccatccacgtatgcggcgctatatcaagaaccctcgcattgtgctgctggattcttctctggaatacaagaaaggagaaagccaggtaaggttcttggccttgttccttaaagtagatgcaagaatctgactgcaaatatgaacaacagaaataaaacgtatgtttattgcatgccttctgggtgcatagtgtacactgactcttagaacaatcctttagaatagttggtattgatttcattttacagatgagggatctgaagctcaaacaagttaggttaattgcttgaggaatacagctagtattggccaaaatcaagatttgaacctggttgtgtttggcttgttttatacgatcatgctgcctttcctaatgcaccaggggaacataaggtaggagttaattcagctttgaagtactaaaggagaatttcagcttaatgcagtggctcacacctataattctagcactttgggaggctaaggcaggtggatggctcgagcccaggagttca

SEQ ID NO: 56444 - DNA, 1151 bp, Homo sapiens
atacataaaatgtgtttacagtaacataaaaacacaaagatgaccagttggtggtcatctttgaccactgtgacacaccatgagctaaaaataaaatttgctgttcaaatgaatgatttgataaaactcttaaagttggctagttatgggataaagtttcataaaaaaaaatgtgtcttgacctgagttgtaaaagttgaaaagtttacttggttgaagcagaagataaggaacaaattattttactataatctttgtatgtaagtgtaaagggttgctcagggaattaaggcaccgtctacagatgagttgtaatcttgctgaaaggcagaggaatggacaaaggttacctcctaatgtccttttagtttcctccaaaggaacaaatccccttgttctgcctcttggtccattattatagtcactgaggtatagataaggcacatctctacatatctaacatgccttcttcacatatcgtctggttttcttttctctagtatcccagtcgacatcagtgacagtgatatgatgctgaacatcatcaacagctctattactaccaaagccatcagtcggtggtcatctttggcttgcaacattgccctggatgctgtcaagatggtacagtttgaggagaatggtcggaaagagattgacataaaaaaatatgcaagagtggaaaaggtaaactttcaaagtgtatacattgggtcaaattatatgttagcatgagtcatctcacttgtgaggaaatagtctgtttttcatgccgttgttttgttttgtttttgagacagagtctcaccttgttgcctaggctggagtatagtggcacagtcacagcccactgcagcctcaaactcctggcctcaagcaaatcctctgatttgctaggactacaggcacatgccactgtgcccagcaaattttttttctttttgtagagatgagggtctcatgttgcccaggctggtcttgaactcctggcctcaagtgatcttcccacctcaggctctcaaagtgctgggattataggcataagccatcataccctacttgaatgaaatagttttaaatcagagcaaggtatgttttttgtttgtttgtttttttgagatggagtcttgctctgtcgcgcagaggctaga

SEQ ID NO: 56445 - DNA, 1025 bp, Homo sapiens
ttggagtgcaatggtgcggtcatggctcattgcaccctcaacctcctgggctcaagtgatcctcttaacctcagcctcctgagtagctgggactgcaggctcataccaccacactaagctaaattttaaatttttttgtaaagacagggtctcactgtgttgcccaggctgatcttgaatttctgggattacaggtatgagccaccatgcctagcctgggcaacaaggatgttttctgtataaattgccgtcttatacaatgtgtagaatttggaatagtatgaatggccaaatgtcataccttttgggagagtctgatttaggagagtattttttggaagaataattaagttacttgccttgatatccagatgctttaaatattactatggtgcttgtatctttttcagcaggggaaatgctgtctgtagctgagcacttcctggagcagcagatgcacccaacagtggtgatcagtgcttaccgcaaggcattggatgatatgatcagcaccctaaagaaaataaggtatcttgggggcaagaaataggtagtatcaaatatgagaggcctggctagacgtggtggctcatggctgtcatcccagcactttgggaggcctaggcgggtggatcttgaggtcaggagatggaaaccatcctggccaacatggtgaaacctcgtctgtactaaaaatacaaaaaattagttgggcatggtggcgcatgcgtgtcgtcccagctacttgggaggctgaggcaggagaattgcctgaaccagggagtcagaggttgcagtgagctgagatggccccactgtgctccagcctggtgacagagcaagactccgtctcaaaaaaaatcagctgggtatggtggcgcacacctgtaatgccagctactcaggaggatgaggcagaaaaattgcttgaaaccagggggcggagattgcagtgagccaagatctctccactgcactccaacctgagcaacaagagcgaaactcccatctcagaagaaaaaaaa

SEQ ID NO: 56446 - DNA, 1990 bp, Homo sapiens
ttacgcaaagcaatgaatggtcatttcttagggtcaccagccctttgagaatctgataatagttgtggatcctctttccggaaaaaaaaaaaattgcagtatctctcattttctcacataatctcagggagttcgctatcccactaaggcccattcatagatctcaggttatgaatccctgctgtaaatataggaatatttggttagaagaaaagtattaaccaagattccaaagttatttcttaatataccaaggattgaaatacagaaggaagttaacagccataaggacatatgtttacagttttttgagatatggttgacatataataaactgcacttatttaaagtgtagagtttgataagctttgctctgtggatataccatgaaacctgcattcttatttttcaaagacggggaaataaatagcttgtgtacgatggggcagtcctgggctgttgacttgtgtttttgtctattttaggccagaacacaaagcgtgaatccggaagaaaagttcaatctggaaacatcaatgctgccaaggtcacaaatcttttaagtgtttatggtagtttgcctccagctatctttcctggtatttggtcatagccatgtgtcctgtgcatctagactttatagagtaggcaaataggcagaggaaaagttgacctctttcagaacattttcctgatgatgttaggggaaaggaagccctccccttctgagttaggactgataatcttctcgtattaacttgtgcattattctgttgctgtgtattgttttatagtattctatttgtgtttgtctcccatactaaactgagttacttgaacataagtactttattcccttttgtattcctagtgcccaccgtagatcttggatagatattcggtaaatgtcttttgaatgaaatagtgaaatagccttatatctgatttaggatggtgtagaggccaccgtcatggaaagaaatactaagacatggacttctagtaattaggactgctgggaaacaagctctgggagccatttcccccttattcttgtgaaaagtcatttctgtatccattctgaaagcattcccaaggggagaaaaacaacagagctagccacatcctatatctaaagtggcatgctatgtctaaagtgatggctaaccatgctttaggggtgtcattaaaaacactgactctggctgggcggaatggctcacgcctctaatcccaacactttgggaggctgaggcaggtggatcacttgggcccaggggtttgagaccagcccgagcaacatggtgagaccccatatctaaaaataaaataaaattaaaataaaataaaacactgactctgtgggttgttcatgccccttttccctattactccaacatttctcacactgtcctctgatttgtgcttgcgtattttatgttccctttccattagactattgcagatatcatccgaacatgtttgggacccaagtccatgatgaaggtaggcttatctcttcctaaaactcttaggctacaatttttttcttcctgttatctaggacactttaaatataacttttgctttcatcttagatgcttttggacccaatgggaggcattgtgatgaccaatgatggcaatgccattcttcgagaggtgtgttttgtttttggttttgtttttttgctttctgacagttctgtaaacataaaggacctgttaagatacaggctctgattagttttttagggctgctataacagattaccagaaactggttggcttcaacaacagaaatttattatcttatagaatgaagctagaagtctgaaataaaggcgtcagtagggccatgctccttctgaagtctctagggaagaactccgcttctcccttctgatggttgctggctttctttggcatgaacttggtctctgccttggtcttcatgttattccccttgtgtgtctcttacacaaggacac

SEQ ID NO: 56447 - DNA, 1590 bp, Homo sapiens
ctggctggagtcccgcctctctagtccacctgttgctaaggctagaccaaaagagtgggaactgtgaagcctttcttagccttcacggtccgataggagccgagtcgcaatacacagtttaacgacctcacctgcggtgttaaccgaaagccgcaaccccagcacccaaccctagagttgacacacatgcgtagtggtgtgctggccaactgccagagccttggcgcctgcgccgacgttcgcgctgcacgcggccgggagcggccaccctactgcgcaagcgcctgtgccctcccagtgccttcgtcgtgcgctctctgtctaacttgtctggccgttcttgcgtagggggcgggactaaggctgtcaattggtctgtttttgtgccgatcaatgagatgggtgcggtgattggcgactaccttgagagtagcgggttgaggtgtaagccctgaggaggcagcgttttctgggcttctgtctggttctctctctccagaaggttctgccggttcccccagctctgggtacccggctctgcatcgcgtcgccatgatgggccatcgtccagtgctcgtgctcagtgagttctggggatgccaggaaatggacccccttttcgccctcttctgtccatacttttcagtgttgccccagctccgtcccccactgaccgggccactgagccttccaatcatcgtcttcattttggaagcccagtgtcccgctttcctctcttctcttaacctgttcgcttctctgcacaaactcaaactggccttattctcgccgagcctctttccttgacgtgtgctcgtcttgggaagctctttcccactccgcgttctgtccctcagcccccacgcttcccccgcccctgcgccctttctagcctgattgtcgctatgtagctgcacgaataacgtttttttttgtttttttttcagttaggtctagctttatattcttggcccatcccttagtagcggtaatttaaatgtttcaatctgtattacggagttaacagtatttcctagtagaattgtgagaattaaatgaggtaagtcggtagactgcttaaagagggtctggtaaataggtaatatccttggtcactttacgttacatttattttcagtaacagtctcttgaacagcaatcccttttcccgaagtaaccgtacttgcctcactgatcttagatgtaatcgttccctccgtgtccccggcgttgtactctttcccactaaccagttgggttttcccagatttctcgactggtcaccttttccttttggaagatcccttattttttttctttttatattttgagacaaagtctcgctctgtcacccaggctgggttgcagtggcgcgatctctgttcactgcaacctctgcctcccaggttcaagcgatcctcctgccttagcctcccgagtagctgggagtacaggcgcgcgccaccacgcacggctaatttttgtatttttggtagagacggagtttcaccatgttgaccaggctggtctccaactgctgatgagctcaggtgatccgcccacctcggcctcccaaagtgctgagattac

SEQ ID NO: 56448 - DNA, 2640 bp, Homo sapiens
cattgtagtgggcacctgtagtcccagctacttgggaggctgaggcaggagaatggcatgaacctgggaggcggagcttgcagtgagccgagatggcaccactgcactccagcctgggcgacagagcaagactccgtctccaaaaaaaaaaaaaaaagaaagaaaaaaaaatgcattctcctatgtccaggaaggactcaaattatttaaaagtgcatttgcatggaaattaacacattttgcatggaaattaacacattattgagaagaatcttgagacctgagtttcaacttctgtctccttaccacattctgcacaagccatcaagtgactgatgactctggagcaggagggaaaagaagatggatgacctaccagtagagcctggaaaatccacaaacccagtaacccagtgcaaaagaaaaaaaccaaaaccaaaaaaacatatttccctcaccaagagtgactgacagaacagatttcagttttcataggctcagtgaccttccagacagaaagcatctcaccctggcacccacatataagcacttcttcctcttaccaggccattccttctgttgccctctgagtaaagaacaagaataagacattttccttcatacaacctacttttcacacttctgcccccaggcttgttttttatgaagaggcccttcttaatccttcagatcccagctgagatattatttcctcaggacatgttttccagctctacagactaggtcagttgctttcatagcacttactgaagtgtaatagcatgtgtgcttgatcacctaatgcctgtctgcacagcaagactgtcagttccaggagagtagtgaccacttctgtttagcaaactgtggtatccacagcgatgacacataggcacttagctatctcttatgtgtatgatgaaaatgaattgttttaccatcctttcttgatttcattataacagtgaattattgtctccctactgtcttgcctttttaattcttacctagttccagctgtctgactttccatccattgcccttgtctactttgccacttccttttcatcttctagactcctgaggaggagttccttgaaggttcagtttttctctctctgttttttgccttggagagctaatgtatttttgcagctccttcatcccctttttggggctgcctggcagtttgacctttcacttgagctccggtgccagctctctggctgtttttctgggcacttctatttggatttcctactctcacctcagattcaatatgtccagatgtgattatgttaatatgagagttgagttttactcaaacttctttaagtaaaaaaggcaattcagggacttgtgcagttgggagagatgctgaaatagctcacagaataatgggaagaagagcggcaaaaaccagggcctcggggactaaaactggggatttggtgcctgttggtgtctgtgtatccatctgtctctctcctatgcttttccttgtctctagtctcttgcttttccacttctcatgatatgctagccaaatagctttcactgggcccaaccatacattttctcagaataggagatcagaagaaagtaaatttcttagacacagaatccatatattgatcccagggaatgactctggcccaacttacctcatgcgcctaatcccttggctcagtcacagttgccaagggggatgggaataccatgattggcctgtattgggtcacaggccaatccttgttagggagaggggcttgattgtggtctcaccagtatagcctggcttctcaagttttttgttgttgttgtttcattttttttgagaaggaatctcacccttgttgcccaggctggagtgcagtgttgtgatctcggctcgctgcaatctctgcctcccgggttcaagtgattatcctgcctcagcctcccaagtagctgggactacaagcgtctgccaccacgcccggctagttttgtatttttagtagagacggagttttaccaggttggtcaggctagtcttgaactcctgatctcaggtaatctgcctgccttggcctcccaaagtgctgggattacaagcatgagccaccgtgcccagccgcttctcaagtttttaaggttcagtaaatatcctctacctgaaaggaggtagagttctctcgctactcatattgatctcttctcccttttaagaaacattcatttttacctttaatcacatagtataactaacagataaaaggcttttattttcaccccagactcagactcattgtttatgtcctcatgttgttagatcactgtttcacctgtgtctgatttgtcttcctaactagatactaagcatctaagaaaccatgtcttaacacatcttatgtataccctaggatttagtacagtcgcaagcatgtagtgtatatcagtaagaacttgtaaacaaattagattttggcttatcccactcctgcttggtttctcttaatcctattatgatttcttttttgtcttatgtatctttctgatatgtaacatattcacggcagggcctgggcacctgctttcatggaccaggtgcagggatctaattagaaaggctgtcccttgttggaatgagctctgatt

SEQ ID NO: 56449 - DNA, 1049 bp, Homo sapiens
atccttgccttcctggagcttacgttctagaagggggacttagacaaaaattaagtaattataaaatatgccatatgaccataaatattatgggaaaagtgaaacaagggagggggtaataagttccagtgattgatttcaaattaaaataggatagccaggtatgcctcactgggaggtgacagctgggcaaaggtatgtctgggttgggttgtgcctggaaagattggagaggtcattttattagggtccttccaacctcagtacaattaccaaatctctctcctttgttcccttgcacctccgttgcttttccttctggagttgatcacaagcccaaggaatgcctaggactcctggaatgtatgtatgcaaacctccagcttcagacccagctcgcccaacaacagatggctgttttggaacatttacaggcatctgtgacacaactggctcctgggaggggaagcaataactcttctctcccagccttatctcctaatccattgttaaatcacctgccccaattcagtaaatgaattgtggaacaaagttattgtgttgttttcctctctcttcccagtaaacccttgttggaatctgggtatatgtattctacatatggttagtttgttcacaggttcataataagtgctcactgagtgcaaagcgttgtacaaggcacttggggttacatattacaaaaggagtttgcagggattactgtctaacaaagcagacaattcattgcaaaatgtagtggtattctgaaagaggatggaggttaagaactaacactggaggttactaggatacaactggaccaattttagaatcttgctggagaaagtggcttcatgatgccacttgaagaagggaggggttggatggcatggacagatgaagtcaggtagttccatatcagttgggaagcttggacaaagacctagaggtagacgtattagtccattcttgcattgctataaagaaatacctaaagttgggtgatttgtagagaaaatatgtttattttggctcatggtttggtt

SEQ ID NO: 56450 - DNA, 1035 bp, Homo sapiens
catttctgcagttcagtatccgaaggtttctcttgggggtaggggctcctgggcggccagatgaatgggtccctgggaacccagacctcagatgaggacttaatgtcttcttcctctcaagccaaattcgcctccacccactccctctgaagaactgggcatttgccaaagtaaccactggagtcatctaatggccctccccctccccaggtttcccacagctttcagggacagtgggcaagaggacacccccccccaccacctcagtggaacacaccattctccccccctcaacagcacactcagtgcagcaagactgacccctgaccccctcccagccctccctaccttggacaggaaggaagtaatgcaccttctcttgctgattatttatttgtttggagagacagaaatgtaaaagtgtatctagaaatatctatatctctatatatttttaactgactctttggaatcccctggggtggggtgaggggtaagtttaggctttcgcggaggggaggagacatggagcctgggaactccttgttctcccctctgctgcctctccccaccccttaaagcagttggtagaaggaatggtatttgtatggggggagggaggctggaatggagaatctggattctctcctcttccccattctccagagggagggaggtggtgaggaagaggaagggaggggcaggatgggccatggaggtgccccacccccacacctgacaatcacccacactcctggggctcttcctgggtcctggggcagggcgagtccaagtgtgaggctgttgatttgttttcaatatttcttttcgtgctgtatggtgatgctttcttagtattctacacaataagaaaagacaaagtcctcgagattcttatgagttttgtttgaaaactctttcactatatttgttgtaaagaggtttactattaaaagaaaaagaatacacgtttctgatacttcggcgtgggttttggtttctttggtgccgcgaggatgggaaggaaggactggt

SEQ ID NO: 56451 - DNA, 2682 bp, Homo sapiens
gccctatggggagaggggagtggggggtgcatacccaaagcctgggccaccccctcacacccccttctccatctcctctcttcacagacattaaagtgacgattcccactcccctcctctcagcctccctgatgaagagttgacaatctcaccgcccgcccttccctgccccgggctcctcccgctcgacccccacttcctttcttgtgcttcgtgtcctgttgacggttacatttgtgtataattattatattattattattattattatattttttttaatttggattctcgctttggagagggggatgctctcatcccctctttctgtaccccccaccattttcactggctggggggctctctttttcgcgggaaggggggacactttgcacgttgtacacatatgctgcaggaagggggtggggggcccaataaggcctttgggaaaggacaggtgccgagccctgcatgtggagccctcccaccccacccccagatagagggaaataaccaaaaaactaccaaacaacagaaacccacactctagactgaaaccccaaagtgggcttgatgggtgggtttgtgtttcaaggggaaagtgaggcagaggttctgaaaagggtctctgtttttgtgttcatgtagccataggcacatggagcagaatacttaagcctggcccccaaatgcccctgcacacacacgtgccacacctgcgctgattcttgtgtgtgctgcacccccaaggtgtgtgggtgctggctgagctttgggccgggaaggcagcctgggaatctgaggctggagacaggggtttgaggtgggggcctctctggaagcacatttggagggaaagacaagagagccatgaggagagggctgaggagggcagaagggctaggcagggggcaaattgagcccctcccttccccagtttttctctaagatatacagtgcaatagctccccacccctcagttgacgccagccctgtaaagctggccacagtgtgcagggagaatggggagagggtcttcagtgaggtggctggggcgagagtcggcctggacttccctggggtgctccaggccagagctctttcattggggcgagtgtggtgaggggacgtccttggtcttgcacgcacactacctgggggagtcaacactgggatggtctgtggggtgggagggcctacggatgggtccgtagaggtcccacctccctcattcctccttggcccctctccctagcttctcctgttagctccttctgctcctgaccccacctccttgctcttggcgcccctattgtctctggctacctccttgtcccaccacctccaggctgcatcccaccttccctcttggctactgtaattgtaaatagcgacctttggaaaacgttagcggtgtaacagtccaggaaactgtttttttttgttgttgttgtattgatatgaaatgagattctatttttgtcaaagtatattgtaataataatgactcaaacggcccgtactgtacagacgagattcttctgctgttgttcttgctcccctcccctcctctgagtccgcccctccctgctgcctcctcagtggggcagtgggcaaggggcccaggggcagccgaagcacggggtcctgagacctcaggcaggattggagatcaaaccagagggggcaggcccccagcctgctctctaggatcaccccccgccctaaggggcctggcctggggtgacgtggccaggcagactgtctgccccactccttcacacaagcccagctcctctgcccaaggggtgcggcgcccccttggggtttcctcccagttggagagtagagttaagacaaggcccagttttgtgttagccgaccgtctttgcccacctctatgacccagcctcttgcagtattcccatacttgatgcagggaaggaaccagaagcagaggggcctctacgcaggtacacacgtgtacctgagtgtgttcatgagggcatctggtgtttatgtgtctgagtgtagctttgtatttatgtgtgtgtgtgtgtgtatgtctgattgcacgggtgtacttttgtatttatgtgtgtgtgtggttgcacgggtgtgcctctgtgtgtctctgaccctggctgggtgtgtgtgcaaatctgtgtgactggagctctaggggcatctctgtgtctgagtgtgcctggtgtgtgtttacaaagggagagttggctgctccagctccacagccctgggaccccaactcctgtcttccctgctcctttccctgtgttcaccctcagctctgacacattgaactgcagttggggggattggcagttagccctctgtgcttctccctgcagccctacctctgccaaggtctctccctccagggacctctgcttccacccacatatgtccacttagtcacccacacttgacacagttcctggagtaccctcttcccccaaccccagacctgctttcagagcaaaactcaagtccctcttcctccgtgaagcttctccctcagctgagcagtgatcacttactcactcttaaccccaatccgctgactgggtggggacagcacgtccagccttcccacctctcctgcaggcttctagacggagtttcaaaaactgatgagcctcgatccagggcttgaaagaagcc

SEQ ID NO: 56452 - DNA, 1110 bp, Homo sapiens
ccttaccagcctttagttcacctggggggctgtcgctaggcaatgtcactgcctggcaacagccacagcagccccagcagccgcagcagccacagcctccacagcagcagccaccgcagccacagcagccacagccacagcagcctcagcagccgcaacagccacctcagcaacagtcccacctggtccctgtatctctcagcaacctcatgtgagtcctggggagactgcatgtgagtgtgtgggaagggagaattgaacgggaagaggagggacctcttgggagctgggttccctgcagggttctagtggacatcctatgaggctgtgcactgcacagtctgttaggcaacagtggcacccctgggctctcttgtacagacccaagaggctcaccctgaaccccttctgagagccagccccagggtagggggtgggaggtggggggccctgtgttgcagaagatgacatgggatggaaagagaactaatatttcttatttcccttctcttcccttcattcgaccctcttctgatcactctccatccaattgcctctccccaacaccccatcccccatattctcatcctcttgttctctctcactttctgtctggtgtcctatcacttgttctgtcactcaccccctctgtttttatcccttgtaccccatttccattgcctgcctccagcccgggcagccccctgccccacgtgggtgctgccctcacagtcaccacccacccccacatcagcatcaagtcagaaccggtgtccccaagccgtgagcgcagccctgcgcctccccctccagctgtgttcccagctgcccgccctgagcctggcgatggtctcagcagcccagccgggggatcctatgagacgggagaccgggatgacggacggggggacttcgggcccacactgggcctgctgcgcccagccccagagcctgaggctgagggctcagctgtgaagaggatgcggcttgatacctgggtactgtagcatcacctctcctgtctgccagtgtctgctacacccagggactgccccgcgtgccccctaacctgttttatttcccacccaagaggccttgtggccggctacc

SEQ ID NO: 56453 - DNA, 1025 bp, Homo sapiens
tagtggcatgtgcctgtaatcccagctactcgggaggctgaggcaggagaatcacttgaacttgggaggcagaggttgcagtgagccaagatcacgccactgcactccagcctgggcaacagtgagactccatctcaaaaaaaaaaaaaattagccgggcgtggtggcacacgcctgtagtcccagctacttgggaggctgaggcaggagaattgcttgaacctgggaggtggaggttgcggtgagccgaggttgcaccactgcactccagcctgggcaacagagcgagacttttgtctcaaaaaaagggaaaaaaaagaaaaatccagaacccagccctctgtgtaggaaagcccctcgtggcaggttaagagagctggagggaccgcctcatgttgagggaccagactctggcttgtgtgtctgtgtgtagttaccacccaggtgtctttgagccccttctcccttgcatgtgcacccatgtgtgtgcccagccccaggctacgatgtcctggcaacttcacagatggctgcttcagaagacacacgctgtgggcccgtctccccatctgtaagaggagtgggtagacaggaggtctatgaggcttttccagccctgccactgggcctctggggcccaaccagaaaaaccagccctgagggtggggtggcctggggacagggacagttggcggagggcagctcagaccactttttagaccacttttctggagctgtttatcaggtactctgtgagggtggttttctgtttttctgccatcttgttgggcccacagtcttttgtgaagcaggaggaaagttagttggtgtcagccaacctgggacaggcactcaggaaggctagacttaaagattctcatctgtcactctggcatgaaagcagtttctgcccctgggccgcccttggagccctgctgggaagtgtgtgagatttctcatctcctctcagagaccacaggctccctttcctcttgttacaggagcagctaagcagatctcagttt

SEQ ID NO: 56454 - DNA, 1098 bp, Homo sapiens
taaagattcaggagtaaggggtacttgcctcccattattctcaagacatgaagtgttcagggaatatcagatagctcagcccccactcaaagcctaagcatggctttgagaggttccgggtaacaggagtattggtgtggggaagttaatagggctgaaggataggcccatgtttttccttttaccctcttgttgtcacttctccagggaatggctacgtcagtgctcgggcttcccctggcctcctccctgtggccaatggcaacagcctaaacaaggtcatccctgccaagtctccacccccacctacccacagcacccagcttggagcccccagccgcaagcccgacctgcgagtcatcacttcccaggcaggaaaggggttaatgcatcacttggtaagtgggtgtctgggccaagggtgggggctggggaatggaagagtagggacaggggaaagagcagacctctagcaggagagatgaaggctagccagcagttaggacttcccaagataaatcttggaaccatggctttttatgagatttttcttcccagagggccttttaagaggttgcagcacaagaagtaccagcctaaggcagtaaaaaggggcaggaggtgagagagaagtggtggggaggatcatagaaaggatttgccactatagcaggagggatggggattagatggtgagcatttcctcactggtggagattgggatggagcatctctggaaatgagtcaggacggtggagagctctgcctttgtaggctgggtagagccaccctactcttatgcagagaggtgactggaacagctgtggggacagaggtgtgggggagggcagcggccagagactgaacatccccttggttttatttctgctctcagactgaggaccatttagatctggtaagtgaggctgtgagctctttgctgtggctttgaattctgggtattgctctgcggtcccccagcatgaagtacgtgtgcgtccttggcctctcgcctgtgcgtgaactgttgctgtttctttgcttagttgccaggagctgtgcttaggtgccaagtgggattcaaaggtgaatggggtg

SEQ ID NO: 56455 - DNA, 1076 bp, Homo sapiens
gcagcaggccagatgggtggagactgcaagtgaaatgatgtccctacccgtggtgcaagcctttaacagccgtgtgtgaatttgagtctgttatcagggcctctaacctgctccccgtgtgtcctgcctggctgaggactaacccacctccactagggggtgtccctggtcctgtctgcagtgagcagagccttgttctcattctgtgggccagaaatggacccagagtatggacccagagtttctccccaaagttcttccttggtgggactggcaggcaggactccacaagggcacagggcagggagcttgaactgctggccctaggatgcgtagcccagaaatgagaagaacccttgcctgccctcccaggaaaagtggactccatggaaggggtcaacctggcctgatcctgcccctccatctttctgtctagtcaactgtcccggcccccaactttgccatgcctgtcacggtgcccgtgtccaatcagagctcactgcagttcagcaatcccagcggctccctggtcaccccttccctggtgacatcatccctcacggacccgcggctcctgtccccccagcagccagcactacagaggaacagtgtgtctcctggcctgccccagcggccagctagtgcgggtgagtgggctggcaggtgggtaggtgaggtggaaatgagatgtgatggggactttgggattccattttcaacagcaagtatttctcttcacccaccacagcattccgccatttgtatggctcctgagggaagggagtatgactcttcctcctggggtcccctcttcatgttcagtccccaagactcactcttgaagcgggagtgttgtcagctcatcctggttctgtttttcctccaggggccatgctggggggtgacctgaacagtgctaacggagcctgccccagccctgttggtgagtgcagtcatccttctacctggaggtggggaggggtgcccgctcagtggcctcagggggtccaaggatcaggaacgacctagatgagaggagaggaagatcccagggccaggactggatgaagagtcag

SEQ ID NO: 56456 - DNA, 2019 bp, Homo sapiens
ttgttcactgactgggcagatgtcctctcagcgttgtctcttctccaagcttcagaatgggaaccatagttctaggccagaggagcagctggagcacccaggtgtctatagtacaagcaggttctagagagaagaatgggccatgggatattctctgagacccagaccttggaagccaggaggtccatttactctgtcctggagcctgaggacagcagtgaccgaggggaaagagtctgggccttggtgtgagctccagcttgtgcctggctgtggcataccattgcctcaggcagacagcattgcctcatgttgagggtggagctcagatgctgccagcctctcacaggggcgctgtgagtctggcctgtgtgcccagggagcagggctgggggttttgggggctcagagacctctcatgaccctccctttccaggaggctgtgcagaaggtatcctgcagaccatgaactgagcactgttcccagaccgttcatgagcacagtgtaaggtgtgccgagacccaccacccagcgagcccctcccctccgtagcactgaggacccccggagaagatggggaggaaaaagattcagatccagcgaatcaccgacgagcggaaccgacaggtagggaagtcctagagccgtacgaagtgggtgagggcagggagcaggcctctgcctctactcccttcaggcattccaagagggctttgtggaagaggggaaactataagctattacagaaggggaagggagattgggagaagaggaaccccaacctcttcgcagctcttggagctctgcgtccctggactccaggactcttctgctgccacagctagatgagcccatgttcccatcccagagccatttgcaagccttaggtcatacccccaggcactcctcctttcccaacaggaatcctctccctcttcttctccactgacctcttcatagcctccagcacagaggtgtggagttctgtccacctgaatcctgccccttcagtgagtgggctctgggctgtatctaagctgtgtgttggcctacaggcactagcctggtccttccccaaaccagggactcctgagaccaggggctgtgtcacactgagaatgggggctcctgagggcaggggctatgtccagccatctgtaggctgggactcccaatcaggccttaactgagccagatctggccgcccacccatccttctctgcaggtgactttcaccaagcggaagtttggcctgatgaagaaggcgtatgagctgagcgtgctatgtgactgcgagatcgcactcatcatcttcaaccactccaacaagctgttccagtacgccagcaccgacatggacaaggtgctgctcaagtacacggagtacaatgagccacacgagagccgcaccaacgccgacatcatcgaggtgggcccatacacacaggcaccaggatatacccccgcctgcatccacatggacacgtgcccacgttgcatgtacacgcagacctgcctatgcacacacactggtatacatgccccttgtagcccctcacctgtgcgcacacacatgcaaaccctccttctgtcatacaaacccagggtctgaggaggaaggaagggcagttcaagtgaacaggccagtgccaggctgccagcccacacccaccctgccctctccaagagtctgctgtcgtccagtgtgatgtaacatctctatcctgccttcttgcatcctgtctttctctttgtctctctttccccgcttctccatcttctggtgtgctcctgcacctgcctcttccttttttaaatctccctctttgtttccatctctcctgctgtctctgtctgtttgtgggcccggtagttctattttctgtttcaaagagagccaacattgtgaactgttgaaggacatgagctttggaattcagttctgacctttaccggccacatggccttgggcaggtgcttaggctttcccgagccttggtgcccacctccacaaaatg

SEQ ID NO: 56457 - DNA, 1388 bp, Homo sapiens
actggtggcattatgctcattccaacggctctcaagctgacccgcccccaaggccccagctgccactttcacttctgtctcctgagaccccagagggaagttgtgttggggaggtggaaggtgacacactaaccgtcccaaccgcccccacctctcctcagccagggcttctgatagccaagggcccctgtccattgctcttgtttagatgaccaaattgggttaggtaacagtggaagattggctgcggtgggagggatggccgttagatagcaggaaggacttcctaggattggagaccactgctgggcttcattgtttcagaagatatgggagaggtgtagatactctggacaaatgtaggtcagacttaaaggtaggtaggagattggttgtctgcagctcccattggttggcatacaatgctggggcctccatgccctcccacgtgtcaccagcctcgcatgcttggttggagggcttctgacaaagcaagtttgagccccagagactactttgagtccaaggactcagccctgagaagttctttctgtagtcttatatctgtcctacctgctgtcctgggccatttactcccaccctgcactgtggatgcgttttggaaatggagctagaaatggaagtaaaggacagctcacctccctcctgctgctgccgccccaaccttagcactaaagaggggaatgggattcttctcctgtgacgccccaaggcagtgacagagccacacttcaccctgtgaatcttaccaaactcctgtagctgccatgcttgcttattcctcgtgatttcacaccccttccccatctctgcctagacaagagtaggggacccagttggactgagagctctatactgtatcactgggagttactataaatccaagaatgctttctggaggggaaagatgggaacaaaggcctgaggtgccaagaactccacttggtgtccgcaagtgcctacggatcctgggtgggggtgacccaggtcctggaatgggaagttgagcctgaaggaataaggtcagagacgctatgcaaatcctcatgcaaatgagtggtggtgagtcattgcagctcggcctgctgggatggagtatgaagacagccttaggcttgggttctagagctggtcccaccagggaccaaacagtgaccttgggctagttgctgctcagtaaccacaagcaggtgggtctgataggcattcccagtgtgtgaggggattgggatgactgagcctctgccacaagggccttgtgtgccccacttggtacttgttctggctgaccagagcctttgtgaacccttggccatctgttggggggttactgtttagaaggcacctgccccttcaccagccccatc

SEQ ID NO: 56458 - DNA, 1082 bp, Homo sapiens
ttttttgaggtaggatcttgctctgttgtccaggctcgagtgcagtggtgccatcatggctcactgcagcctcccattcaagcgatcctccggcctcagccttccaggtagctgggactccaggtgtgagccatcgtgccccgcccaaaaaccaaaacttttgagatcccaatgaagagaggtgatgggttctcaaaagggaggaaggaaacttccatttcttatgttcctgtgtgccaagctttgtactgagcatgggaatataagaagactgtttctctctaaaactgtttttttgaattgggaaactgagtctcagagatgtaagtgacttttaagctttcctagttatgaagtataaagggcttttgtctgagattaaaggagagatcctgccctgcaggacggggcaatggaaaggaggcccacggagacctgagaggaggaggagaaattgaagggaagagaaaaccaggattcctcagcagagggcagagaatcagcctttggtggcaaggtgaggagggtattgttttgacttgagtgtcatggagaaagcccccaaagcaagggtgtgagggcaggaacaaatgacactccgagacccctcctgctgtccctgtgagctgccgcatgggatgaatgagaagagacactagagtgggaaggcttggaccacaagaggctgggcttgtctcaaggcagacacaaggccaatgtgagcctcccaggcccagacctggggaatgggccctggaaggaatgtgctagaactccccggtggagggagactccctcccactcccatccaggttgtaagcagaagccctgtgcccaacagtcagtctgcctctgccccttatttctggtgaccttgaggaagtccctgcccatctctgtgtgagtttccatacctgtgaaagggaggtggtgctacctgcctcacatgggaagggaaggagtttccgccagaaaaagtgtgatggttgcatcttttctctcagaccttcagccccagcctggcccaggactggcctgctaaggcagctacccagaagcaggggtgggggcaaggaatgcct

SEQ ID NO: 56459 - DNA, 1621 bp, Homo sapiens
tctgggaagggagacatacagtccgtgttcatggaagccccagtccaagggaagaagcaggacccagagagcctcatgatccttgtgttgggggatgggcatggggaattggctagagcttctgtctgctgtactcaatgcctgaaagattggtggaggacttggaggggtggcaggtgctgtccgtgtccaccccactctgtgcttggtgcccctgggctggagggcctgggcatcctggctctgcccccttggctcctggttcttctcataggctgggagatatgatagtctttctggctgctgttatataatctctctgtagcagggttttttttttttttttttttttttttaatctttcctgggagatgtgatagggaagagaagccagagggagactcttcaggttggggggagctaaaggagcagtagtaaggaagcttggagtgggaggtgccttggcccccgaggaggccttggggataggccctcattgattatggcccagcccctcagacccttctcctctaccgtgccctcagagggtccctctgctgtggtcgtccctggctcttatacccccagagaggcctggacctctccccattttgtcaactttctcttcctgaccagctgggccccctgctctccctggttggcactggatccagaatctcaggacttacgctggcctggtgtgggcccttggttggacactttgccacacacctgagtacctttatggggacaagggaagtccaggagcaagtgggtgggcccaacatttccctagttctatttgagtcaggccccctgcttctttgcccctctagtcgagagagtggtggccttactggaaaagaggagttgagggccttgacttaatacaggccttgacctcttggacacaggtcatcgttggtgttcatcaggttctataagtgggtatgaggatccgatgtgagcctggaacccatcatcaagggtcaggttctgagtctcatggcactgtggtgctgggattctccccatcccacgggaccatggctgggactctcgaggctctctcaggccagctggtttgaggcaactatctcttttttatagagaaggaggaaatggtggcaggccggcacaacctcagcatcactgtaattgctggtggcttttatgagccagtcatggggccggagtccggccaactgtctgtccttctgtcccagtttggtgacttactcatggagggaggggcggttaggtactagaagctgtgttctagaagctggacgtctgactgtattgtggtcgatgtcactctgtctatccatgatcacagcaggtaggatggagcttagacttcaggaagaacttcccagtggggaagctgggggggagagagatggctctaattttgcataggaaaggaggggaactcaaagcactttcttttccagtggctctcccgaaaggaaaggccttgacctttggcttggtggggtcggtgctatttggatctcggaatatttatcttctttttcctctccctgcttatggctgaaagtattctgaggcgtttgtcctggagctgtgggagaaatagccattaggcccctttccc

SEQ ID NO: 56460 - DNA, 1889 bp, Homo sapiens
ggaggataggttgttggaaggactccccagtggagagaaaaggagactattaagagagattgtcttgaggggtcactgggacagaggtagggcaggacagagggcagaagctgagactggagagtccaaattggcctgagcaatcactggagaaggctggggaaatgatggggacagaagatgtgtggggtgctggccctccccgctctctcacatgcccgccctctggacaggaagttcatccatagagcctgccaggtgccagagccagaggagcgttttgcagtggacgagtactcagacatggtggctgtggccaaacccatggtgtacatcaccgtgggggagctggtcaacacgcacagggtgaggggctgagatctggagggtgttggctgggtgggcaagggtttggtagcctgtgatggggtagtgggctggccccagagggaagacctggctcagaccctgcatctccttttctttctccgtcctgcagctgttgctggagcaccaggactgcattgcccctgatcaccaagaccccctgcatgagctcctggaggatcttggggagctgcccaccatccctgaccttattggtacgtgccctccttagcagctgaggccagctaggggacctgcatggagggagggacaggcaggcaggcagggcatgtgagcgtgcccatgcagcctaggtcttgtgccaggcggctagttccatactctccctctggtcctgacatgggcacagggacacagattgatgtggagaaggtagacagacagtagagggacccacgatcatcatggaaaacggtcaatgaaatgatctgaaagaggcacagggatcagggcctcattaggtttctctgagaaggaggggtttccgggccatggaataggaggaagccaacttactgggaggaaggacagaatgaagatggtgattggagagaaccaggagctgcaggctcagggaggcacagctcctctaccctcagggcacccagggctgagggtgtgggggtggcacagccccagtaacacaagggtatgctctgtgggtaacagcccttccatcggtgctaagggttggggacacagggtagttctgcaggccagtgtgggaaaacttcctggaagaggggcatgtggagcagctgatttaatgtgaccccatcggtgcatgtgtgtgtgtgtatgtgtgtgtgcgcatgtgtgtgtgtatgcctgtctccctctcattcctcaccacacctcaggtgagagcatcgctgcagatgggcacacggacctgagcaagctagaagtgtccctgacgctgaccaacaagtttgaaggactagaggcagatgctgatgactccaacacccgtagcctgcttctgaggtgggtgatgccagcctctgcccctgcatacctgagctccccagccctgaggccagtaaaatggccttattctgaggcgcccattccaccttcttcctgggctcccttatccttcaggaagttctccctgaagcctacctttattcccctcgctgcagccttggctcttttccatctggtatcctcagctttttgctctgtgttgtactgaaagtaaaggaatggtgaagatattggcaacagcaggtgtttgcatatcgtgctgtttaccaaatgcttttttcttttttttcaagtagagacagagtctcgccatgttgcccaagctggcctcaaactcctggcctcaaagccatccacctggctcagcctcccaaagtgctaggattacaggattgacccactgcgcctggcccaaatgcttttttaataagttatcgtttattcttagaaacaagctatgaggtagatggtggcttcccctcttcatagtt

SEQ ID NO: 56461 - DNA, 3707 bp, Homo sapiens
gacaggtacctgtaatcccagctacttgggaggctgaggcaggacaatctcttgagcccaggaagcagaggttgcaagtcgctgagatcatgccactgaattccaacctggacaacagagcgagactctgtctaaaaataaaaataaaaaaagatttgttcccctactgtagccagattaatccattaaacctgtacatgtgatcatgtcactcacctccttaagacttatcatgatgccctgttgccttgaggataaagtccaacctcctaatcacagctttggggctttttgtgatccagcctttccctacacctctaacttcactgacctgcccctcaccacctacaccttctgcactgtgttccagatacagtggacttccagcactccccacattcaccctctctgcctccttttcaccgacatctggggtgtctcacctcctccttgcagtgtctcttcactccccaggtggggttgggcaacccacttttgttttcccaaagatccccatgcttgctcctctcaaagtgctaactacactgcagtgaattgtggtttatttgtctagttcccctactagactgcctttagggacagggactagttttattcatcttccaaatctgactccttcatttattactaactgtgtaacatagggcaagttgcttaccttctctgagtctcagagttattatcggtaagagaggatagttatagtgtactgacctcacaggtggtcttaagtacgtaaagtacttagaacaggttctgtctcatagtaaacattctatgtattagttgttttgttgttatttccaataaattagctcagaggcttctttcttttttgctcaaatgccaattccaaaggtgattcaaggagaatcaccagctagctctgacctcccctaaattataaagcccactgtccatcccgtctacctgtccttcccggtgtgtacagacattcctgacagaggagcactgtgggagcaagcagggctgagtggtggctggcaggtaggaggaggaggaggagcaggttggcccagcagaagtgagtggtagattggggtagactagggaggtctgggaggataatcagagggagctgtggctctggctttggtgtcagaggtccctgggatagacccaggctggggtgaatcagaggcatgggaagagcagctattatgtcatctccagttataagacaggaagctcagggacaggcctggctagaaggctacccactgccctccaagtgcaagcagaaccagttagaagaggactggggttggggacctgctgatcccaagcagaacggggactggggtgggctgactcgggcaggggctggtgaggaggcctctgatgaggcatggctaatcctgatgcctcctcccttcctcccagtgcatgcaccccaccctcctctcagtgtggtacgcagatttgcccatctcttgaatcaaagccagcaagacttcttggctgaggcagagctgctgaagctccaggaagaggtagttaggaagatccgatccaatcagcagctggagcaggacctcaacatcatggacatcaagattggcctgctggtgaagaaccggatcactctgcaggtatggggcccaccagtcctcccctccccgagatctgcctgcctctggagatgtgatgctgaccattctctgcttgctaatcaatttttttcaaaatgttgtggattttgtcacctgactcaggtccttgttccagtggccctctgccattctaataaatcattttgggggacccatgacagagtagaaagagcatgaaacctagaatcagaatgcctggctctgctgattcccagggatggggctgtgggtgctcatttcacttctaagtctgttttctcattagcaaactgagaataatgagaatgtccacctctccaggccaaatatagagacagatatgaaagctgtttaaatcataaattaccatataaatatgcagtgacagggtaatagtgatatagtgatagctccacctcaaatgtgtgtagcagtctaataagaagagatagcaaaagccaaatagacacaattcctcagcctggcaaaccagttctctttggggactcactcccatgacaggagaggaaacagatggagtctcagggcacttggaggggcccttcctcaccctagaactgcttctgtcccccagcttatgcctgttccttgaacagcagaaagccctggctcttcaaggcactgattctagaccgtatgttctgtgccctgggatggcctaggctagttgtatcacccgctcctccacccctgcaggaagtggtctcccactgcaagaagctgaccaagaggaataaggaacagctgtcagatatgatggttctggacaagcagaagggtttaaagtcgctgagcaaagagaaacggcagaaactagaagcataccaacacctcttctacctgctccaggttagcagaggactttccaaggagaagtctctcccgtctcctgagggtctgagacttcaaggccttcttgtctgtgcgtttggcaccatgcaaggtgtcctttcccataatcttaattccttatccccaggaaaggagactacctcttcccctgtttgtctggaatgttactagcacctggagaaagtgtggtagtgctttctccattccagatttccatcaggggaaagcctttccttatcctatcactggtccttgaagtgcatggtcagccattcctgtctcccctcttgcttgcagactcagcccatctacctggccaagctgatctttcagatgccacagaacaaaaccaccaagttcatggaggcagtgattttcagcctgtacaactatgcctccagccgccgagaggcctatctcctgctccagctgttcaagacagcactccaggaggaaatcaagtaggctctccagacacaaaggaatggggagagaatgggttaagagatccccctgttggctccttcacaaggtgacaacttgttgaggcctaagggtagaaatggaatcagaagacctcttttctctacctcctgtggagaaaccgtaaaacatctgggacagcacagtgggaggatatgggctgacatgctaacacaaaggatgagagagatatcaagacattccttaagagcggggacaccagggcaggctttgagagccaaaatctcaaaaaggaaaagcaacggtatgtcctacacagaggcagaagactggtttcaatgacctcttaaaccacaggtcaaaggtggagcagccccaggacgtggtgacaggcaacccaacagtggtgaggctggtggtgagattctaccgtaatgggcggggacagagtgccctgcaggagattctgggcaaggttatccaggatgtgctagaagacaaagtgctcagcgtccacacagaccctgtccacctctataagaactggatcaaccagactgaggcccagacagggcagcgcaggtgagcacatgggcagagggaggagctctctttgatcagctgtgtcttgatcagctgtgtcttggaccctactggggaagcttgggtgtactttgaaggtggcatataaatgggcatgctgatctatgcaaatatgacaccagctttgtaggcatgaataaggtagtcttttag

SEQ ID NO: 56462 - DNA, 1920 bp, Homo sapiens
gaccagcctaaccaatgtagagaaaccccatctctactaaaaatacaaaattagccgggcgtggtggcacatgcctctaatcctagctactctgggagctaaggcaggagaatgacttgaacctgggaggtggaggttgtgttgagccgagatcgcaccattgcactccagcctgggcaacaagagcgaaactccatctcaaaaaaaaaaaaaaaaaagaaagaaagaaaagaaaagaagaaaagacatagagaaaaataaaatagggcaaagtgggtaatgggtagagacatagtagggacagtttttctgttttacataatgtagatctctttgctgaggaggtcattttgaaagagacctaaagggcataaatgattgccatgaggctatctggggcagaggccttaagaaagcaatgtgcatggtgtgttcaaagaacatcaggaagccagtgtggtggagtgaagtaaggaagaaagaggagtgggagatgaagaccaagtagccgaggccagaccacgtaggactctggtttttactctgagtgaggaaggaagccacgggagggttttgagccgggagggagttgatctgacctacttcttttttttttatttttagagacagggtcttgctctgccacccaggctggagtgcagtggtgcaatcacagctcagggtctggttctgtcacccaggctggagtgcagtgatgcaatcacagctcagggccttgctctgtcacccaggctggagtgcagtggtgcaatcatggctcactgcatccctgaactcctgggctcaagtgatcctcccaactcagcctcccaagtagctaggactacaggcacatgccaccatgcctggctaattttttaattttttgtagagataggatctctgtacgttgcccaggctggtcttgaactcctgggctcaaactgtcctcccatcttggcctcccaaagtgttggaattacaggcatgagccaccgtgcccagcgatctgatctacttaatgggatctttctggctgctgtgctgagaactgactgcaggagtacaaggggaaagcagggagacctgttagacagctattggagtaatccaggcaagagatgatgggggcttggccttgggcggtagcggagatgggaaaaaggagtcagattttggatacattttgaaagcaaactgacaggatttggtcatataatagatatggggtagaagagagaacagaattaggtatgactccaagatttggggcaagatgggagagacggtgggacatgcaggttaagcaggggaaccagttcagatgtgagctgttgggtttgaggtgcttgttagacattcacttggaaatcacaaggagctggctgggataaatgaatgggctggaggtgtgctttcgggagcatatggtgttaaagtcatgagattgggtgagatcatctacaatgtaagtatggagagagaagaggtctgaagactgaagattgggatgctcccatgtttagatgtcagggaggaaccagcagaggtgtctcagaaagaatagcctgtgaggcaagaagagaactaaaagagtgtggtgtcctggaggtcaagtgaagaaaatcgttcaactgtttcccctgacttctggctgatgattcacatgctactcacctctctgcccttcaccccactgccagttacttcgatgccctgctgaaattgcgacaggagcgtgggatgggtgaggacttcctgagctggaatgacctgcaggccaccgtgagccaggtcaatgcacagacccaggaagagactgaccgtaagtatagtctggagctgggtggagatggcccaacttaggcagtcctgtcccttagccattaagtctaggggccccctgcccacctagatctc

SEQ ID NO: 56463 - DNA, 1284 bp, Homo sapiens
agattaaattgggtttcccaggttccctttcaatggagtttttgcaggatgacagagaaagccaggacatctatgaccactacctaactcaggctgaaatccagggcaatatcaaccatgtcaacggtaagagacctcgagcaggagtggtttgggggtgacctcagggtaagcccctgcactgggaggtttggggatagcttttctcaagccagaaagccctatggtctcatttgggccaactcttgcctcggagaaagatcagagtccaaggagtatgtgcactgctttctggccatcggtgtctagagaagtagtccatgtccgggaagcttctgtctgactggagaaccatagagaggagcagctcttgatgccgggggggcagttggactggggtccttcgagaggggcaatgtggagaatacatgaggatggggggatctgggtaggagccgtgtgaaggctcaggatgggtgggcatttgcctatttgggtgaggatatccttggggtctggggcggcgaagtgagaaggctgtgaagaccaagctgaagaatttgggctgaaccaaatgggcccaggaaccaagggggaaagggtgggggtaattccgggcaggcaagaagagggtagattcctagggctggactaggggattatgagaggtggctttctcacactgtccattatggagtcattttttttcagtccatggggctctagaagttgttgatgatgccctggaaagacagagccctgaagccttgctcaaggcccttcaagaccctgccctggccctgcgaggggtgaggagagactttgctgactggtacctggagcagctgaactcagacagagagcagaaggcacaggttagcctctgtctattacctgccaccccctgtatgtgactataggataggagagggcctcttactcaaagatcaccactgttggtcctttgtattctgtaagtgctgactacgtgtttaaatggttaaatcaccccaaggcctagtagaccagattgatcagcttctgtccctgagagtcccccaggctgaccaagaggaacccaaggacagtcccataggcagtaatgtgctcccccattgttgaactggtgcctccacttagcaatcttgtttttaaagtagttgacttttcccctgacacattcgtgttgtctatgttgttattttagatgcttgctgagcaagaaagattaaagatgagttaatagggctgggcactgtggctcacgcctgtaatcccagcact

SEQ ID NO: 56464 - DNA, 1172 bp, Homo sapiens
gggccctgcatgggagtaggccagctctccagcataccacatctctggcaagggtctaaggtgaggcatgcaggctcactatagacatctggaagacaactgggggcctggttttttgttgttgttgctgttattgtttttggaggatatggcttatatcctgtagccttgatggccttatctggtgtttggttaatccagggcaccctaggactatgtgtctgtggctgagccttggcttagtatgcatcctcagtgaatttcttttatactaggctgactagaaatggttgggggagactgacctagacaccccaggtaacaagggaacacacacctcaggttggagaggaagacccattcctcggcaccccctctccgcatttggtggtgcttaaaggttcccaatggcagtaactggctggtttctcctctagaccttcttcccagagaccacggacatctatgacaaaaagaacatgccccgggtagtctactgcatccatgctctcaggtgagagacctcaaattttatcatccaggttcctctaggtggatgcgaccaacaatcaacaacaacaaactcagcaagaaagaaggatgaagggtagaccacagggagcactgctcaggagagtgaggtttcagatttacagagttgtgtttagatttttgtgcatgtctgtgggcacatttatgtatggcctgtgtgggtgaaggggaagggcaggcagggtaccagagataggaaagtagcagggtagggccttcagtttgtaactgggtataaaggaatcagaacaggacctattgagagcaacacaggcaagacacttagtatggatggtgtaggctctttggtcctacttacagccagccatcagcaaccagttggctaaatcacagcaagtgaccgaccggttccttgtgtttaccatgccatctctttctgaccacttcccatgtccctttgtgcccctgtgccttagctcagcaggtatctgcttgctgcgcccttcctgtcctctctctccattgagtgacctgctactgcaatgtggccttctctgtgaagccttcctaatcccctcagacccccaacaccatcttatttaccttctgcagcactttccttgggctgatttatggtcatatttctttatgtgggttgg

SEQ ID NO: 56465 - DNA, 1012 bp, Homo sapiens
ttggaccccaccttctaccttcgtcccctcaaactatgctttctcctcaaagctgtgagggtagagtgaccatataacttattgtccaaatctggataaaagggagtgttattaatctatgtttctctgtcctggtagggatggaaaatccacaggatgtggtcctctggttcccctctgcccatctctcctgaatctttaagctgtagtctgggctttacccatagggagtgctgagaactgtggaaatagattttctttttccttccctttcaggcaactggcttacatttccgtcacacagacaacatcaacttttggctatctgcaatagcccacatcggtctgccttcggtaatactgggcctgaagattggtattcatctttactccttaccagccacctcccacaatcccatgctttatctccctggaccctttagccctatttccatgtgtcttctaaactaacttaatctaagagaacagttccttgcagctgtgtgtctttgaaccaggttatttttttctctgcctcctcttccctgtggatgaaaggaggtgaagtttccctggcctgagtggcacggttcccattatgcagggggtgggaggctgctatgtcatgctcgtattggccagccttgtctccaccaaatttcacagtgtgaagcaagggtatacacatccctaggtggcagactttgagttagaagcctaggtccaaaaccccaactggacacatgatttcactctttgaacctcaatttgttactcatctgtaaaatggggatagtgagccctgccctgtctaccttacagtgttgtcaggaagatcacatggtctgtgtgaactccctttgtgaactgtgaagagctatacaaatgaaggcatgataggattctacaatgtatggtttctttctgctttgtttttcttccctgtagaaaggcactataagacaggaaacagcagtaaagacacttcgatgggaggcagaagcaatagagg

SEQ ID NO: 56466 - DNA, 1050 bp, Homo sapiens
taaatgagttaagcccacacatagtggctcacgcctgtaatcccagcattttggaaagcagaggtaggcagatcgcttgagcccaggagttagagaccagcctgggcaacatggcaaaaccctgtctgtacaaaaaaaaatacaaaaattagccaggcgtggtggcatgtgcctgtggtcctagctacttgggaggctgaggtgggaggattgcttgagcctggaagtttgaggctgcaatgagccatgatcgtgccactgcactccactccatccagcctgggcgacagagcaaccctgtctcaaaaaaaaaaaaaaaaaaaagattgactgagttaatatgacagtgtggcaatatgtgtaatccacctgttatgcattaagtgctcaataggagtgcccttcctaagttggacactttcaaaaggggaactccagccagactgaaatactgcagtggtgtgggagaagtgtgtagcccccacaccaagaggacagtgtaaatgctgaagcataagtacaggatctggtctctaccgagtaccattatcttatgactcaggttaataagcacctcattagctttgtgtttacaaggtaatatattttgggagatactatgtagtggtacagtacagattctgcagacaagctgcctgggcttgaattctacatgttacctgtgtgaccttgaagtcacttaacctttttaggccttactttactcatttgtaaaataggctaatatttccctgaatgggctgggaagattaaatgaaataatctttgtaaagtcttagcacatcctggcatgtggtgagcacaccataaacttaggtatcagaattgacaccattcctccttgacttctctatatgctctttctgtagccagatagggagctccccaaagaccaggccacctccttcctctgtctctggctcaggaaagagaattcttttttctttctttttaattttttattttttctagaggcagggtttcactacgttgcccacactggtctggaactcctgggctcaagtgatt

SEQ ID NO: 56467 - DNA, 1079 bp, Homo sapiens
aacctattgagatgtctagtctctaggctttcataaataactgttcctgtgaaggctgagtattcatgagtattcaaccctgaaaaatcaggacacagctatcacctactctgcctccacgaatttctcaggctactctcaatgcttccctggagttttccttcctcgtatttgcgcccgggactagctcagtgtaggacgcggagccgttcttggcatcctgagagggccagttagtactgaagtcccttggctgctcaaggattgcagggatgaggcaagtggaacagcctcggaacctccgaaaatgggcacgctccaggtcccagtttctatggcaaccataccggcaaattgggctccgcaatggtttctcctggaaaaaccgtgattttggttcccgcggacgtctctatggtttcgacagcctagaaggaacaaaacggcatttccgggaagatggcggcgcacaagtcaggtccggcacatgtttccgcggagcggacccagcaatgacggtaaggggctcccttcccccgaacggtggtagtcggagcccgggcttattagcaaacgtgagaggagcagagtatttttacccaagtggcactggggtaggagggctggaatttagccctcaagagcaaggaagcctagggaaagggcagccggctctttaggactgctgtaagacgagtgaacctggggccacttctgaaaacacagattgactgtagaggggacagtgcccgaagtgtgatcacaggtttcagaaagactggggcgcacagcttctacccagttatccactgaaaatccggtaaagccattcctaactatgccattcagttcaacaaataacgactgaatgtattcttgagttctggcgccgcgttacgtgctctggagtggcggaataaagccggtctcttaacttccagggcatgtagttttcaattattgcgacaagggttaggctgtgtgtggtcttacaggagaaagcacaaagagctgtaagagactgaagagtgtagtgatgaagaacatcagtttttggccgggtgccttggctcacgcct

SEQ ID NO: 56468 - DNA, 1225 bp, Homo sapiens
ggacagtgctgagccttctggctcagaggaagagtctgaccctgtttccttggagagggaggacaaagtccctggccctctagagatccccagtgggatggaggatgcaggcccaggggcagacatcattggtgttaatggccagggtcccaacttggaggggaagtcacagcatgtgaatgggggagtgatgaacgggctggagcagtctgaggaagtggggcaaggaatgccgctagtctctgagggagaccgagggagcccctttcaggaggaggaggggagtgctctgaagacctcttgggcaggggctcctgttcacctgggccagggtcagttcctgaagttcactcagagggaaggagatagagagtcctggtcctcaggggaggactaggaaaagaccatctgcccggcactggggacttaggggtgcggggaggggaaggacgcctccaagcccgctccctgctcaggagcagcactcttaacttacgatctcttgacatatggtttctggctgagaggcctggcccgctaaggtgaaaaggggtgtggcaaaggagcctactccaagaatggaggctgtaggaatataacctcccaccctgcaaagggaatctcttgcctgctccatctcataggctaagtcagctgaatcccgatagtactaggtccccttccctccgcatcccgtcagctggaaaaggcctgtggcccagaggcttctccaaagggagggtgacatgctggcttttgtgcccaagctcaccagccctgcgccacctcactgcagtagtgcaccatctcactgcagtagcacgccctcctgggccgtctggcctgtggctaatggaggtgacggcactcccatgtgctgactccccccatccctgccacgctgtggccctgcctggctagtccctgcctgaataaagtaatgcctccgcttcaaagtctggactcttctttcccccactcagaggggaccctcagggttagtacaggagagagatggcgggggcgggcggggggtggcgggggagaggaggaagctggtgctggggaggggctgcctcctgaggagaggaggacctggggggatgagggcagacagacccaagctgcagggagcagtgctggggcctggggagggccaggggctgttgcttggctgggggaggccagtccaggtgacctcagcgcctgcagaagccaggcccat

SEQ ID NO: 56469 - DNA, 2653 bp, Homo sapiens
gtcctgcctggaccagaggagcctgggggccagcggcaagaggccagtacaggccagtccccagaggaccatgcctccttggcaccacccctcagccctgaccactccagtttagaggctaaggatggagaatccggtgggtctagagtgttcagcatatgccgaggggaaggtgaagggcaaatctgggggttggtagagaaagaaacagccatagagggcaaagtggtaagcagcttgcagcaggaaatatgggaagaagaggatctaaacaggaaggaaatccaggactcccaggttcctttggaaaaagaaaccctgaagtctctgggagaggagattcaagagtcactgaagactctggaaaaccagagccatgagacactagaaagggagaatcaagaatgtccgaggtctttagaagaagacttagaaacactaaaaagtctagaaaaggaaaataaagagctattaaaggatgtggaggtagtgagacctctagaaaaagaggctgtaggccaacttaagcctacaggaaaagaggacacacagacattgcaatccctgcaaaaggagaatcaagaactaatgaaatctcttgaaggtaatctagagacatttttatttccaggaacggaaaatcaagaattagtaagttctctgcaagagaacttagagtcattgacagctctggaaaaggagaatcaagagccactgagatctccagaagtaggggatgaggaggcactgagacctctgacaaaggagaatcaggaacccctgaggtctcttgaagatgagaacaaagaggcctttagatctctagaaaaagagaaccaggagccactgaagactctagaagaagaggaccagagtattgtgagacctctagaaacagagaatcacaaatcactgaggtctttagaagaacaggaccaagagacattgagaactcttgaaaaagagactcaacagcgacggaggtctctaggggaacaggatcagatgacattaagacccccagaaaaagtggatctagaaccactgaagtctcttgaccaggagatagctagacctcttgaaaatgagaatcaagagttcttaaagtcactcaaagaagagagcgtagaggcagtaaaatctttagaaacagagatcctagaatcactgaagtctgcgggacaagagaacctggaaacactgaaatctccagaaactcaagcaccactgtggactccagaagaaataaatcagggggcaatgaatcctctagaaaaggaaattcaagaaccactggagtctgtggaagtgaaccaagagacattcagactcctggaagaggagaatcaggaatcattgagatctctgggagcatggaacctggagaatttgagatctccagaggaggtagacaaggaaagtcaaaggaatctggaagaggaagagaacctgggaaagggagagtaccaagagtcactgaggtctctggaggaggagggacaggagctgccgcagtctgcagatgtgcagaggtgggaagatacggtggagaaggaccaagaactggctcaggaaagccctcctgggatggctggagtggaaaatgaggatgaggcagagctgaatctgagggagcaggatggcttcactgggaaggaggaggtggtagagcagggagagctgaatgccacagaggaggtctggatcccaggcgaggggcacccagagagccctgagcccaaagagcagagaggcctggttgagggagccagtgtgaagggaggggctgagggcctccaggaccctgaagggcaatcacaacaggtgggggccccaggcctccaggctccccaggggctgccagaggcgatagagcccctggtggaagatgatgtggccccagggggtgaccaagcctccccagaggtcatgttggggtcagagcctgccatgggtgagtctgctgcgggagctgagccaggcccggggcagggggtgggagggctgggggacccaggccatctgaccagggaagaggtgatggaaccacccctggaagaggagagtttggaggcaaagagggttcagggcttggaagggcctagaaaggacctagaggaggcaggtggtctggggacagagttctccgagctgcctgggaagagcagagacccttgggagcctcccagggagggtagggaggagtcagaggctgaggcccccaggggagcagaggaggcgttccctgctgagaccctgggccacactggaagtgatgccccttcaccttggcctctggggtcagaggaagctgaggaggatgtaccaccagtgctggtctcccccagcccaacgtacaccccgatcctggaagatgcccctgggcctcagcctcaggctgaagggagtcaggaggctagctggggggtgcaggggagggctgaagccctggggaaagtagagagcgagcaggaggagttgggttctggggagatccccgagggcccccaggaggaaggggaggagagcagagaagagagcgaggaggatgagctcggggagacccttccagactccactcccctgggcttctacctcaggtcccccacctcccccaggtgggaccccactggagagcagaggccaccccctc

SEQ ID NO: 56470 - DNA, 1036 bp, Homo sapiens
gtcaggagatcgagaccatcctggctaacacggtgaaaccccgtctctactaaaaatacaaaaaattagccaggcgtggtggcgggcacctgtagttccagctacttgggaggctgaggcaggagaatggcgtgaacccaggaggcggagcttgcagtgagccgagattgtgccactgcactccagcctgggccacggccacagagcgagactctgtctcaaaaaaaaaaaaaaattaaaattgtgtggtccctttccatgtcacagagtctgcttttggctcagagtctgtatctagcctgtgtcaggatattgcctgttcttcccaccttgacttccagagcagccatcgctggtgagctttagttctccttagggttccaaggcattagaagtaagagtgtagcttggaaaccaacttctgtgatttaggaaagctgtctctttcctaaggtaatagggggtttatttcatttaggccccagttggtaggttttaaaataatttataaagtgttttaataatttggttgtcttttttaccttgctaaaccaagcctctaaaaactcaaattattcccttgataaatttttataatggaaaagcaattatgtacagtttcttctttatgttaaatagctctatcacaaagtattgtggagctgtagttttcttaggggatttccaggttcactggatgacactaactggggcccttcctggaagtcatagaactgaccaagcctttgtgcgtaacccacgtgacacatatggttccttgtcctcatccctaccacacatcagagctgagcatggcagctcacgcctgtaatcccagctacccgggaggctaaggcatgatgattccttgagcccaggaatttaaatccagcccaggcaaaatagaccccatctcaattttaaaaaaaaggaatgagcacacctaaaatgacaccccaagccatgcaactccccctgacacacacagggtatgtgaccaggagagtgagatagagagagtgggcatgaaggaggg

SEQ ID NO: 56471 - DNA, 1102 bp, Homo sapiens
ctcttagactcagagggttcgagctctataagcccctccactcccttcattttacaaatgagactcaaacctagagcgcggtaatgaccttactaagaccaaatggctggtgaattgggcttcactagaatccaggcttgctggctaacaccaatgctccctccatcatttcatgttatgttttcatttcccctctgtctgagagattgctctgatgtctttccttccataagtcctacggagatcgagcttacctcatttttctcccaggcctaggagctcaattaccaggatcactttcttccccagggtgtactacagacctccacatgttggacagtaggattcagcagagaatgagtcccacatcctcttttcatccataagccactcttcccaactactcttccgccttccattgtccctatgtctactttactgctcaatctggattttggggaacctcctcccaaaaaggcattagaaggaaatgccaagcaccgaaattttgtcaagaagcggaggctcttagaacggagaggctttctgagtaaaaagaaccaaccccctagcaaggcgcctaagttgcactctgaaccttcaaagaaaggggaaactcctacggtcgatggcacttggaagaccccttccttcccaaaaaagaagacagctgcttccagcaatgggtcaggacagcccctggacaagaaagctgcagtgtcttggttgacccctgccccttcaaaaaaggctgattctgttgctgctaaagtagatttgctgggggagttccagagtgcccttccaaagatcaatagccacccaacccgctctcagaagaagagctcccagaagaaatcctctaaaaagaaccatcctcagaagaatgccccacagaactccacccaagctcattcagagaataaatgctccggagcatcccagaagttgccacggaagatggtggcaattgactgtgagatggtgggcacaggaccaaaggggcatgttagttccttggctcgatgtagcattgtcaactacaacggagatgtgctttatgacgagtacattcttcccccctgccacattgtggactacc

SEQ ID NO: 56472 - DNA, 1131 bp, Homo sapiens
aggccagggtgggtagatcacttgaggtcaggagttcaagaccagcgatggtgaaaccccatctctagtaaaaatacaaaaagtagccgggtatggtggcgcacacctgtagtctcagctatttgggtggttgaggcaaaagaattgcttgaacccaggaggcggaggttgcagtgagccgagactgcaccactgcactccagcctgggcaacagagactccatctcaaaaaaaatattaagattcctaccaaatcagcctctggtgaacctctctaaggtgcatgttaagcaagcttcccaggcatcgagaacctacaatgcaagaggactgcctcccaagtcagtgccttgggaacccgtgttccttatggagaacggggtctccttagccccgctggatcctcccccatggggaaaagggactatgcctacaggcctgggcagaagaggctgagtgagtttggttcattcttccccttatgattaagccctttctcccaggtttccatgctgagctcctgcccatcttcagtcctgaactctctcccagaaacctggttctggtggccaccaagatgcccctgggtcaggctctttctgttctggagactgaagacagctgatgcagcctgaggaaacatctcagaccccatcatctgaaagtgcccagagagcacagtggcagagtacatctcatccagagaaacagcatcctgcatcctccagagtcctggttccttcagtttcatcccctttctctccttccatggattatgtaatacattgtaaagttttaattaattaaaaattggatatctgtttccttcccatttctgtaggtagataaaaggagatgcgcacccttcctgtggcactgctgcaagggtgctacagttaggactcagacgccactccccactggcctccctagcaggtggggtaggtgatggcttctgttactcacagatttccatgaaggggacttctctccccctctttggcctccaactcagaatctgcaggccctgccccttgggagggccgccttaaggccagctaacttccatccaggttctgtcataaactcaggaaagaagcttcttcccttcagtccctgagagtgtgctgg

SEQ ID NO: 56473 - DNA, 1051 bp, Homo sapiens
agcaacggggctctgggcagagggtttctcaccctctgggtccaaaaagtgctgtccaatgggaatggtgggttggatgctctggaaattaagagggaccatctcatggacatgattccctgcgggtaaccccaacacagaggtggagaaacgcggtggtaacccttgtgttttgaaccactgactcttttgggttggagggtggcaggaagcctggctcgtaggccaggctcacctcttctatccaccaggaaacccactgagatcgagtggagatttactgaagcaggagagcgggtacgagtctccacacgatcagggagaattatccctaaacccgaatttcccagagctgatggcatcgtccctgaaacgtggattggtgagagtgaggggcaggaaggtcaggggtgggtgctaggagtgagagtaggggacattaatgaaagttggcaagccctcccacccatctaagtttcctctggcttaacagatggccccaaagacacatcagtggaagatgctttagaaagaacctatgtgccctgtctaaagacactgcaggaggaggtgatggaggccatggggatcaaggagacccggaaatacaagaaggtctattggtattgagcctggggcagagcagctcctccccaacttctgtcccagccttgaaggctgaggcacttctttttcagatgccaataaagagcactttatgagtcctcctgtgtacagctgctgtgtggtagaatggcacccctaatcccagcacactctcagggactgaagggaagaagcttctttcctgagtttatgacagaacctggatggaagttagctggccttaaggcggccctcccaaggggcagggcctgcagattctgagttggaggccaaagagggggagagaagtccccttcatggaaatctgtgagtaacagaagccatcacctaccccacctgctagggaggccagtggggagtggcgtctgagtcctaactgtagcacccttgcagcagtgccacaggaagggtgcgcatctccttt

SEQ ID NO: 56474 - DNA, 1455 bp, Homo sapiens
gtctgacttccttgtccagggctctttatgccattgtagtatctttatttgtctttgaagttagggttcatttttatctataaaatgaggttaatcatgacttcttcatttggttgtccttaggcataaatgagatacaggaaagcacttagcatggcacgtggtaagttgcaagtattcagttaactgaagcacttaccatttatgccttcagttcattcaccacctcattaattgagaatcgagtggtttagagaacatacttagttgggaaatttaggactcagtaattctagagtctggccctgggtccttttcctttagaaaaggagctatcttagggaggagtggttatttcctatctgaggataggaattctaagtgggatagggacattttaaccccagtttttatttctgctacctatttgttcatttcactgatttacaactgcctaccttttggccgtatgccagcgttccatcctctgttttcttcctatcctgctgttcatacattgatttaataagtatttgttaagcacctactaggggccaagctctggattcaagagtgagatagataacatggcccttgtccttaatgaattttttggactttgaagtcagatatatgtgggtttgaatactgattctccaatgtagtagctttgtaatcataagcaagttacttgacctttctattttctcatctataaagatgataacctcttgtgaggattcaatgtgatgaggtccattgagcaatagagtaagtgctttaaaaaatgttccttcccttgcctctttgttcccgtttctatccatctgcccagagctgacaaggaaggtttcgagcgttttgctggcaaagggatttcttacaacctccaggcatgcgtctttctgccctgctggccttggcatccaaggtcactctgcccccccattaccgctatgggatgagccccccaggctctgttgcagacaagaggaagaaccccccatggatcaggcggcgcccagtggttgtggaacccatctctgatgaagactggtatctgttctgtggggacacggtgagagcctcatacagggggtagagtgatggggaacctcctgggcaaggatccccctccctaaccttcgtatcttcccacaggtggagatcctagaaggcaaggatgccgggaagcagggcaaagtggttcaagttatccggcagcgaaactgggtggtcgtgggagggctgaacacagtaagttgagagaggggatggggatgctcaggaagcctgtctcatctgtccctctccattcagagcagcacagggtggcaggagactggctgaggggatggcggcattactgaaccttctacttttcaacttgggctgaatgcgccgagtagcaagggcaaacccctttcacaccccgtgctttctgacactcccctc

SEQ ID NO: 56475 - DNA, 4062 bp, Homo sapiens
cggggaaagggtcctagctccctttgggagaagttgacccgaggttttgcctcctgctccagccctcccccctcctgcacagagccctgcctgcccggccagtgggtttaccccggggctaatccgacagaggtgggtctcaaatcactcgtgagactgggcacctgggtgggggtgggggagaggcgggaaaaggaaggagtgagtggctgagggagggtctggggagggggcccagcatggcagcgactggtgccactcagcctgtgctgtctctgctgcagtcctcccagaaaaagagctgtgtggaagagcctgaaccagagcccgaagctgcagagggtgacggtgataagaaggggaatgcagagggcagcagcgacgaggaagggaagctggtcattgatgagccagccaaggagaagaacgagaaaggagcgttgaagaggagagcaggggacttgctggaggtaactgctgcctgcccagggcctgggcccccctcaacattccccatggggtatcccacaggagcagggctttgcctcaggggtgcccagtctgagaggtcgatccagcccctagtcttggggagtccccagctgaccagatgggacacagaaggcatttcagctagtagggttggggaaggactgtgggtgtcagcctgggaaggagccccggaggagaggagtgggtggctggtggcctccctctccagcctcagcccacttcctctgttgatcctgcctaggactctcctaaacgtcccaaggaggcagaaaaccctgaaggagaggagaaggaggcagccaccttggaggttgagaggccccttcctatggaggtggaaaagaatagcaccccctctgagcccggctctggccgggggcctccccaagaggaagaagaggaggaggatgaagaggaagaggctaccaaggaagatgctgaggccccaggcatcagagatcatgagaggtgagtgagccccctgaccccttggcagctggactaggggggaccggccactctcggagaagaggatgaaaagggcctgcagtggtcagcctctcgggaggcagggtgggctctcctaggagaccggcactggctggggcaaggccaggccaaggccacaccattaacccttctcccctccaaccctccctcacagcctgtagccaccaatgtttcaagaggagcccccaccctgttcctgctgctgtctgggtgctactggggaaactggccatggcctgcaaactgggaacccctttcccaccccaacctgctctcctcttctactcacttttcccactccaagcccagcccatggagattgacctggatggggcaggccacctggctctcacctctaggtccccatactcctatgatctgagtcagagccatgtcttctccctggaatgagttgaggccactgtgttccttccgcttggagctattttccaggcttctgctggggcctgggacaactgctcccacctcctgacacccttctcccactctcctaggcattctggacctctgggttgggatcaggggtaggaatggaaaggatggagcatcaacagcagggtgggcttgtggggcctgggaggggcaatcctcaaatgcggggtgggggcagcacaggagggcggcctccttctgagctcctgtcccctgctacacctattatcccagctgcctagattcagggaaagtgggacagcttgtaggggaggggctcctttccataaatccttgatgattgacaacacccatttttccttttgccgaccccaagagttttgggagttgtagttaatcatcaagagaatttggggcttccaagttgttcgggccaaggacctgagacctgaagggttgactttacccatttgggtgggagtgttgagcatctgtccccctttagatctctgaagccacaaataggatgcttgggaagactcctagctgtcctttttcctctccacacagtgctcaaggccagcttatagtcatatatatcacccagacataaaggaaaagacacattttttaggaaatgtttttaataaaagaaaattacaaaaaaaaattttaaagacccctaaccctttgtgtgctctccattctgctccttccccatcgttgcccccatttctgaggtgcactgggaggctccccttctatttggggcttgatgactttctttttgtagctggggctttgatgttccttccagtgtcatttctcatccacataccctgacctggccccctcagtgttgtcaccagatctgatttgtaacccactgagaggacagagagaaataagtgccctctcccaccctcttcctactggtctctctatgcctctctacagtctcgtctcttttaccctggcccctctcccttgggctctgatgaaaaattgctgactgtagctttggaagtttagctctgagaaccgtagatgatttcagttctaggaaaataaaacccgttgattactatattggattctgactgattctttgggggtgtattggttaactgaagacagaaagtggggtaatggaatgcaaatgatttccaggtcatctcagatttaggtagagggtgtcaacctcctccatttttaggcatttggaaatccaaacttcttgtgggcagagtcgtagaataaaccacaccattcattctactcctgcccagccactgtttaacgcacctgggaaagttttttttaaaaaagggtttgcacaagaagtggggtgtgggaggatgcgagtatcggccacagcccaagatggccatgaagtgggagtttggaggctggttgtataaacaatttgaccccaaagtgcaagtcaaataataggataaccctttctccttgctaatgctaggggtacctgccacccttagctggtgatggggtggtagggggagggggttggtagggtgaaattccgccagtactccctgagttaagtggaatgactggtttagatcatttctgtttccttccagatctgacattttgtaactagatcggctactagcattggaagggcccacgtttcatcccttcctctagaaagcctaccggcagtttttgaatctgccctgcccccactccagcagagaaggacagggagagcattggcggtagccctgtctggaaagggcggccctttgccttgaacaggaagccacaaccacctagaaaatggagccttcttctctagaaactacaattcccagcggcctccacgcagagcatgcgcgggaatgtgccaggcgggccagccgaaccagcttgcctttcgattcccgacatgcttcatggtgtgttccggtttccttgatttcctacccccgccaaacttcctgtttccagctttctagcggcggactacaactcccagcatgctgagaggtaagattcgtggttgagcttccgttttacacttggactacaactcccagaaagtcgacgggcgtggcgggggaggggacgctgagggcccatgtgctgaaaatccgaagtgccgcggaaagtggaggtgagggccgcccgccctagaggtgcccgtccgagaggcaggtgcgggaagagcctatccttttccctggccatggctcagtcgcctccccagggtttatttgcaccggaagtttggagcgggtgggtgctgaagacagctaggccttggcgatgtctgggatgaggctggtgggggaagcctttggagccgtgacctgagagggcagaccttcgaccccactacattgcactgcgccttcagaacatgcagggaaaaccccactgcgggacgctcaccagcagcatctccagattgtgaagggaaagaagggaaggatctcgggggcatgcaagctgctctgggctggggtggttcagacctggattgactgaggtgaaggggctccttgcagcaatcacacagaaggctcgggtcttaagattggccctgctcctagtcaagctgtatgaaccagggtagtcactccggctttcagggcc

SEQ ID NO: 56476 - DNA, 1105 bp, Homo sapiens
gaaccttgttcttgattttgggtagcattccaaaggaaggagagggttcttgtgttaagaggtcccttcaggacacggagagaggttgagtgatgagctggagagacctgggcttttggggaggaaggacgatgtgaggttaagagcatcgtatttgttgaagacacagagttgaggaaggctcgctctgtggaagagggcagtggagctgggttgggatggaagagaagaggaatgatacctcaccttgggagaagcagcccgcagaaaggcctgaagtagcaggagtcaagcccagattaggtggtctgagtggacggaggtaaggaagaaacaagggctggtaagattttaggctagagaacttatctgtaactgttgtttttggtgttgctagtacataaaatctcacttgtcatctttctttcctcctatcccacacctgggctcaccagggatccagtgaggggactggtttgtctgccttgcttccccaacctaaaaacctgactgtgaaagagactaacaggttgctcctgccccatgccttctcccgcaaaccctcggatggctcccctgatactaagccctccagactggcttctaagaccaagacttcctctcttgcccctgttgtgggcaccacaaccaccactccgtcgccctctgctatcaaggctgctgccaagagtgctgccctgcaggtgacaaagcagatcacgcaggaagaagacgacagtgatgaggaagtagcccccgaaaactttttctccctccctgaaaaggctgagccacctggagttgagccatacccttaccccatccccactgtccctgaagagctgcctccaggcacggaaccagagccggctttccaggacgatgcagccaatgccccccttgaattcaagatggcagcaggttcaagtggggccccttggatgcctaagcctggggacgactacagctacaatcagttttccacatatggcgatgccaatgccgctggtgcttattatcaggtgggtaggaggcacagagggcaggcgagggaatgttggaacatggtggtcaaggagagctttgagctagtgatacagcctct

SEQ ID NO: 56477 - DNA, 1007 bp, Homo sapiens
tggcccaggctagtctcgaactcctggcctcaagtgatcagcccgtctcagcctcccaaagtgctgggattacaggcgtgagccactgcatctagccggccatatctagttgtaagggggtctaggaaatgtaatgttttattagttgtgtggtaatatgcctagcaaaaattttggattctttcacactaaagaagaggagaatggatttagggaggcaccaagcagctatgttaaataccgttgtgtttcacataatggtctctcactgctgctgagctttcctaagcttcagcaaaaggaaaggtgaaagcacaatgtcctgtgactttcaggcccttattcaggatataaagtactgttctatctgcagggaagtcacagcctattaggagggatctgcagaaatagggggtgctacctcaccatggaggttcttataaaaaataattcttctctgcttaccttttcccagaaaggtgtccatccctttgcatacttctgcctgtgcttgatactgtgttcatccactcccctatggatatccttcttggcaggtttgatagttggtttctttgggaaccaactaagcctaggagacagctgagaacccagttagtggcaaaagtcagtttcttctaggtagagtgagtatagaaggcctcactaatgttgagatcaggactgggtctcactgaagcttctaagttttaaaattctattccttcttcaccccacatttgctttgaggcacacctctggatgacttgtgtgatttgcattttgcttttttaggaagaggaaggcgtagcagtgtcctagaaagtttactgggcttttttttttttttctttaccttaaaagcttttgaagtaaagctaagactctgtgtgtgtgagagactccttttctacgcagccccacattctttgtctctaatgtccactctggtgtggggtctgttgattcggtgataccgaacaattagaaggaacagagatggacaa

SEQ ID NO: 56478 - DNA, 1065 bp, Homo sapiens
cacaacagcacctcagaaatcctggagtccctagattctgagcatgcaactcttctgtgttctcttcattattgatggtagccagctgtagtctttccagtgcttttattcatcacatttcccacaccacactcctgccttctctgtcctagttttcttcagtcagtatgatgaacatttcttcacctagtagctgagaacagcaaatgtggacatttatgagcctgccaccggaggggaaatgtgggaaaaccctggacttgagcccagcaccagcgagaccaaggtcgaggattttgttcccttttcctccccccatttgctttgctttgttctatggccacagatggccacacaagccccagccgtttgttttaactgaatgctggcggtcatacaggacagagcaaaggactgtggttagatcagcatagatccatcactgtttactggaaaaaccacttaggagagcatgctctaccaactgtgggtcgagaagcatagtcacatagtaatagctactgttgttaatgctcaccgtgggccaggaatggagctggatgttttatgtgtgtcatctttaactgtcacattaaatgacattaaatagcagcaagcaattagtatttgctattttcctatctccaagttttcttgccaccgtctcattatattgaactagattttgttaaaaggagaaaaagatatggtccttgtccttgaggagttgacagcatagttgggaagaagagatttaaggacacttgagtgtaaatgattacagtacagattgatgacataagtgctgaggagactctagagaggagttttgggagttgggtggagatgattaggaagcttctagtctgagacaactctggcagaggacagaaaaaccgcagaatgaaagcccagaccaatatagactttgacagtaaatcatttgcatcgaagtttggttacgggttcagtgcagttacgggcggaggctggaagactggggagaggtagagtgattgtgaaatttctaattccagggaagctgctggcacttactagaatggg

SEQ ID NO: 56479 - DNA, 1051 bp, Homo sapiens
aactgatccctgagagaccagctggggccagggttggggggttactggaggctacagtgtgtgtcaaggctcacccctcctgccctgtgtccctacagacactaacagcacatctggagacccggtggagaagaaggacgaaacaccttttggggtgagataggaagtagaagcttgtgcagactttgggaccgggaggctgggtagaggctcatctgcatgtcatttctggtcagagcagggagatcactaccatctggcctgagctctgacggccacccgcacagccactgcaggggtccccaggggaggatgaggcaggtctggagacctggctccgggctcccatgcaggatgaaaaaatggcttactacaggaggctctgagagtacaggaggagcccctggatctaactacccctgtcccccaccaggtctcggtggctgtgggcctggccgtctttgcctgcctcttcctttctacgctgctccttgtgctcaacaaatgtggacggagaaacaagtttgggatcaaccgtgagtcggggctgcagagggctgtctgtctgtctgttctcctggctttgtttcctactggctcttcctgactctgtctctggggggctgtgcacatgggagttccagggcgtgtgagtgtgtttggggtataaatgaaggcctggctgtgaggcttgtgagtgtgagtgtgtgtgggagcgtgtgtcgggctggtgctggggtagtttcagaggcggcagctgctaattggtggctggattgtagtcaagcattaagtgggtctgggaggtctgggctctgtgggggtggagggggagttctttggtgcccatggggccaggggtgggacaggagccagcacagggagaggcggtggtgcccccttccccctgcctgctgtctcgctccctagcttctcagtctctcccctgcaagttacaaggtgggggtgaccaggcatcctgcaggcaagggtgggcagggccaaggtgtgggcaaacccctccatgcggctgtgtctcctctctaggccc

SEQ ID NO: 56480 - DNA, 1034 bp, Homo sapiens
ccactgccggagcagtcctatcacaagctcatggccttggacagcacgtgagactccctgccctcaccccctttctctgggcctgtctcgaaattccaagccatttttagtccccgcccttccttgtccccctaccatctcggcaagggccctcgatttctgcccctacatcctcagaccagaccgccccctcaagcgctcaagtctcccatattccggcggacgccctgtaccttttccagcgacccacattctccctccggctgccccaggattgcgcacttgtctctgcggaacaataacatcgacgaccgcggggcgcaactcctgggccaggcgctgtccacgctgcacagctgcaaccggaccctcgtctcgctcaacctgggtttcaaccacatcggtgacgagggcgcaggctacatcgcggacgtgagtgcacggcggggagggacctgctgggagcaggggcggcttgggcggctcacgcgtccctgcccgcctcttagggcctccggctgaaccgttccctgctctggctgtccctggcccacaaccgcatccaggacaagggcgccctgaagctggctgaggtgggtgtgccgatcaggtggggcaggggcgtgggcgggccgagggagccgaccctgactacccaggcgtccgaccgctgagcgcccgcctccttcaggtcctgcgcgccttcgagctgacacacaccgaagtggtggagcgccgacgcctcctgctggaaaaagggacacaggagcgctcgcgatcggtgaggagctaccaggccccaggaccagccgagagcccctctgaccctcgagcccactccccaagtccgctgcttttcagcaaactggccatccagtttaatctccaccctctgtcctgactgtctttccctccgatttctgcacagacttttgccaagcccctgctgggggggctctaattgcagaaccacactatgggcagtagagtgtactggttcagagataggacactagattgagaccacctggacc

SEQ ID NO: 56481 - DNA, 1051 bp, Homo sapiens
ctcccaccccactgaacatcctaagcaggttgacatattttgtgggtctgttctttcaacctctccccctcttccacttcttgcctgattctcctgcccctgaaagatggggagtcctgcactcctgctgcattggtcaggctgagggctgcaggtgttcaagggtgtggcagagcctggagctcctgatagtcatttggtggttatgacagaccacgggccccaggaatgtggtaagctttctgctttcccctgctggccctcctcctgacctctctcccttcctgcctctaagatcttatctgtcacagagagtgaggccagtgatgtgtgtgcccagtggataaagttccttcaggaggcagctagaactggcttaggggaaattgaaccatcttttactaatccacatcagaaaactgaactagtgcaatatactaaggtgcttctggcacagccgcttttgttatgtttttctagcgccattttcgaaagtgtcataggcacctgtgatgcaagccccagtatcacagactttatggggacacttcaggcttagaagcaattttttgccctactactgcttctcactaagtagttatgtgaccttggttaagccattccatacaagtcagatccataggcacagccaggcactttaaggacagggtaaaaatagcaaagaagatgaaacctatgcagtctctgctaaggctgatatttcaactcggcaaatatttatggagttcctgctatgtaccaaatacttgtgcatcagacgtacttctctccttttcccccactaaccctcctttcatctaggaaaaacttaccctcctcctagcctctaaccaggtgaccagcctctgtctttgcagtctgagtcatctgttctttcttccattccaggtccaagtatgaggaagacaggaggtaagcaagtctatgatgtggatttgcagctttcaaggtggaaggagtggggttgagctactatgctttccatttctgacaatcacaggggagtccctcatgttgtacaaccatgaag

SEQ ID NO: 56482 - DNA, 1128 bp, Homo sapiens
atctaaaacagtgacttgaccaaaaacatatttccacctgtccaggaataacatcgtcttagattaatacagtgaacccaacctattcagaagtggtagtctttttttgctgtggatctttttcttcccaaatagcttgtcttttctggaatgactaaaagaatttcaggttttgacctcaaaggttatctcttccaggtgttctcagtttgcacatgtaaactatgaacggcaatacaaaagtaagaatgaatggaagaagtagtaatgaagttagcaaaatatttgcttagccagagtaattaaatatgtgaatatgtggttgaaaagatgttaaaaacctaattttagatcacaattggaattttattttcttactgccctgtccatgggaaaatggtgaaatatatgtgaaaggatcggtatgtgggaaagtcaccaagaaagtggagtgggacagggatcctaaagaatctacagttgacattatctggaaggccacagagttggtgatgaagagtgtgtgctgtgagttgaggctgcctgggttaagtccaggatacacctcatgactagctctctgacttagcaagtctcataacctcttggagtctcagtttctttgtgtgaaaatgggacgaataatagtatctacctcaaagggctactgtgtgaatcgaatgagataatgtgtaatgaagggcttagtataataccaggcacagagcaagtactgcacttctcttagctgatgttataagtatggttatcaccaccaacaccaaatgagctgagccttgagggtcttccggacaaggttccttctcacagaattctttgtttctctagtcattgatgaatcggaactcggtactgtcagaccctgggctagacagtcctcgaacctcccctgtgatcatggccagggtggcccagcaccacaggcggcagggctcggatgcagcagtcccctcaaccggtgaccaggtgagtgatctggagccaccctgcagttttccttttctcagaagtgagatttggaggcatgggtgttaccagtacatcgtcttggatcatcagactaaacccctgcttcagcaacccaaactttgagacagtcacttacat

SEQ ID NO: 56483 - DNA, 1037 bp, Homo sapiens
agaataacatttgacaaagccaataggaattaattaaagatgatctacttttgcttttaggatatccagatcaaaaaagtttgggaaacataggcaaatacatttaaactgcttcattttctgaaggacttctcatattacatggctgataggtaggagctcaggttgtggacttagaccatctggattcaaatccagcatcacttctcatcagcttaaagactcttgggcaagttaattaatccataggagccttaacttcctcatttataaaatggagatcacagtgttgtcagagttaaagcatgcctttgacagaggggctgtacatgtttgctgctgccactgcactgttgattgtgctatgaggtgatgagtctgagaaactaagcttggaatctgaaggtctgagcgccaaccctggccttagggttgacctgctgtgtatcttgggcaagttacttaagatctctgagcttctgtttcctcattgataacatgagagtaacatgcctaagccagagccattgaaagattaaatgtgacatagaaaagtgctttgtaaacagcaaagcactatcaacatcgcttccttcacatcccactagctcagtcagtctcaggccaatgcctgtccatcctcctcaaagatctccaaaggtaaaccttttatatcttccctcggtcacctgcttgagtctttttttatacttcttgatggttaagaagttctttcttgtatccaaataaggcaatagatgctttgaggtccagggtgattggataaagctagcttttagaatttcagtaatggtaaagctccctttccaccattaggggtcattgtcatcctcaaactgtacaaatgaagcaatatctcttctagctgggcatttttgaggcaatgaagcggaagaggccactaattgtaagcaaataaggcactgattggtgaaagaaaaccgtagggggagaggctcacagaatttgcccaccctgtgggcctttctgtttcaggacatacttccactatatgg

SEQ ID NO: 56484 - DNA, 1078 bp, Homo sapiens
agcaccaatatctaggtctcctggcttcctcttgatgtcttgagatgctattcttttcattgaacataagtttgatggaggactccgtgacaaaagcaaataaatataggctaaacataatattcggcagtagatcatctaggagatcttaggagatctgtaaaatggttgcatctatattagataactcaagacttgattttgtgtttcaaggcaggatgtgcttgctttggcagtagcttactaattgtgtctgacttagggcttcagcaaagaatagcacccatttttaaagtactgcagagtgccagccattgtactagatactgtacttacattacaccaattcttaaaacagcctgataggataggtggctagtattcccattttgtagatgagaaaactgaggttcgcagaaaatagtttgctctcagtcccatagatggccagaggcagagccaggcctgttctaactccacacttcaccacactgctcctcaatatcaatgtaaattcctgggcatagcttcggcattgagctttttctgagaaatatgtgacaaattggataagtccgatgtgagcttgtgccaatacctatgctgatagagcctgcaaggctgatggggtgttgggttctgagtggagaaaagggtgcacagcctagggcagtgctggattgttctactaaggggtgaagatggtgccctcagagccgggctctgcttcgtttctgggagacagttgtgcctctttactctaggactcacagtccagcgaacaaggagagaggtcgacaatgtggaaggtgcttttgcagaaatatataccaggtgctgtgggagacagaagttcctggagggttgactgggcaggcttctagttttctctgactgttctgaagggcaaggaggtctcaccactggagagaaggtggaagtgtggtgcagctgtggccaaaggaggccagaccagtgctgtccaatagaaagatagtgcaaaccacatgtaatttaacattttctagtagccatagtaaaaaaaaaaataatacaggtgaaattatttttaatgata

SEQ ID NO: 56485 - DNA, 1051 bp, Homo sapiens
atttcagaatagaagagcagcatatttagaaacgaaggcaaggcctggcattccttcctgttagccaagattagaaggagctgtgagaggggtagattttctgcaggacctctctatgatcttgggagtaagagttagagtcctagattcctttggccttctggatgtcatcatttccacatcctgtctccagccaaggctctccctttctggagagattgaagttgttgtttcctatttcacaggattccttttatttttacgtttggggggtctcacccagggaattccttcctgatgtcatctttgtgggatgtaaaggagggaatgaggggaggggccccaagaatgtttctctttctgtgaaagtttttttcagctcttactgccattcaacattacttgtatccatgagatggcttctttcctccctcaccccacccgtcttcagtttcctggaaatggaatgggggctggaagagagaaaggatggaaattcccattgcatctctctcggctatgcagtggttcagatggggttttggtgaggggggttgggagaagtagaaagatggagtcagccctggagggagaggccaggagactgctgagctgatggtatgggcctaattactccctgccttgagcttgcctgtaattgtggtttctgagagccagcacgtcctggaaatctgctggtacagcagagatttggggtttccgcctgggatggagttgaattttccacttggagcaacttgcccagcccccatttttggttggggagcagagtgaatccttaaagctcaaaaggagcgattaggatagtggtaggaatataaggccttcctttggaactgaacgagaggttgtatgctctgaaatgctagacatttttgaaaagttcagagaggcggcagatagcaggacctggtaaagagttgtatggttaaagttagaatgtcaactgtgtcccaaacctaggacaagtgatttaatctttttagacattagtttctccatcagtgatttgatttgaatatgtgtcttt

SEQ ID NO: 56486 - DNA, 1053 bp, Homo sapiens
ttgggagtctaaggcaggaggatcccttgaagggccaggaagttcaagaccaggctgggcagcatagcaagaccctatctctaccaaaaaaaaaaatagatttgtgatgtcctggctgccatcaattgtcaactgatttgccacacaagtggattgaagaatgctgtgtgtagaaacctatattttacagtgaatgttttatgtgtatgtacatatacgcacatgcccatgcaaaaacatgtttttcatccaactggccagcagaggagaatgcaaaatttcaaaaatgggagatatactcttttctttcaaggagtttgcagcttagttggggaaaccagagatgtagaagtatattgatctaagaatacctagaaaagggtgtcaaaacaagtgccctttaatatagaaatcaggtctctttagaatgaactccagggaaagttcatatttttggtcatactgaatgtgtgaaatataacttgaaataaatggtttgaatgggtttgtgttgactttttcactttgattttgttgtaagagactaagtagcagtacaagaataaatttgtgaggattgaagttaggagaggctaaatcaaggaaagcttcatgggattaatgcgttttaagtaaggttttgatagaattgggtgagtaccagaactgtttgggggcatttctcagtctgctctgtcaaccagaattctgggggttctgaatggccttgagaaactgccctgacaaccttcagttctgacctctgagctgtcgctgttcaaaagacctttaggatgttgaagtccacttcctatttgagatgcccctccatccatcttttgcactatccaacattagcttcacctcctgaaagtccctagaggtgattccagggaacccagaccctctgaaggcggtcaacattatgggggttggggggatgcagccagccctgagaccactgggagctataagggacagcattctctttttaatggtgggtataaggcagtcatcaaaccaagctgagcaaatccactgcccaagcaacgg

SEQ ID NO: 56487 - DNA, 1202 bp, Homo sapiens
tctgagatcgattcaaatatagtattatttgatctttggtaatttggtcactcttttagggctctactcgccatcatgttgcagtccagtctggtaattaggggtatgacttttatgttgaatcaacctaggtttcctgttacttaacctttctacgcctgtttttccctttggaacatgagaaaaaaagtatttctttcatgaggttcctctgaagattaaataaaaataatgcatgtgaagtgcttagcaaaatacctgatgtagttaagaattcaataaatgtcagctattattattatatcattacttcatgtcttatagtctccaattaacaagccagctccccatcccctggatgtgacttgcttgtcctgatcttggagcctttgcacagatcagtattgttcagtttatccattgctcccaaacaggggcttaacgtaattctaatcatttattttgctcagaattctggcggttgattgggctgagccaagcagttgttttcacatgaggtctctcatgcagctgtagtcatatagggatagggctgggcttccagagacttcttcactctggcacctttgttggaagggctcaaacagctggggcttgaaacagctagagctcttcagggatctctctttctctttcccaccaccctttctctggaatctctagattatctttctacatggcgacctcagagtagctgacttcttaaaaggaagatgaaggctctcagagcaagcatcgcaagacatttgcagaggtgatgtcttgatgagctagccttgggggtctgttagttgaggcagtcacaaaggccaacccaggatcaggggagaagacatagactctacctcctgatgggcagtggcaaggctgtgaaagagcatcagggatgggaactactgttgcagttacttttggaaaattcatttgccacaattatttaactcctttattgttaatttttgtccctcctctccttcaaataccagttcaaaactaacttactagtgaggtcttaccttattaactctccttgatgtgggtttcttctttctcctatagctctcaccatgtaggtcccttttgatttttatatgacatccaattatcttttcttgtgcctctgtatctgtcaatactcccacagtacccacaaccagacagcactcttttttttgtgtgtg

SEQ ID NO: 56488 - DNA, 1060 bp, Homo sapiens
gccccacccaaaacgttctgactcagtgtgtttgagctgagtttggggcctgaggatctgcattgttacaacttcccagatgatgccaatactggcattctgtgcttccagagccactgccttatgacatctgtgctcttaacgaactctttttatgttctcagaacagaacttttgttcactgtctatttcaaaacttgtcagtggctctactctgctgggaattgcttcggtggctggtgaataccttggagcagactggtcactttgtaagcttaacgtaagctccccatctgggaaaccttgcttaccccatttctgtctacctctgacataggtgcaaataaatcctgtctactagagatctttaaggatggtgggcttacaggattttttgtaatttcaaaattaaagcccagaagagtcatacataagagaaatgtcaaagcttatagtaaatgtcaaaatcaaatatatataatttcaataattcagttttggattaagtgagagaataaatttcctaaaatggtttctcaaactgatcccaggttctgaattttccagtggtaaggatccttggaatgtcattgttgcctcttagaatgttgttagagctcttaacacgtggttactgcactcaaagagcttagggctccagaacatgcttccacagagtgatcggttgttctacccttgcaggagtccacaccaccactatggcttctctgctcaaggggtgggagtagggatcccatgcagttctggggttctgttctagggcctttgccactccccttgaaattgggttcagggaccacactactgtggtttctgagagccccctgaccttcgagcctcttcctcctctcctgcttttctttttgccctgtgcattagtgggccgtttctcatcatctccaggttctccagaccaatggctctgagtctgagatgcagatgtgggtccgaggatagtggtaggtacatgacatggcctggcaattcttgtgccatagggtttcctaaataacacttcaggccttaggatcatttaatt

SEQ ID NO: 56489 - DNA, 1005 bp, Homo sapiens
gagacaggcgatcggattttccaggagtctggtgtggaagaaaaacccacctcgaactcaaatccacaataataatccgaacgaataataagggagccgtctttctggccgggcgagagagagggagagagaagggggaacgggaggaagcgaaatctccgtttcatggaggctgaggcaagagaaaatttcggagcctggatgtggaggagcccaacagcagaactaactcaggaaattgtctttcagaaaaaggccgaacgtaggctgggtctgagaatcaggctggggtaggtggaggaacctgcaagtttaaaggaaaaagaaaaggagagaatattttcagagattatctctggtttgttatcattactaccatcttaaaggtaaaaagcattgcatttcaggtgttctttgatttttattttatttttttttttggtgcaattggctcatttaagaatttcaaaacatttaatgtaaaagcttttttttttttaaggaagtccataaattttggttcccagggttgcactggacttggaaggagtgctgttgtgtacatactattgtatggttttatttattattttactgtacaaatcagccgaaagaatttttccaagtgccatttcggatttattaatccttttttttttcctttcctcaaagatatttgctgttgtcatattaagcattggagactagaaaattactttccccctttgagctagagggtctcttgccaacagaaggacagctgagaaagctggatttaaaggatggttttatctgtactttgcagttaacagtgatattttgaaggcacatttttctgtgattcatttttttttggccatagtgctaaccttgaagagattcgtggctgggtttttggtttctgagaaggtcgtagtttttcctcttttcctttttttttcttttttcttttcttttctttttttttaaagcgggggaggggaagaggggctgagaaaggaaatc

SEQ ID NO: 56490 - DNA, 1030 bp, Homo sapiens
atgggtaggagtgaaatatttaatgtaaacatttcaccaagtccctttaccctaattttgaagctgcattaaacccaactcactaacacagggaatgattgcaccctagtcctctgtgggccaagaaactttcagaagcattaaaaaaatagttgaagtatatcacttctcaccaagtgggtagagtcagttggctgtttgtcccttgttttttatttattccataattatgtttgtgctttttgttttgtaaacagtaatggaacgtacatttttattttgtttagaagacaactttgattcaatctttcaagaactgttccattcttggtttcttcttagggggataaaaagttaccagttaatttgttttgagatatttaagcattctttgagttatagaattgtgatgcagggatttgtgaatgagacatttacatgtgaaaggtgacttcactagttacctgcttgagcagagtaaagtgtgtatatgtacataaaatgtaagtaatcttaactccattgtgcagtgccttttagatgttccgctttctataaagtcttcaaatttttgcatatatattatatatatatgatgtaatgttatagaaatatatgtataatatacatattttttccaggggtatctgatagctctgtattttgttatggaagttgaaagaaaaaagtattttacctcagaaattaaataaaaaaatacttttaagtaatgtttgctgagagttggttttgttgttcatcatacactgtgctggggtggtcatgccagagaatttgccaagtccgtcctcgctcccccaccctcatgcattgttattcctattgtacaggtaccaacatagtaaggaaataggtctcttaacagttctggagattttccattttcttgagtgaatggctgctaccagttaaaactaactgaagccagagacgcaagttaggtggaaatttctatctcaagattattgtgaagattctttaagagtacatgtcaaagccagacacaaaa

SEQ ID NO: 56491 - DNA, 1036 bp, Homo sapiens
gtgggggtgtggttgagagaacataatgttgagatccattgcagatatgtaattactacacaacaagttagggcagttttagcttgactctgctatcattacagtttcatctcaacttctgtaaccactccctcctgtccctggggcatgcatttaaaaaaaaaaaaaaaagtggtattggaatgcatctctctaattacaacctgttttctttccttgtgcctgagggagaggcgttaggaaatcagacctgtactcgccactcaaatcttgcttcctctgtttctcactcttgccccttccttgtatgcctagaggaattgggaatctagatgtatataccaacaattttaaagaatttgttggttttcataccccttcaccccactcccaaaaaaatgtttcattcgtcttgttcttctgtctttgacccatttttatctattgaaaatccagaacttcagccacttggacaacctagaatggggcattcataagccctgggaagtaatgtggttttccagggcaaggaaacctggatcctcactctgtgaagaatctgatctagaaacctaacaatagtggcccagcacacctgttctgcccgaaggcgattgaaccaacattgatctttaacccaagctcaagatcctaatcaaaaagccacaaggggccgggccaggtggctcatgcctataatcccaacactttgggaggccaaggccggcagatcacttgaggtcaggagttcaagaccagcctggccaacatggggaaacccccatgtctactaaaagtacaggtggcagtcacctgtagtcctagctactcaggaggccaaggcaggagaatcacttgaacctgggaggcagaggtcgcagtgagctgagatcatgccactacactccagcctgggcgacagcgagactcagtctcaataaagcacaaggaaagcaaaactgtgtacatttcttttagtacatctatctctactacctggttgctcacatcctaggtatagacaactgcaaagaac

SEQ ID NO: 56492 - DNA, 1341 bp, Homo sapiens
agtggcgtggccttggctcactgcaacctctgcctcccgggttcaagtgattctcctgcttcagcctccgaagtggctgggactacaggcgcctgccaccatgcctggctaatttttttttttttttgtatttttagtagagacgaggtttcaccatgttggccaggctggtctctcgaactcctggcctcaagtggtccgcccgccttagtctcccaaagtgctgagattacaggcatgagccaccatgcccagccatcatcttctgaactttttcatcttcccaaactgaaactctgtgcccattaaacaataactcctcattgccccctcctccagccccagcaaacaccattctactcctagactactttcagactcagtttcttctttcacttaataagagagggtccactgctgactaatgggattgtttctatatgtggagtccttcttgcaaacatgtgattgagtttattgtagagaacggtaataggaaatgggattgtagaaagaaaagagatggagacaaatttggatgagggtttcatactgggtgtcccatccacaggcctcagcagccctgccacggatctacccagttcttttgcatcaagaagttgatcttgcgagccatttccatgttatagatctgccagcaccttttatagcttttcctctgtcgctggcggcatggcttttcattataccatggacatttaatgtcctcaaggagcccatccacagtgaggattctgtttagggtcctgtatgcaccttccacgtttccttcctgtaccatctcagtcctggcggtgaatttcagatgttttgccatgaccttggatttaagtctccactctgcagagcctggcacgctcagtacctagtcaaccccggctatggaggatttaaagttgctttagaaatatgtgtgtttgccagttggcgggactgtaaaccagttcaaccattgtgaaagacagtgtggcgattctcaagaatctacaactagaaataccatctgacccagccatcccattactgggtatatacccaaaggattataaatcatgctgctataaagacacatgcacacgtgtgtttattgcagcactattcacaatagcaaagacttgaaaccaacccaaatgtccatcagtgttagactggattaagaaaatgtggcacatacacaccatggaatactatgcagccataaaaagatgagttcatgtcctttgtagggacatggatgaagctagaaaacatcattctgagcaaactatcgcaaggacagaaaaccaaacaccgcatgttctcactcacaggtgggaagtg

SEQ ID NO: 56493 - DNA, 1093 bp, Homo sapiens
aaacgttcagaattctccaaaaagcaaagaaccattgcacgttgttgaatacatattttggaggaatggctccgcttttcagagtagccaagtatccccagagcaggtgcctggcccagccatcctgtttcatcagaagaacaaggaatgtggccaccactgaacagggaaatgagggagggcaggcagggagaagtactagtgagttacaccgttataaatacactttagggctgtgtgagttggccataaatcgctgcactgtgctcaggtgatgtcacccgacgctcggctgtatttatagctttgttcactgttccctgggattttttttcttggcacattcgaggtaatatgtgtctcgcccccacacactcatcctgaacaacagaagataaacttttatgccacttctgctcatcttctcccagctccttggaaggatgatttcctggacttaccaagtgcctgcttagttgggaatatcctcttgcagttcaattgctagccccctggctttgtactctgaaatggagctcagcctcctctctactccagtaaatcctttgtggaactcagaatcagaaatatctccctttttgccaggcactctggtaacaacagtgaacaacaccagtacaggctctacctgcacagggcttatgatcaagcatggaaaacagacattgaatacttaattagaagggagatgaatgttactagtggaaatagaaggtgcttgaaggcaataacaaggtgatctagcttgtctggaggaattagagaggcttccatggagaagtgacatttagtgtgaggtctgagggatgagtaggacttagcttaaggggcgaggttgggatagaccctgggcggaaagaacattgcaggcaagagaaccccatgtgccgagaccccaaacaatgagagaaatatggccagtccctagaacttagagaagccaggtggagttggagtgtaaaggataagaaggggagtggagagcagtggggttgggagggaaggccaacgtaccccaggcaggctctaggaaccaacgggaaggtgctgtatctgatcctaagggcaatga

SEQ ID NO: 56494 - DNA, 1001 bp, Homo sapiens
tagaacaatgattctcaaactttaacatgcttacaaaacatctggggatcttgttaaaatgcagattctgactcacaaagtctggggtcagatggaagttctgtatttgcaccaagctctcgggtgatgctgatgctgcttgtcctaggaccacaccttgaggtgttaggggatgctttccttggggaaatagatcttcaacgttctaatgagaatcaaaagaaaatagaattcatttaactgaattcagttttcagccagcttagttgtataacagccctgatggatcattgatttgggagcattgatatgtttgttttcaggaagcagctggtgggacaagagagtgcacagagcttgccagcacgcccatccttagccccaagattgtcttatctaagcccctccctgccacctcactagctccatgccacccaccccaccctgccaagtcttcactcaggctgccagctgtggagttgaaaagcaacctgctggtgtgctggtggaaactcatccatatcggagccagtcatttccactttttttttttttaatgaaaaaagtcctcataattcatctctcaatgggagatgtgggggaaagaattttgacagagcttctggtctgggccttgaccctgttggctttggcttaaaaactgggtcatgagcaagttgcatgatttgggaaggaaggtaggtcatagacttaattgggtgcatgatttgggggagcagtggggaactgtcttccgggcaggtcagcatctcacactcacatagacctcataattgttcaacccacatgatgagcgaactcactctctccctcccttctctgcgcgcagaaccccaggctgtagagggagatccacaggccagaggagagagactgcctgccttcagggttccctggttctgtgagagaagcctggtccttatacttagggaatcctgtccactgggggaaacaggatctcccattaattttccttcacc

SEQ ID NO: 56495 - DNA, 1081 bp, Homo sapiens
ttgatttcaaatactccctggcaagcaggaagttcttctttgtgtctagcctgaaccttccctgctcctgcatggaaattgtctgattgggtattgtaactgaacacgtctccagtcttctctgtgtctggataaataacattttccacaacaggtttattttctcatacttcaaggcaaagctccttgtaatagagaagcaagcccagagaggtcataggcgagactgcctcctgggccccgcgtgagcccaagaagtttatcttgttaggggtcagatttgctttccagcaaaccaccaaggctgtcctcctacagtatccccagccaggaccaggagaatgatgttcacaagaacctggctgagtcactgtgcccttacctgtctagtgtccccttctcagccgctcagagcagctgggggctggaggactctggtgtccttcccatcatttctagccgatggcctgagggaccctcctcctctctccacgggagccaggctgagagcagtgctgacatctgctgctgaagccagcatgtaggaaagtgggcatgggggtgatggcagaggtgggcctgcctcacagccagggccagttttagcttaggagcaggaatgttttcctcttggaatcactcagaagtgtccttgtcccgccttgccagggtggatcccaagagatagcagtgtaagcagagagaggaggggatggggtctgtgggatggggtgcctgcctttggggatctcctagtctgatgaaggagtgtgggcattttcctgggatactgaaccgtataagtgcaaactcaactgtaaacttgaacttgaggcaggagacttggtttctgttaccagctagctaactataatggggggacatgggttcccatcttccccagtgtataaacacctataaagatcatttaaataagggaagattttggaccctgttgtgcatctgcacagaagaagatagaaagagacactggagctgggtcatcagcgagggacgtttcctcagaaggggtggagggaagggaacctgggcccaggtggaaggaggacaccaggtggag

SEQ ID NO: 56496 - DNA, 1027 bp, Homo sapiens
ctgatcttgcctctgccgcctgccagacctcagattgcccacctcaagcctgtgtgccaaagggttaaacatagcgagttaaacataaaagggttaaacatatcacatggcttgcaacttctgactcagcttctggtttcctgggcattacaataggaacatctatattcaggaggcagtatggaaagagcactggattgcaggtctagatgtggattttagccccatttgtgcctctactggagagaccttactcagtgacctgggcctattttcttatcataaaatgagaaggttaatttccaagattctttctggctgcacagttttccaactccttcctatccggtaagagttcatgaaaaggactggctcttcccaaatgaggccctggatctctctgatttggtttataagccaaggccagaggtactgatttcagagggccagagcaggggtatcccaggagcagcgtttgctcaggaaccagggtggaagcaaacatttcatgcatcttcagatctggtctgaacttggggtaaggagagcaggagtccccaccataaacacacacacacacacacacacacacacacacacaccccacacagtcctgagaatgtcacacacatgcatacacacacacacacacacacacacacacacacacacacacacacacacacacacacacacacactgtcctgagaatgtcccagcctgccctggaaggtggggacctggaccaacggtgtgggtgcttgtgtatgcatgttgataagagtttctccccgaagaaacatgctctggctttgccctgaactttagctttggtctatgaaaaggttttgctgaatcttgtgggaacataaacattcggcagatttctttccctgaaagctatttcttctctttttctgggaacttttgccagcaagatcaagggccctccacccttccctcctccctcccctttgcctgagacacccaaccccctttctcctcctctcctaaatgaaaacaaagt

SEQ ID NO: 56497 - DNA, 1048 bp, Homo sapiens
cattaccctcatcttagtttcattcctgattctgctactaataagctgtgtgactttgaacaggttgcttaacctctctgggctttggtaatcataatccctaacatgtggaagttgggctaggtaaaagcagaggctctttttagctataactctatgtgtaagtctgtaattgaggttaagaagaaatgtgcatatacatgacttttgactgaatactatttactttctataacaggttacaggatatatataaaattatgttttcagtctccctccctttcctgggaaagactgaataggccctagaggttctgggggtgtggcagctgtggtgggctttacaaaaggggtttttttggttccttctgttcacttgtaaggtttcaaagaaaattgtgcctatacttatcaggatatatgtaagcaactgcagagaaatgccatgtaacctgaggtgttaagtactgaagggacaggaaataatactgggtgtggttatggatagtgctagtttggccaggcttccttaaagaggtaaatctggagcagggctcagcaggaggagacatggcatggattgtaaggggagaaagaaatccactccaggtgtgtgggtgggtgcggttggggtggggctcggtgggtagttattaaagctttatgcacctggattcctagtaggcagctattttgggttctggagaagtgggtcaacataatgaagtttgggaggctgcattctgatttctgggcacataaacctggggaaggcatgaagcaaggaggatgctgaagggccattatcatccaaatgagaccagtgggatgtaaaggataagagcattataagtatcccaaaaaagagaatctcagaattatttctatttgagcatttaacttgtgctaaacacctactatgttctgggatgtccgttctggaaaggaccttagaggtaatctgttctatgaattatgaaactgaagatcagagaagggatgcaaactgcccagtgccacccagcggattctgacagaagcagaacta

SEQ ID NO: 56498 - DNA, 1138 bp, Homo sapiens
gtataagtaaagcactctataacctgatggcttaatgtatttttgttaaatttttaattttatatttttagtaggtaatgtacgtagtacaaaatataaaaactacaagaaaaatagtgaaaataactctctcccatcattatcttctagctaccatttctcttaaccttaagtattttggtccttacaaaatccctgtgtataaggcaggtcagggtttttgatttttatttctcaggtatggaaattgaagcccagagagattaaatggttacctgaagttacccacatgaaagtggtgggactagaacccacatcttcctgttagtaccccagcttgttgtatttcatgtttcacactagaagatgtggtcagagatggaccccaggctgctgaattttgtgactttgggaccataaactcttttgagaatcttatggaagttatggatcctttctttctcaccctcacatacacatgccattcagacttgcatatattttagatggtttctcaaacactagaatttcaaaagtctaaaccatcccaatacctttatatcatcaccagggttttagctctataggacttctctggagagcagtggagtgtgctcagtgacctgcaaaccgaacctgctccccagggagcccaaagttctggagtcagaagatctgggttctactccaggccgtcgcatatcttagctttgtgaccttgagtgagtccttcaatttctctgaccttaattttctttgtctgttaaatggggttggtattctctgtccccaggagctgtgaactaacatttataaagtcattttgcaaattgtgaaattacaaacaaatctaatatattatttctccctgctaggcctggagcaggtgagaaaaccagaaagaagtagtctcatacctggaatttcatccagtagctggagtacctgtcctatgtggtagaggctgtccagccatgcaccccctctctggatttggtacccagagtcaagatccccaggagtaggtgtgagtgctgactcatgttgcactgaacatcccatcatcaaatcccagctccatctgctcatcctggtccaaagtggacgataatcccattgttaagacatgtctcattaa

SEQ ID NO: 56499 - DNA, 1132 bp, Homo sapiens
ggagggatcatctgtaacaagtgtgctgatccattaagcaagatgaggacgaagatgagggccagtgttggatttagcaacttgtaggtcattggtaactcagcactaaaagttctggtgtgagttcatgagtgaatgggaggagaaggattgtgtgtactactatgcttcagtgcttttgctataaaggagagcagagcatggagggggttgctgggcacagggtcaacagagaggttttaagagaggagagaatgcagcccctttgtatgcagatgcctgtggaaacaacaggttaagaaactagggatgtttggtcatgagaagaggagactccagggatatgtcataactctcctcacgtgcttaaaggagtgtcatatggaagagaattagattcattttatgtgactccatagagaagaactaggaccaatggctacaagctacaaagaggaggattgtagcacagcctaaataagaattttgtgcatccatgtatttgctcattcaggaagtcagtattgaatgcctgctgcatgtctgacactggcctaggcaccaggggtcgtcatgatgaagattcagccctttctggctaatggaagagagcaacacagacaaacaatgattgtgccatgtggaaagtgctgacaaggcccctgtgtctgactggggtggggaatgggggttcaggggaaggtcaggctgggtggagaagtcatcattgttggctgaggatattccaccttctgataaccgagagcctatttggcctaaataaatgagacttaaaaaggcacttgaacctcagttatcaggtccattttctggatggctaggccatgtagatgcagccttcataaaaatgatacctgatatatgggcggtgctttatcatttacagagaacttctaatcctccccacagcctgccaggatcattctgttgtccctgttttctagttgggttaaccaaggctcagagcagtgagccttgcctaaggtcacttcattattataaagatggagctggggccagaacccggttcatgagtccctggtccaatgaacacaccctcccagagctgtgaaatgctgactataatttgccgtctcccttctctgaccca

SEQ ID NO: 56500 - DNA, 1050 bp, Homo sapiens
gtaaagtgcacgttgaccagggtctaaccgaatttgaacttcatctgaagtcaatggagagccattgaaaggtttttcatagggcaatgttatcattagatttgtgtttcagaaagatcattctggcaactttgttgggaatggacttaagagaagcaggctggtgacaggggaagcaattaggaagttattgcagtagtccaggggagtgaggataaagaccttaagcaaagcgacagggtggagaggaagggatagaatccagacctatttaggagggatatttagtggtgcctgctatgaggtaggagaagaaagtctgggatgagccccaggtttaaatgagggtagggaggtagtggggtcggtgagcagaaagactacagaaatgcagctgaaaagacccgtattacagcaaccatggaccctcagtgaattggggagggtcatcagagccagaatccacaagttttgtggactgagctggtcttcaagtgatggtgagcaattcctggaaatccctggatgaggaccaaggacttggcagtttttcaggtttaaagtaaaaaatcagtgtctggaagtggagactggaggagagaggtgtgtgtgtgtgcacatgcctgtgagatgtggttagagattatctacaacatttggcgaggaatttctgggttccagggactacagcacttctgaagtcccaggtggcagtactgcctcaccccgacagcctcctagcgtgaacatagactcaatccaattctccccatcccagagttctgcagggggttaaggaaatttccttgactccttgatttaatccaatcctcttatttcacagatgaaatacctgaggcccagagaggtgaagtgaattccccaaggtcacacagctggtcaacagtaaagccagaattgtaactctggtctctgtggacttataatgaggtgctattttcactcccccctttcctcccattcactataaacatccctcgaacattaaacattggaaatttccttgaccccttgcagaactgtgggatg

SEQ ID NO: 56501 - DNA, 1042 bp, Homo sapiens
actttcgctgtcatgattaacagctgtttgcatcttgccagctccactttctttggtccctctggccccctccactcccttctggtagaaacacgggttaagtcctttacttttgcagctctcaccaagcaggggatttgagagagatcagctggcaggtgtgggggactcgaatatgggatatctttgttaagaaacaggtgaattatgtatcagtagcctcagtttccccaacctcatgggcaagagtggcggccccacttcctgtgccctggccgatgtccaagtgccatgtcaggaatgccaacatgtcatgaatttgtgtgccttgcaaatgctttattggcatctcgtggtgttgaaagtcatgtaattatgagcagaatttatatgtcgccagggctgcctaggcgccctccctgcgtctccttccgggcactgcaaatattgaaggctggcttagaaaagaatcaaacctacccaccttgatatctatgcaccctgtagataaggttttaattgaaaatcggttcatctgttccccatgcctaattacaaggtgcctgcactgccaatggagcataaggacaggagtccagcaccctccaggaaggcctggggttgtggtcccacatggggacagcagtaactttggcagctttacctcttccgcatctaccacctgaggacttctggtttcttacccatgagcaggcactggtgtttgcagggaggacactccctcagccccatccccctccctctctggctggtgcttctgcagtgaggacaggatgcagctcactgcctgcttcctcccttctgccctgccagggatacactcctcgccccccctcatcctgccctctcctttcctttcagcccaaatgggcaaaaccagtctctgtttgtcaacaccattccctttcacctctgggcttgcctggaggccactcgccctcttccagggcgctctttccccatcctgctttgtaccctcctctcccgagaagcccctgcagtggtgatgacagatcttctg

SEQ ID NO: 56502 - DNA, 1034 bp, Homo sapiens
gagctgggggtccaaacccagctcatccatcacccatcctgataatcagatttggctgcggcaagaacagaacataatactgagctcctctcccagacgccgcagccgacatgtcctgagagatgtggagggccttgctctttggagatgcagagagggagtggcaggacccggagggagagatccctgctcctgagttgtggggcagataggaagtgtctacagagcagttccacaccctacacagcacccttcccactgcatgtttcccatgggcacccaatagagcactcctgcaccctgtgtctgggcaagggatcccagggtcagcgctgtgggtgggaagatgttttggttctgccttccaaactggagtcctttcacttactccctgtcagatttctctctgcaggaacgtgcctcttcagatctaactcattctattgttgtctaaagcatcaagtccctttttccggagcctcacagccttggcccagccctcaaacccacgttcagccccagtttctagcacccagcctctgggacaagaataggactgtaggggagaacgctctgggtgtctgggttagagacaagggtaagcatccacaattagcttgagaattcaggggccaacatgtccaccctggcttggcctccaggttgagttgacacttttgtttgtctctacctttgtttgcctagatgaattctaactgagggccctcatctctccagaggtgggggcagaaaaaaactgggattagagttaggcgaaatgagattggggttaggaaagtggcctttaggattagggtagggaatactcacctggggtgtgggatttactagtgctcagtatgagcatcagggtaggcaggggtgggggctcaggcttgaagcagcgattactgttaaggatagaggtaaagtttggcttattatgttcttatttattcaataagcacctattgatcacttatgctgtacctggctctgaggggacttgagatgctgtgcctcttcaagagctc

SEQ ID NO: 56503 - DNA, 1070 bp, Homo sapiens
ctaatccacaggcccagaacagtaagccttcttgccctgtcactgtaagcaccagccagcccctccagccagccgctgcagctggcctctgtggtctgctcagatgcaaggaaaccaggccagaccatggtcacttgtaaaatcccatctggtccctggaaagattcccctacggctgtccctaccatacccccagccttagagacggacagaagggaggcggtggccaagctgcttggatgagggaggagagattgattcttctgtccatggctttggcttcctgggatgagaaaggaccagcagtgggaaggcggtaaaggtggattcagtctgggcatttgaggctcctactgttcagtgtctttttcactgcaaactgtgaaatgaagccagagagctttggtcggcagagacaggaggtgataatagtccttaaatgtttagaaacttgtctttggggaatgccgtttgtcatttctctctcttcgtctgatgtccatatcacctgacatctacgtgtagtcattcctctgagattatccactgagagcaaggcaatggagttttctgacctctgatgcctcatctgtcaaaggagggggttaagggtctctaaagtcagtcacatcaaaatttgacattttaggattctaggctgggctgtgtataaggcaaaatcaacagacccagacccctcatccgcagtagctgggcaggcacagagctttactctggggagcctctgcctgcctccatggcccttgccaggtttctttctctggatctgtcctcaccctgcccagccccagctcagcactcccctcccttcctccctccttcttgccttctcttctcctctatcagaagtgccaatctctccctttcttctctccttcgcccttcgatggcccagcctagagaattgaaatcctctttctctgagagaacccaatgtgaggggacctctctggctgttgtatttttcatagagcaagaagggaatgactggggttggggggaaaagagtcctgcgggggtggggagagccaagatgtgagagcagagag

SEQ ID NO: 56504 - DNA, 1024 bp, Homo sapiens
tctgtgctgcgatgccctatatttcctggcgcccacacactcgctctccctctctccccctctcctttgctccctgctgtgtgcctttttctctcctctttctcccctattattatgagaggcatttgtctgcaaacagccttggagatttcatctgctcctgctagcctccctgcttcagctgccctcctgtctgctcctccagctgtatggctcccagcctcgccgtgaggtgtcgtggcatcaggtgtctgtgtctggggcctcaccttctcacctgtcagtggtgtcccaggagagggcagagggaggagtactggtgtgggatggctgaggatgtgtccttgtttcaaggttgggcctcattctttctgtttctgcagcctggccacggtaccgggttgtgggctccgcagacgctgggcagtacaacctggagatcacagatgctgagctctctgacgacgcctcttacgagtgccaggccacggaggccgccctgcgctctcggcgggccaaactcaccgtgctcagtaaggaccccaatacccttcagtacttcgaggccctgtctctctgtatcctggcagtctctcccactctccagttccctctttaatttcccagcttctccctctctgttactggccttatccctgccctaatgctcaagtccaggtagaagaaagtaaaccaggcatgtgggagacgtggggtgctggcgggacgtgagctgtgtgaggcccagcatcctctctgccgcagccagtgcctcggccactcagggacagggccttctgccttttagaaacaaggctgtggagacaagaagcagggacgtatggagtgatggagacccgggccctcctttcccagctgtcctggctggcaggcttgttggtgagggggcgtctcccttccactttcctctcagctgcctcggagaccccaaacggcccccgtgcccctccttccacctcaccctagcctcacacaacccttcttccctcagctgcctcctttc

SEQ ID NO: 56505 - DNA, 1048 bp, Homo sapiens
cccgcctcggcctcccaaagtgctgggattacaggcgtgagccaccgcgcccggccttactgcgtgttctgaatgctgggaggaaggggtgcggccacagatgggagtagatggggggctgcagcattatctttgaacctgggctatttctagggtcttgggatttggaggagaaagtgcttacggttatccccacatcttctcacaggaaagcccagttcagaagcactggggggacaaactcacctgtgcacgggaagcagggtggggtgggaggaagggagagggcctggggcgggcctactgcagtggtaaaggtctggtaaataatgctgcacagggaggtggggaagctgaggcgattcactaaagaaggctggagtctacagctctgcagagacccccattagaccatttgggccagaactacaggaagaagaatttcagagtaaaacgtcctatgtcatttggcaatgaaaacactagaacagatcatcagaagaggctgcgtcctcctaaaatgattgcagccttcacctgccctctctggcctccaccccatccctgcccacacctgcagagatggtgtgtttacgtgccaacctgtgtagagtcagagcatggaccaaaatggactcgggaaccccatttcccttctgggaattcacttgtggcccttcctgctttctttccgatgcctccgatgtggggccctcatggacctaggggcccaggcctcctggctccccacccgaggctgctctctctgcccaggtcctgagtaacagcaaccagctgctgctgaagtcggtgactcaggcagacgctggcacctacacctgccgggccatcgtgcctcgaatcggagtggctgagcgggaggtgccgctctatgtgaacggtgagtgagtggcctgagaggcagccgggcctgggcgggctggtactgcagtttttaactggttctgacttgtgtcttcttgcttgcagggccccccatcatctccagtgaggcagtgcagtatgctgtgaggggtgacggtggcaa

SEQ ID NO: 56506 - DNA, 1339 bp, Homo sapiens
ccaaggaaaactgttggagccctgagtagataggtgaacattcggcagtcacagtggtattatggatggcacagtggtgaaagatgtcggaacacgggtggcagattggagagtttggagacagctgacctcaaagaagagcgaggggccaagcatcatagtcaggtgggctgaaggacagggatcgacagacaaccaagaccaggggcaaactcctgccccagctgcagggatgagacatgaccatgatctccattctgatggagctggagcacagaccaaaatccaaccacaatgcagaccttcctctctaatccaaccttgacttaaacctaacactgtccccaggctcagtcaaaacttagccctgtacacaagccaaggttgcctctgtggctgtggcctagcctttagccagcactgagcttagctcccagtataactccagcctcacccctccacctttccttccccatcgaaagaggtgttacctgtgggcatcatagctggggccaccatcggcgcgagcatcctgctcatcttcttcttcatcgccttggtattcttcctctaccggcgccgcaaaggcagtgagtatgggccctgtgcagcccacagccttcccctggctcttccagggccatgacaggcagtgcttggggtggatgggaggttggcccttgagctccagcccagagggagccagaagcagccgctgcagagaccagcaggaagcacttgttccaggctgcctctcccgtcccaggtcgcaaagacgtgaccctgaggaagctggatatcaaggtggagacagtgaaccgagagccacttacgatgcattctgaccgggaggatgacaccgccagcgtctccacagcaacccgggtcatgaaggccatctactcggtgagggtcctgctcctctctggcctcctgccttctccaccctctgaggaccagctccatcccagatctctaataaccgcggtcattctctccttcctcagtcggtcttccctggtcctgccacacacactctcccacactcacacacattctctcacacacgccccaggctagtttcctccagcagaggataggcagctgggattgtccaaagacttcctttgccccacagtgtgtgaaagttggaagcccccagaggctttctggtccatctgcctcattgctgagatgaggaaacagccctggagaggggcagtgacatatacaaggtcacattacatgttagcaaccaaactagtgctcgaaccaaggtctctggcctcttcccaccacatcccagagcctctgctgagaggaccagaactcaagtctg

SEQ ID NO: 56507 - DNA, 1067 bp, Homo sapiens
cggaccccatatgaggcgtatgaccccattggcaagtacgccacagccactcgattctcctacacctcccagcactcggactacggccagcgattccagcagcgcatgcagactcacgtgtaggggccagagcctggctggggcatctctgcggggcagaggagaaggctttcacagctgttccctgatattcaggggcattgctcattgctcccttctcggaccagccttcttcctcccaccatggcaggtggggagcaggtctcccagaaacaccccgtcccgaggatggtgctctgtgcatgccccagcctcctgggcctgcccttccctcttcttcgggaggatgtgtctcttctgacctgcactcttgcctgaccctagaatggggacagggaaagtgaaggttagggaaagcagaggggggcactttttagcattccctttctatcccacccctctgatctcccataagtggaaatgggggtacccagggatgggcaggctttggcctagggacatgaagtatgggagtgggtggctgtggcacagacaggtggaaaacgggatagcctggccagtccctctgttgtctgcattcgtgccctgggtgcctctctccttcctcagggtactgcagaagggagcgaacagggtactgttcgctcttgtctacagaacagccctggcactgcattcaaatccagtcttcattcagctgggatcaaaatgccagtcaccttggctacccactgtggacagctgtctgtcagcatgcagagggatccaggaatccccccggcagcacggcccgctttccttctcctccatgctgggccagccagataagtcagggtcctggtggagaaagaaaggctaggaccatgtcctcattgacccagatactgctgtgtgctgcacagcagtgaaccaacactagagggagccacacaagcctcctctccccagtctgccccacttcctggctttaactcttgagctggtttggggagtggtgaggtaggggtgggggtgctgtaggctctttttcaaagaaaacaaaaaac

SEQ ID NO: 56508 - DNA, 1578 bp, Homo sapiens
ctccattactctttcagtctccaagcactttgaatccatttttaaacattcaggttgccagacctgtcacacagtggactctgatagggttacggagggggcctggctctcagtctctactctcctatgtcccatcagttggttggaggccaccttccagggggtatgggagacaggttttggtttttaagtgtcttttttttttttcttggaccaatcagattccttcttccactttcagtgccttgagtgtcaagctttggatgaccgaccctatgtgggcggttgtgtggggagtgggtacttgtgagcctcggacacactgttaagtgttacagtgttaggagagagatgggtgaggggacctggagaggtaaggggcctggaaatggccctgacagagaacttgtgctgaccgggagaaggtggtgcggaagggcaccgcaggcattacacaggccatttctcctcctccatgtgcacgcacatccaacacacaccttccatgtgactgcttctcagccaccactttctgaccaaagagaacaggcgctccaaggagaacctgtacccctgccccagcctcgccttcctaaaaagcagtgtctggagttggctgtttcccgcctccccagctgcatgtccagcccagtgggagacagggcctctggtgcagttcccaaaatgttcctcgccctttctccgtggtcaccattcataattcatgttcgctttaatgagttacatgcttatcagccacaggccattaccacccttatggatgggtctggggggcgacattcctggccaaccccttgtaggaaggaccagataatacccaggaagcaagtagctctaattttaacttcacaggaagtctgtgcatcctccttcatttcagcagggaaaactcctgtggagtgggccctatctggggcatttacaggcttccagctgtattccatccctggaagctgatacctttctatagagtccttttatgagagctcagtgggaaggtctgtcaagaaattcaggttcttgtacagacaaattcatgcaaatttctattattttcacaaaaaccagaaaccatgggggaatccaaagacttgaagtctaaagatggtggcttttaaaacatgcatattccaaaaagaattcatttttgttttgggtttggctagattctcttatttatccccttttagcttaagtattagtttcattctactgaaatgatggagagagggcctaaggttactaggtaattgagctgatggtgcagggagaattgttgagaaaggaagcctagtttccagaagcctgacacagagctacttcactgtcctctactccttaacaaggtaactggagcctcttgggtgtcaaacaagcaccctggaaggcacagggaagcatcagcaaccaaggtagtctctgccctctgtaacttacgtgttggtgcatcagaatctgaattggaacctacctgatgggcccagtggaatagcttttctggggagtggaaggcgtccttgatcacagagctttgctgtcgaatcctggagtcctgca

SEQ ID NO: 56509 - DNA, 1951 bp, Homo sapiens
tgggggggttctctcctgttcaaagaagctttcaccatgggcttcattatcttgtcagaagtgaattagtttccaccagggacccctttatcccaaacagcaacacaaaatacaccctaaacctcagagtaaaattgatgtggggctatcctttggctatcgggtcatctgtgctgctccccactcatttctgatgggtttgcaaaggtgccttttgccagggcaggacatagtatgcacatagggatattgttatgtgcctaggtttcaggcactccttctgtaggggaaaatgggaggagccttcctccaccctgatccttaggaacattcctctggcccagggacagcttgttcttctcaccaaacaggtgaagcctgcagtccaaggtgcctggagccagaggtcggggagtaagcacagctgcccctgcctgagaaggagcagcttgcaaggggagccggtggagggaaaggggtacaacagctttggaatacattctggatcttgaggaggatcttgtgattttggctgagccacggtcacttccctcgtgaaggacccgccctatatcctaaattctggatccctcaaagtccagccacagagtttgcatgaagcaaaaagcctagtaagtgagaaaggaaaggggccagggatgggagcagtgctgtgctgttatcactgtcttgcttggaatgaaaacatctgagcaccctgtcttcaagcggtacgctctccccttattccagcagggctactttcctcttcactctgatgaggggagctttatctgctttcaaaatggagcacgtcgcactggagtttcgtgccctctcgttaacctgtcaggagccacagggctccataaaacggaatcagtgtctcaatatacatgacctatgttcatagcaatgttcagccatttgggtttgaagaaaaccacattaaagccaagacccgtttggagcgaactgccttgttctttgctgtgtggaaggttctgtccctactgctgaactccagttcctccccaagcaccctggcctcagaaatcctggcttccccaagttagtgctgtctgacctgagccaggccactgcttggtgcctctacaggccactgtgcatgttgagaattgcccaaaaggattagtgaagctcctgaccctggcgaggccataatgaacactgaagtgcacaggccaagggatgtaattgaaaggcatttatttttgtgaagatgctgtaaaattagcatttaaatatcccattcccttctcttggcctcctcctatccccctatggtatttctcctcctctcctcaaggccaggctttttgtgaaaggcattggctcatctttgtcagcgtggtcctgacgttcacctctgggctgctggagaggactgagagatgtgtggtttggtaggaagggggtgtgtgtgggggttagtggggaatcccatttttttgcatcactgtgaggtagcttcaggccctgtccctggagaaataattgctgcgcagaagtcacaggccatactgggcagttctggtacaaacctgcccttattaataataacaataataataataactccatttgcatagaactgtcactcattcctgccagtctgctgtccctaccctggttttttgctggccccaaccactggccttgttgagtatcgatgggccctgagctcttctgtttgcttttggagctcttcagatgctgtcccccctgagaataccctaactctggggaaagagcagccaaaatcccaatacagtaaaactccacacaatcttgttagcaacagtgacccagaaaattttgagaagtccaatttcaccagaagaggcccagggctccctgtggtcacattttctacccagccattcttggcattgcaacctccatttctagctcctgttgaattttctcc

SEQ ID NO: 56510 - DNA, 1018 bp, Homo sapiens
gtatatgcttgtacattcttttctttcaaagcttcttgttttgatttcttatatgggaactattaatcagtctaactatataagcaaaagatattttgcattcttaataatttttaaaattgtaaagggatcccaaaagcacaaatttgaaagccactattccaggaattaaaatatagatttttttaatctatcatagtctaatttcaaataatattatgcatttcatgtttaatataagattcttaaattgatacttccatttgttttcacccttgtgctattggtgtcacatattttaaatttttacatgttatataccctataattcaacatcattatctttgctttggtagtcaactggttttgaatgagattattaaatgagaaaaaaattcaccctcatagttcccatttccagtattcttcattcctttctttaggttaatattttcatttgtattatttttcttctgcttgaagaacttcatctaacattccttatattgcaggtcttctatccataaattctctagacttttgttcatctaaaggtcttcattctaccttcctttttgaaatatattttcactacatataaaattcttggttgacaacttctttcttccagtattttaaagatgtgctgtcttgtcttctgactttgcaagcttctgataagaagtctgctgtcatcatgatctttgctcctctgtatgtaatatgtctttttttccccctctacctgttttaaagcttttctctttatcactggtattaaacaacttgattatgctataacttgatggagttttccttgtttattcagctcggtgattgttgagctccttggatctgttttgttatggtactcctggggcagggtttattaggggactgatttagagatgaaagtaatattgagatatgttactcttctgaggaccctatctcatgtattacaatatttttccactttgatgggtggaatgttaactattttcattcttaattgagg

SEQ ID NO: 56511 - DNA, 1034 bp, Homo sapiens
taaaatacaccgtggccagactctaccctttcatctaaccacattttgttctgttgcagctgaatcctgattctttttgtactcagtagatcagaaaaacattgtcttctccttttaaaataaacttcaagacacttaatgctaaacctacctttaggtttccttttaaaacctggaaaacctcaggcacactagaacttagaacaagcctattttcttaaatgatttccatcctttacttcttcccctcacaaatgtagccagaacgtaaaccaattactactgagagtgcacaggggagtcagcccacagaaagatccacatttgctgtaatttaattttaggcctgtccctgtgtccagtttctgcaaacttccaccattctactttttctttcattcttcctttttgttgttgttgttgtttttggtctttttccctaataatgaataataaaacccataagttgacaaataatggtatggaaattccaatccctagacatcatctgattatagttgagtatgatgaaagggctaataacatgtgaaaacccacccatatccacattttgccctagtaaccctgctcctcagaggttgtgctgaaaattatccagcattactgaaattttcttggccttgtggacagaaatgtctttctgcctcccacagtaatatttagggaaatgttatagaggggtggggaaggaaaaacttagtttggaaccttgctcctgacattttctagctgaatgatcttaagcaaataaaatacttaatctctcagttttcgcataaaagaaaaataagagtaattcctacctcatggtattattaaatgaataatataaaatgagaacgttcatgtaaagtacttagcataatgagagactgaaaagtacttagtgaattgtaattatcaatgtagtacattagtatattaatagaaatctattcatatgtcgatttctaaattattattattcatatgattttttatacctctcccacaaagctttgccagggggagtc

SEQ ID NO: 56512 - DNA, 1014 bp, Homo sapiens
gacagctctttctctaatcctttgtgtctcagtgcctataaagatggagggttttatttttctaaatactaaaggaataatttaatagttaggactaaagatttagataagcaaatgcctaacaaaatactttcgtagatactgatatgttgaattgagtagaaacaggatgaatttatccctcatgtttcaaaacacaaaagggtactttcagggtctcttgccagtaatgccacaaacttgctaaagaactgcccgaaagagcactttcccttgtgccaaggtgctaccttaacaaatatacttctgctgctggccttttccaggagagcttctcccagtctcccccagtatctccatttgagttatcctgggaatgcaagcaggagttttgagtttttgacctacagaaactcctaaatgtttgctggcaactcaatcaacttctgtgtctacaggaggctatagcgacatcagtggagctaggtgaagactgggagcgcaccgaagttctgcataagaaatttgaagacttccaagtggagctggtagctaaagaagggagagttgttgaagtgaaccaatatgccaatgagtgtgccgaggtgaggtgggagcaaaatattcactccgtgcaaagggttcttatccttaagaataacttctggccattagtagatggatatgaaggagatggggcattgtgagaaaacagaggttggcatgttcctggagtaacatattctgaacagtttcctctcccctctggacccaccccttacaagtctattgaaatggagggttgagagagaaagagagagtgtgtttttgtgtgtttggagaaattaaatacacaatgggcagtgaagctattgccatttatatagtagcttctgtaccatgcagtacactgattactcatgttaatggggcactctttcttcatgaaaaaacacaaaaataaagtagcagagcatataaaataatgttgagctatcattatttatacatata

SEQ ID NO: 56513 - DNA, 1048 bp, Homo sapiens
agcctccctgtcctgcaggagccggcatgtccacagccatgggcattccccacctccccagacctcatcatcagctccacccaacacttcctcaactgaggtacactctccctggtccccttttgctttgttttcttcaaccccaaatataaaaattttatctcctacttaaaaataacatggataattagccaaataatccaatgtatatactgagaattagctagagtttaatcttttgcttccataggatactcgataaatttgatattatctctgacatcaggaggttttctgtcctgtgttgtttgggagaaatatagagaggtatggagttcagaatagtacaggtagatacagcagtgtgttcacagtttactgcttcagtctcttttacgcctcttccctctgctcaataacctgttaaagtttctttgatccacaatatgttcttttcttcctcagcgttttcacacaccatagtccctctccctgtaaaactcttaaatggctaaatagaggtactctgtggatcccaatattgatattccgtcctcagggaatcatccctggaaccacgttcagactaggtaaaatatttacggtgttcactttagtagaatctcattttttcctaccaattatgttaactacaactaataaatgtttgtccattcaatttattctgtgttgtaagattacaagctgcttgttgatctggtgaatccctgtaacccagagatttctttgagtgacagaaagtactgaaatgtgaatctgcacagctaatgaaggacaaatgagagttatctaatccagccatgaaaaccatgaaggttatatttttgtgaggcctaaaacagtacaaaaacaaacaaagtggtggaataggatggagagttgaaattgtggaaatccaggcagaaggaagactatacaccacgtcttggaaaataaaggaagtgggttgcaatttataattacgtgttcattcttattaggttgtactacttttaaagtggcttctcatattttgctatatctcaca

SEQ ID NO: 56514 - DNA, 1034 bp, Homo sapiens
tcaactctcttcgtatcccctctgtatctcttcccttgattccacctatcttctgctggctttctgaggtttagcactgtaggtgaagtaaggtcctttcaatagtacctttttgactcacagctgatatctttcttctcttgtcttcagcctgaacagaaacagatggtggcccagcaggaatctatcagagaagggtttcagaagcgctgtttgccagttatggtactgaaagcaaagaagcccttcacgtttgagacccaagaaggcaagcaggagatgtttcatgctacagtggctacagaaaaggaattcttctttgtaaaagtttttaatacactgctgaaagataaattcattccaaagagaataattataatagcaagatattatcggcacagtggtttcttagaggtaaatagcgcctcacgtgtgttagatgctgaatctgaccaaaaggttaatgtcccgctgaacattatcagaaaagctggtgaaaccccgaagatcaacacgcttcaaactcagccccttggaacaattgtgaatggtttgtttgtagtccagaaggtaagttttcatatctaatttcatattgattagtaagaataacgtatttcccatctgatcttaaagaaactttggaaatggttttaatgtctttctatatagacaaaataaaaaaatacaaagttctaaagagctgcagagtaaacatgccaaaattcatacaaaaactcaaaaattgtttttattgtcaaaaatgtcacgatcctatttcaacttaccccagtagcctctgaaaaaggaattagttcattcacataatttttatttctgcattatttttgtactttgtacatattatctttattttaagtgactatagttgtgattatctttattttaagtgactattgttgtgaatgcaaagtaagtgtagttgagtaataaaccagattaatgacctgaaaaaccaatacgcaaggcaggattaaagaactgtgattaaatgaagaaaacagaagaaagag

SEQ ID NO: 56515 - DNA, 1221 bp, Homo sapiens
tatgcctcgataaatctattttaaaaataacaggaaaatgtatcctgtttcctttttgttgttgttgttgttgttgttttgagatgaagtttcgctcctgttgcccaggctggagtgcaatggcgcgatcttggctcactgcaacctccacctcccaggttcaaataattctcctgcctcagcctcctgagtagttgggattacaggcgcccaccaccatgctcggctaatttttgtacttttagtagagatggggttttgccatattggccagtctggtctcaaactcctgaccgcaggtgatccgcccaccttggccttccaaagtgctgggattattacaggcgtgagctaccgcgcccagctaatgtatcttgttttctgagaattccagaggtgttgtatactttctgaagatgtctttcccaggagtagtgatcaccttgcttaagaagttcttacctatgtcctactcaaatctcttttactactgcaaatattttatttttctttaaaaaatattaatagctcaccttgctttattttgaatgtagaatcacttttggtggtgtaatcttacatgttttggattccttataggctgatcccaaagttgtcagatggagagtaaatacaaggagatactcttgctaacaggcctggataacatcactgatgaggaactggataggtttaagttctttctttcagacgagtttaatattgccacaggcaaactacatactgcaaacagaatacaagtagctaccttgatgattcaaaatgctggggcggtgtctgcagtgatgaagaccattcgtatttttcagaagttgaattatatgcttttggcaaaacgtcttcaggaggagaaggagaaaggtaatgtgggagttccacacctgccccgtccctttttctgccaagcctgggcctttcctttcatggcatccctgggatatgacccccagtgcacattgttggaatttgtttgctaacttagtgcacctgtctctttgcccccttttactgagaatcgcttctaggaagtgtttgttacaaattccacaaatccattccagcctttgtttgcatctcttcttccagccttagggttaccacttccatttaacatcttttctccttgcccatctttgtctccagttcagttgcagtgaatatggacgtagaatttcaaagttaacttctcccaactccatt

SEQ ID NO: 56516 - DNA, 1062 bp, Homo sapiens
agaagacccttactgggaatgtaacactgtctcagaatggcgttttcactttatttctcctttgtggttgagtggtttcagtgcctgcaattcttgagttagaaaattgatttgccgatttggtaatgtgaattaatacttatagtttgtgtcatataataagcattcgtctaagtgtttcatgtacattaacttatgtgatcctcacaacaacttcattaaataggtactactattatctccatttgacagataaggaaatttaaacatagaaggggaagggacttgaccaagattactcagataactcagttaagtggagaaatgaggatgtgagcccaggcattctggttccaaaatccattctcacttggattgcctactgtataattacttgtactatcttgtactatctctctgttcttagcataattctgctcttcattatggctgtgaaattgtgtgtgtccacatttggtgaaagtttcctaaagataatattttgggttgcaggctgggaggtgaggggactggaaggaataaagagtgggaggatgtagctatggcccaggggacaataattcaccttggagttagaagcctctgcttctaattccttctaatttattctgttatgaaatttggggagatatttcctaattttattgttaaaatgacataaaatatgtatgtgaaagggcttcatcctgagcaggggctgagaatctgatgtattggcacagtggctagtaaggaatgtcaggtctcagagactacacagttacaagacttagcggtttgcctgagactggggcagaattcagacttttctgtctcctgcagctcaagaattcatgcccttgtaggggtgaaagagaggtagggatctgcctacttcccgactttattttcttttttacaatcccagattttctgtgccttggagctgcctaaatctcagagcaacctaatgagtaggaaatcacctagatcacaagcaggtgacaatatcgaaggatgaagggaatactttttgtttgtttttgtcgctaaaggccagtt

SEQ ID NO: 56517 - DNA, 1048 bp, Homo sapiens
gatggaaaaaaaaaaaaaatcacacaaccatgaagcttgtgccactatgtttttaagactctcagactcaaccgagtcctaccttttcagtggattgaagtagtctctttttgttatcctgtttttttctccatagcactcatcataaccagaaactatctcaggagtgtgtttgtctattatcttcctccgctaaagctccatgagaaagagcctttgtttattctttcctgtatctccagcacatggtacatatggagtatggcacatgctcagaagatgtttgttaaacaaacaatctcagcttagatgtcactaactctaggaatttttctctaatccctatctcttaccaagtctgactttatggatttttccttcagcatcccgtgtttttctgtcatagcattttcacactgtattctcattgcctgtgtacttatttttatctttctctaggtcagcaatacacaatagaactttttataacgctggaaatattctatatctctgttgtccactacagtagccgctaagcacatatgactatgaaacacttggaatgtggctagcatgactgaagaaatacatttttacttttattaatatttaattttaattaattttgagctgaaatagtcatatacggttagtggcaactgttggagagcacacacgactctcaattttcagctctatgaggtaagggactgtctgtatagctctctgttgtatttctcagggccagcacagtgcctggcttgtgccgacaatatgaagaaagttgggcacataatctgtagattgtgtgtctcttagtggttattcttttccatggtgagatgaaagttcaatgtgaaaaaattctgtctcaaaaggatttggatatctacactgatggatttaagatatttaaatgatcattattgggtatgtgaaaggtcttcacatagctagcattagctggtaggcttaagatatctgaattcactgtagaaattgcttattctgactcaactctgaactataccatagagatttttaaaaa

SEQ ID NO: 56518 - DNA, 1006 bp, Homo sapiens
aactgaaaaccctcctctttcccagagttgccatattgcacaactccagggggcattgttcaaattggagttgtgcaaagcagcagcactgcctcccacggcttaccagaaagcagataaagtcaaggtaaatatctaccaaattaaatcaccctatatatacatatgacttaggcatgagaatttctagacaagttaaatttattattagcaataactattaagggtcaaattatatactaagttctttacatttattatccgtcttaatattcacaagcatgctggtcagtattcattaccctattttacagatgatgacagtgaggcttgaagaggcaaaatgactggtacaagagcacaaagatggtaaatgacagactcaggtttcaaatacaggttgtcttactgcaaactctaaattttcagtcattacacttagccaagaaggcttctcagagaagaggtcatataagtttggttctgaaggaaagatgggagttgcatgatactagaaaagagaatggcctatgagactgtagatgaactcagatcaatatggaaggagatactccaaggggaaagggagctagaaactagattgcagagggaaatgagtaaaagttgagagagtaatgggggagtaaaacaaatatgagcagagaccagggacatttttttgtgataaattcaggcaaaaataaaatcatgtaataaataaatgtgtcactgttcctccagctacaggctgattgatgtactatggaaagacagtagacacacataatcatctgcaaaccaaaatacacattttcagttacatggctatcagtcgcttctccaacgaaatatctctgtattctttcccttagattctgtgctccagcaatatcaaatggcttgtaatttcccaaacacactatgttgtttcatgcctcagtgtctttgcacatactattttctatacctggattgcccatctcattaagcctgatgaaacttgtgc

SEQ ID NO: 56519 - DNA, 1054 bp, Homo sapiens
tataattaccaaaactttataataactttgaatttttcactcagtagtcagtaagtagctggtccaatccacagcttgctttcaacaagaatctggaacctagatcaccatccttaggtaaaattccattactgagaattagatgacaaaaaagggattgttgagccagtatgcagttccactggagtaggaaacaacaaagaataagactagtcacagccccaggggttttctttctctggtgatattttttcctaccaagtgatttaaggaaaataaacttttgatcctgttttacatattatttggactgcaagaaagtagtaacatcaagaagtaccaaaatcaaatctaagaatttacagagcaatggcacaacctctcagtttgttatttcaaagtaaccagaacgccaaagcgatgctgtctctggaattttatggctgcagaactatgagtcactctctccaagtgaatagtgaatatctccaacaaggcactcttgcaattagatttggaccttctttcttcttcagttggaagaggaaagagaaagagcctaagggtagtaagctggctcattctatcagtctaggacagaggattttgaactgtgtggtagaaccccaggtagttccttaaggattataagaatgtgtaaaagccagtaagacagggaaaagggatataggtcttacttcaccatttcaacaacagcattctcctttgatatgttttcctcatttgttaaaaatgtctcacatctttgttttaaaaacaaatgagaaaactgctgccctagaggaaactattaaaactaacagtgctatccagatctatggagaagcttagaatagaatggcataactgctgggtaggcagttgacgttacatacattaggacctacatgaaacacactgattcttcatggaattaactaaactctgctatgcaagtgtctctgtgatggtcttaacttttctgtgccagaaaatgcacatgtctaaaaggagagcatatccttcccaagagttacagctgcaactaggagga

SEQ ID NO: 56520 - DNA, 1050 bp, Homo sapiens
ggactgtgagatctgtggacttgggagaatgtatctatttcacagaagagtgaaattctcacaaagtgaggctaatgcgaacaatgtaccgcaattttaaaaatacagatttttttttttttaagtgagaagagtgcagggagactaaatagcagttaggattgggggaatcagtgaaactagagtagtgtgggtgtgtagagcagaacacatttttcttcatgtaatgctcctaaccattgccctgaacctgtcatccacacccagactctgatcatccagtgaagggaaacagtaaaaacaagtcaggaaaatcagaaccagcagagatgagtgctttcttgcttgacttctaacaaattaaacttttccacagcattgttatcccaccacaccaagccatcagcctgtaatatctaaagtgcaacataaggagcataggagaataagacagagcccactgagaaagggaattcatccatgccctcagacaggtattggggcactgggatgggtagtgcagagtatgagcaagttgttggaacctgggctgagatttttcatctccagagaatatattctttacttctgattttctgggatttctggcccattcccagtctctattttcccatacccttccaatgagctaaattgaattctgcgtttgactctgttatgtttcctttctcaagtactttcctaagatgaggaactttttccccccagttttattacatatgtgtgaaaacagcaagataaattgggggaaagggtataaaatccctctacttagtttaagaggacaactaagagttcaaagtctggcctcctgactgtattgcattagaatgcagatttcaagtcatacctgtccgtatgtctaaagtgtttgatcatagtgagaagggaatgaggagatgggataaacagacactcctaaaatggctcagggctgttatcatcctgtcttcaggggcctactccaaaacaactgaagacagtcagtacctgcacagaatctgtgctctagaggtcctcactgagccc

SEQ ID NO: 56521 - DNA, 1034 bp, Homo sapiens
ctcttttgagatatacagtacattattattaactatagtggcctttctgtgcaatagagcaccagaacttattcctcctatctaactgtaactgcgcactcactgaccaacctctccccatgcccctccccttcctctcttcagcctctggtaaccaccattctactctgtacttctatgagatcaactgttttacacaaatgctgctttatgcagagctcttttttttgcagagacccttccctgctctgtggggatgccctccatctgttgctccttgtcccctatggttcagagtttacacagccgctttccctaactgtttctttttcacatgcccacccactcccccagcatgggctggtgaattgttgacttcccagggtctggatgccactcagtactgatgacccaaactttctgcctcttcctgcagccactaagcacagctggcatcctgagctcctcttctgccgcttccaacaggtcaaggaataaggctcgctatcggaccaaagccgtgagctctgaggtggatgagagcctctttggagatatcaaggtaatcctcaacaagtcctttcaagttgatgccacctgcaggcagaggcccaaaaatgtagctcagggcaaagcttctgctgagtaaccttgctctcgtaggtaactctcagactgaagacaaaggggaattctgagacctgagctgcagagctttgggatctagtggggcctatgtaaacagggacacctagcttcttccaccctagaatctctcatgtcttcacagtgtttaaaatctgttataatgtcaaaagggaggctcagctgcagagagtgcaatagttgctcagttgagctccatgatggaaacattgcagggctgatgggctaagcttgcagacaatagcaacatcttccccgctccatccaaggataatagcatcagagtacaacacaaaaccatcctcctttcccagttgctcaactaaaacaattacttagctttgggaaacgagcaggtctttatttgc

SEQ ID NO: 56522 - DNA, 3276 bp, Homo sapiens
accaaggacttctactatctctttcacaatccctagcacagatagtaggtgctcaattaaaatccagtggtttgcaccaacctagatggttaaaaaaaaagcaaagaaaacccagaggttgagggagggtagatccaaccagtttcctaagctgttccacattcctcctcctctccccaaatcattctctttcccagggctataaagagcagggttgcatttggtaacagttctggtcctcatccttggggctcaccgtgggggaaatggtgtatatccctgcaggcagaattcctgaattccccactccccaggctgcaaggtgttgaccaaaagcccgggtgtgtcctctccctagctccccgcagccaccgccacccattggaatggccaacaggggacctgcatatggcctgagccgggaggtgcagcagaagattgagaaacaatatgatgcagatctggagcagatcctgatccagtggatcaccacccagtgccgaaaggatgtgggccggccccagcctggacgcgagaacttccagaactggctcaaggatggcacggtgagagccgggccccactggcttggaagtgcagggagagcaggactgggtccagtggactggggattgtttaacctgaagaggagaagactgaaggcacacatgtcccagcctcttcctcagcttgaaggcctttgtcaaggatgtgagagggcccatgctttcctcccttcccgtggagtggagggtaagggtgaatgtgcctcccaggcagtggaagactgaggtgacactgaggaagaatgtctctaaggaaagaactgtgggagggtatattagcaaggaaagactaaacactggcttttcactctgggctcggaggaaggaggctggcaagaaggactgtgaggcttactctagtgaaagagtccaagctgtcttcaggcaagacaggagcctctctggttcattgtctctggttctgagggtggtgcacgctgagctgcgataggtaggcatattctcacctttccacccctgctgtcctcatccaggtgctatgtgagctcattaatgcactgtaccccgaggggcaggccccagtaaagaagatccaggcctccaccatggccttcaagcagatggagcagatctctcagttcctgcaagcagctgagcgctatggcattaacaccactgacatcttccaaactgtggacctctgggaaggtgggacagggcgaggggctgggtcctgtcatccaggaggccagagattgggctgggccctcttgaccaggcagaaggggctgttttctggctccctgcagagaaagaggggtgtgtttgtgttccatggagcacttggtcatattggaggctggaatggagaagggtatggaaatgaacagtagaaataattaggaagccaggcctgctgacttagcgatagaggcggaaccctggtatctaggacactgcggaggctgacacattcccattctccttcccaggaaagaacatggcctgtgtgcagcggacgctgatgaatctgggtgggctggcagtagcccgagatgatgggctcttctctggggatcccaactggttccctaagtaagtattgctgggacagccgcagggtccagcaggtgcattgtttctgcccaatcctgtccctaggaaataacttatctcagtagcagctggccctttacaaagcactttcagaaaattcctcatctcacttaatcctcacaacaccctctgggatggcaaatgactgtccctttggacagatgaggaggtggcttcagagagcttatggctctcgagggcagagctggcaccagcccttgagccaacagcaaagcctgtgctctgtccaaggaagggatttactagggcagcctgtgatctcctctaaccaccactcccttgtcacccaggaaatccaaggagaatcctcggaacttctcggataaccagctgcaagagggcaagaacgtgatcgggttacagatgggcaccaaccgcggggcgtctcaggcaggcatgactggctacgggatgccacgccagatcctctgatcccaccccaggccttgcccctgccctcccacgaatggttaatatatatgtagatatatattttagcagtgacattcccagagagccccagagctctcaagctcctttctgtcagggtggggggttcagcctgtcctgtcacctctgaggtgcctgctggcatcctctcccccatgcttactaatacattcccttccccatagccatcaaaactggaccaactggcctcttcctttcccctgggaccaaaatttaggggcctcagtccctcaccgccatgccctggcctattctgtctctccttcttccccctggcctgttctgtctctgagctctgtgtcctccgttcattccatggctgggagtcactgatgctgcctctgccttctgatgctggactggccttgcttctacaagtatgcttctcccacagctgtggctgcaggaacttaatttatagggaggagcctgtggcagctgctgccccagccacagctgcactgactgtgctcaccacacatctggggcagccttccctggcaggggccctcgtggcttctcattttccattcccttcactgtggctaaggggtggggtgaggggatggagagggagggctgcctaccatggtctggggcttgaggaagatgagtttgttgatttaaataaagaatttgtcatttttgaatggactctggctgtgtctggggccactgtgccactgtggggaagggaggaatactgggcaaagtgcagtgagtgatacaggaaggagggcagagatgagaggttgcagtgctaacccctgtcttgagtttcctccccatcctcattctcacttgctttggggggtggtgtaggttggaattgagaggggacaggacctcacagctgaatgcagactatgtaggcagtgtccacagggaagtaaggccctttctagtcaatggaattggctaatcctgcctgctgcctttggctgggtctgcctctacagttggaacagcttctcagtcactgagagggtggggctggctgctggcacagccatcagtcctggcaagtgaagctgtctccaggtgagaggtccctcaggcgggcttggggtgaggtggtctgtgttggagtggtgagggtgggggttgcagtggtgaggaaacgtggagagctggggaatga

SEQ ID NO: 56523 - DNA, 1273 bp, Homo sapiens
tgccccgccccgggtccgccccgtctgaggcgggaccctcctgaaaatccccggctgggcagggcgcaccacttgcagctgcagcccttgccttgagtcagtgcgccgctctccagcccgcttgaacggtgagcaggtcgggggtacgggggtcggggacatgtgcgtgctgtgtagaaagcaagaagccagcgctttgaacttgctccagcgagctcggggatcaagggctggtaccaggcaagggtccggtgactactttaccccgccccgtgctgtcaggtcctgtccccaagccctgacccgacattgttggacgatgaggtcaggcgaggttagcccatgcatagacagggcgtccgtctggagcagggactcagggactgagccccacccgcgggctccatcgctgagtcctcactggggcgaggggaaaaaagggcgtcggactttagctggctggccccgagtgaccccgggtcgtggcgccggccctgggccagctcgtgctcctgggctttcccgcgcgacccttcacttcctggttccaggagcacgtgtgagcactgcgtgccctctgagtccccgaggccgcccttttcattcctgttcctgctagcttgctattctggggacttgaggtcacgggctggggctagggggctctgcatgggtcgcacggtgaccttctgtgaagctccagtcatctctatgacggtcccctgacctcgggggtctgggtgctgcagccctgactgcgccccggggtgccctgtgtgaggttgtgggggtggtggtggctgcttttaccctgcccgagcgccgctgcccccaccgggtgccccctgctgctgggaaagccggtggtggccgcgggcggacgggcgggctgcccagaccactgcgtcaccccagcggcgggagggcggtgggtgactcatctgttgtaacggcccagggtgtggtcgtgggggtggggggcggcggctgggaggccggacctgcaggaccggaggtggactgccgcctccccccgcgccctgtgcctcctggggctacctgaagccggtgtcctgggagatctgtgagcagttggtatctgtggggcagagagaaacggggtgagagtggggatggagtgtgggattcgatgtagaagacctgcggctgggacggggctcccccagtgttctcattgacttcaaagcaccagacagcaatggctctctatctctagccccctcccagtttctcctccccactacaaggggca

SEQ ID NO: 56524 - DNA, 1243 bp, Homo sapiens
gggactcagaattccctggggacatggaattgctggagactttgcacctgggcttggccagctcccggctcagacctgaagctgagccagagctaggtgtgtgagccccccggaaaggcaggcatctcggccatactgtcccacatccccccgccaccttaggacccatctattcccagtcaggccctgcctcccaggctcctctgctctagactgtgccttgcccccttgggccatctgtactggaagggcctagcgagcttcacatctgagctcttcactcagtgaacctcagggcttcttctcattgtcctgcccgcctcttgcaggtgtgaagactccagaggagggctgcctcctgaacactgcccatgttactggccctgaggcccgctgtgctgcccttcgggaggaattcctggccttccgccgccgccgagatgctactagggctcggctaccagcctatcgacagccagtcccccaccccgaacaggccactctgctgtgaacatccctgatgtgaggctgtgaaaaggcatatggacctgcaaaggaggcccccaaccagacagacctagtttcaaacgagggcactgcccctgcctgcccctttggtgcccaggcacagaccctgatagtgggtttgggtcaccttggtatggaatgtatgtgctgaccccctaggtgagtctggggattggaacagggatcttaggtctgcctctctctctctctctctctctctctctctctctgtgtgtgtgtgtgtgtgtgtgaagttttttacaggtgaataaacaaagtttgaaagatgtttctgtgtgttatctgtctttgagagagtgccaggaaaatccctggacccttaaagaagaggagaatcttcttgaataaatggaggtgcattcagcattcattcaagaacatttattgagtgcttacggaggccagctactaaaggccagccactgaagtagatactgagaaaatacaaagctctggaagcacgcctttgcccttgaggagttctttctagtcagtgaggcggacaaagaaatagttaccgtatgataagttccgtgataaagctatgtgttggttattgtagcacaaaggaagatgttgcattcaaggccacctttagtgaacgctaatatcgtgtgctgggacaaatgccacatattgggggggagtcctcaggaccctcacagatagatggtggtaataatagtattcacta

SEQ ID NO: 56525 - DNA, 1012 bp, Homo sapiens
tttgcatctttaccagggggatgttgggtgttggggaggaacaaaagtgggagagggtaagaaggggtgtgcagtggccccagcctgaggccgttccagtatggcctgtgccttccctccacccctccaccttgttggtcctttcctcgcttgttcttcctagctctgctctgttgttcaccaaacctctcaaggcctgacgctggctcctgggagggggacctgcccctaccacagaccctgatctcctgtccttccccagctctgctctgggctcaggcagtcctgacagcgtggcgaagctgaagctccagggatccccagtccccagcctgcgccagagtctgctctggggggatcctgccggaactcccagcccccacccggatcctccatctagccggggacccttacctctggagcccatttgccggggcccagacgggcgctttgtgatggggcccactgtggcggccccccaggaaaggtcaggccgggagcaggcagaacctcggactccagcccagcgtctggcccggtcctttgactgtagcagcagcagccccagtggggcaccccagcccctctgcattgaagacatcagccctgtggcaccccctccagcagccccacccagtcccttgccaggtcctggacccctgctccagtacctgagcctgcccttcttccgagagatgaatgtggatggggactggcccccgcttgaggagcccagccctgctgcacccccagattacatggatacccggcgctgtcccacctcatctttccttcgttctccagaaacccctcctgtatcccccagggaatcacttcctggggctgtggtaggggctggggccactgcagagcccccttacacagccctggctgactggacactgagggagcggctgctgccaggccttctccctgctgcccctcgaggcagcctcaccagccagagcagtgggcgaggcagcgcttcgttcctgcggcccccctccacagc

SEQ ID NO: 56526 - DNA, 1022 bp, Homo sapiens
caccagggggagtgagggaacgtgaggaggcagacttcagcaagaaggatggcgggccctttaatagagaaataggagctggttttgggtggaagactctgaacttagttgtggagtgctgggaagagagccaggtgaagtcccagcaggcaggaagccccacgcggcccaactacaggggtggccattcacagtgtattttctgtgagtggcaccccctggagttgtgcagtcacagcctcacactattgggaggggtccctctgcaggaaggaaaggaagcactggaaatcagagaggggtcaggcctagacatggagctgctggagtcttctgcacagctgtgggtttctcatcctgccccctctcttgtactgccatcccgggcttgtctctgctgagctcctctctctagctgtcatcttctcttccttccagttccctggctggtcccagggcacagaaggctcactgatcatcgccctggggaacgaggatgccctgggagaatactcctgcaccccctacaacagtcttggtaccgccgggccctctcctgtgacccgcgtgctgctcaaggttaggccgggggtgggcgggggcctgtggtgacagtgggtcagatggctggagatggtgctaaggccaggctgatgggggtggggtggggcagacacatggggaggggtttccaagtttgtttcccatggtggccacggcagcagctgcctgatgccatcccagaggtttctgcagaggtggtgctcgggaggtgggacatcagtcacacacatccagaagtaagatatcctgtttgccccaactctcactaaccttgaccgtgctgcctccctctctggggctctgggaggaagaatgttctgcagaggtttgtacatctctgagagtcctgcctaagcctgccagcccttactacaccaccattttcctccagcccctacccactggggaacagaaacagagccagagaggaattgagagatggagagagaatgaggtag

SEQ ID NO: 56527 - DNA, 1094 bp, Homo sapiens
ggcccttgggaggggcattccagaccgggggtgcagggagcaaaggcatggagatgggggacagccagctgcccatactgacctgaaagagttcatgagggctgacatatggaaagatggctggccacgtagggagggtttggatcgcaggggtccacagggctgggtttgagcttagtgtagtaggagccaggtgctgttgcaggttcctgagcagaagtgttctgtggctcaaggggctgtttctgtatgaatggccattagagtggcagctgcaggggagcctggagtcaggggctgctgcagcatcttgaggtgaggtattgggcacctgggttagggccagagacagagaagtaattcaagaggtgacaagcagggatacaaatggtaaatgagcagagttaaactgactcccccaaacacacacaccattcctaggcagtggaactgcatgaatggagttgctcttgatggaacagagagaatttggaaagaagaatgggtctcagggagaggatgaattcttgttacatacagggggaagcttctgcttccactccccaaagccctgtaacaacgagccctaagattccagagagcagagctgggaagagttgtagaggtgacctcagggttctgggaagactgtgggctgaggccaccttcctccccttgtgcatcccacaggacccccagtcatcgtggtgccccccaagaacagcacagtcaatgcctcccaggatgtttcattggcctgccatgctgaggcataccctgctaacctcacctacagctggttccaggacaacatcaatgtcttccacattaggtggggtcaccctcattaggaaggtggaggtggggaattcacaaacagtctctgaagagccgcttggctgggcaaggcctggacccctcctcacacatgccacattgcagccgcctgcagccccgggtgcggatcctggtggacgggagcctgcggctgctggccacccagcctgatgatgccggctgctacacctgtgtgcccagcaatggcctcctgcatccaccctcagcctctgcctacctcactgtgctctgtaagc

SEQ ID NO: 56528 - DNA, 1286 bp, Homo sapiens
ccactgattagtggcagagcagagtctaggacccaggcctcctcactcccagaacagtgctcctcctgagggggcttggctctcccccaggctctggacatccaacctgggttcagccccaggccagtgtgtgggggtgggttgacagaatcctcatttggcctgggtgcagtagacagggtggccctgggctgaggactcctatgaggcagggctggtgggtgggcagcaggctggagccctgagtggtctccctggcccttggacactgctttttgggctgacagccccactggggcccctgatgcctgtctcccttgcagcaccccctcaattccaggagacacctcctgctgtgttggaagtgcaggaactggagcctgtgaccctgcgttgtgtggcccgtggcagccccctgcctcatgtgacgtggaagctccgaggaaaggaccttggccagggccagggccaggtgcaagtgagtcctgggggtggacagagtgagccatatagagtgtgaagggaaggtgggggcctggcagtggggccagaggacagaggaggcaaaggccaggctggaggatgggccagaagaagggcttggcattgtttgccccgagcctggggtgctgcctccctctgctggccaaactcggaagtgcaggatctgaggctggcaggggaaaggactcttcctcacccactccttccctaggtgcagaacgggacgctgcggatccgccgggtagagcgaggcagctctggggtctacacctgccaagcctccagcactgagggcagcgccacccacgccacccagctgctagtgctaggtgctctctggcgggagggctggggtccagggttacctatgcaagggggctgtgacctgtggctgaattggttcacagcaagataggagggagatttgtgcctgagggcagggcccgtggaagctaagggggttcccaatgcaggctgttgctctgaaaccagcaccttaattttaaaaggctcagtaagcagacaaagcgatcttagtgcccagtagtgtgttatagtggaaaggacatgggtgcttgtgttaggctgtgagccagttaactccttgagtcccagtttcttcatctttataaagagactcatctctacctctcaggtgtgttacaagaatttacttaggtgcagctgagcccagtcactggcacatggtaattcctggccaagatccttcctttagaagggaaactgagaagcagaaggcctggactgtgccttcatagagc

SEQ ID NO: 56529 - DNA, 1070 bp, Homo sapiens
caggccagagccggctgagggagttgggacctgagggaggcccctgagcccattaacccttttactgcctcacagtgtggaaggggcctctcagcctttgtgtaggggactcggaactgcagttgctaagcaacaggaggtagaggttgctaaggacaatgctcttctgtcataagccctctgggcagtgaaggggagatgggtcggggactgttgtggggctggtggcctagaatgtgtgcggaaccctgagagagactgttggattagggaccacacagaagggaaggcttcccatctttgaggactctagaagcatctagtagaggagactggatttatcaacgatgccatggagtgaaagcaatataaaacaagctaggactaaagaggaggattcagttagctgctgtgtgtaaagcgccccagcctgtgcctgcacagtgcctgtgtggtgtgaacccatgaccaggcctctggagggaaggaaggttaggcttagtggacaccagctttcctaaggtgggtcttagaccaactcattaaaatggcaggatgggcttttgtgctgtatttcttgggattttcaagatgccccacacagcagaagggatgtgcatttttttctctgccctgagttgtttgataaaaatcagtgacctcgttctccacttagaactcccctgcttgctctagtcacctcccctcaccaccttttattcttaatcctctgcccagtcacagcttcccagaagccttccttactcctcttgcttcatagtgcaatgtctgggcgcagttagcaccattttttgaacttctttgtggatgtgtggacgtgaacttgcccatttaggtgactgtgggttccctgccttccgagagcttaagagagcagagactgtgtctcctgttttcttcacacgccgctgcatatgggaagatctgaagtcaacaggctttagccctgcaggtggagggaggcctccaggaggtgggcccaggactcaggaggactcagggctgccctgctggcgatcttcctgttctgtaacactacaggtctagca

SEQ ID NO: 56530 - DNA, 1039 bp, Homo sapiens
ccagtattggccaactctgcatgttgccttgtacttttcatttagatctggtggttctccggagagcagcttcctcgggtgttacatgagccaagccctcactgtacagaagagtgagagctgaaacctgttccctgagctgatcagaaggacatcccttggcccctccatctgggctcctgtggataggaggggctgggtgagcaggccagctgggctatggtgtggtgcctcggcctggccgtcctcagcctggtcatcagccagggggctgacggtaagctgagctcttgggctcaagaatgccctgttagccttggggtgggtatgggggtgttcctcaagggttcctctttgagcatgtgagggcaggggaggaatagggctggttctggagaagctgaactgggggtttctccagtcacccaaagtcctaaggtgcctacagagatactgatggcactccccctcccagcactgaccctagccccccgttgtgccctcatgccacccatcatgcaggtcgagggaagcctgaggtggtatcggtggtgggccgggctggggagagtgtggtgctgggctgtgacctgctgcccccggccggccggccccccctgcatgtcatcgagtggctgcgctttggattcctgcttcccatcttcatccagttcggcctctactctccccgaattgaccctgattacgtgggtaagagttctcctcaggtgggaggtagggaggtatcagcaagaaaggtgggctgggtagagtcgcacaaggcctcctatgaacggctttgtccctgctctgatctcatctccagctctgctgccttaactctgcttaataagcatggctgtgctcccaagcagtgttaattcattgaaagattcattcatttacacacacacacacacacacacacactcacactcttatagctgtgctatttaggactccacgtggtctgttccaaaggagatcctgcagccctattccaaatatccattctaattctgtaactgctttttctaca

SEQ ID NO: 56531 - DNA, 1252 bp, Homo sapiens
agctcattctcttaggacattcttagaagttagaaacatttctgctgggatcgttggagggaacttcaaactttggaatctttcctgcaagaaattctttaccaaagaaaggcaggtgtttcttaaagggatgcaaaagatattttgcactttgtatgttccaaaacatttagtaagttaactaaaaaaatgagttaatttggtttcttgggggattttaattttttaatttgttttctggttatgtaaaaaaaatgttttttttttgcttcttatcacaatccttttgtttcctttttaatcctttaataacaccttcaaattttataagactttggcttatttcctatataattctttttttcttataccacctcttaagattgatatgttcatttgcaggtaagcattaattattagataaagagggatgattctcaagattgtgtgtgttctgaacagagggaactacatgacattttcttctgtaattgcctttgtaacgtctttagaatgtggttcctaaatattcctggataaattctcttgataggcccattggaaaggctaatactcccacccagtgctttgttccttcctggcaaaagaattcctaaaaccactgattttagttactgacttctcaccatctggactcttacaagatgtttcagaagttgtgtagaacttgtctttcagttgacttgtggctgaatttactgttacttctctaatatcagttgttttctgcattaccaccctctcccctaaccatctgtactatgaatggaaaaggaaaaagatggaaaaattatacctaggattgtccctaaatgcaacctcttggttccccccacccctcatgttttattataaacgattttaagagctgggcatggtggttcatgcctataatcccaatgctttgggaagctgaggcaggaggatcacttgaggacaggagtttgagaccagcctggacaacatagtgagacccccatctgtacaaaaaaaaaagtgctacttgggaagctgaagtgggaggaccacttgagcccaggaattcgaggaggttatagtgaactatgattgtgccactgcactccagcctgggtgacagagcaacaccttgcctctaaaacaaacagctccaactattttatttttttatttttctgagacaagatgttgctttgtcacccaggctggagtgcagtagtataaacatggctcactgcagccgaactcccag

SEQ ID NO: 56532 - DNA, 3037 bp, Homo sapiens
gtacgggggcggggcttcatgccggatgtgatagtctgcagtcgtttcggttggcagcctggcgggtgggagatgcggcggccacctgctgcaaagaaccgaagggaaggttagaagtacgaaggcagtttggagctggggctaagcagctgtcgcacggtcagatcatgggctccaccaagcactggggcgaatggctcctgaacttgaaggtggctccagccggcgtctttggtgtggcctttctagccagagtcgccctggttttctatggcgtcttccaggaccggaccctgcacgtgaggtatacggacatcgactaccaggtcttcaccgacgccgcgcgcttcgtcacggaggggcgctcgccttacctgagagccacgtaccgttacaccccgctgctgggttggctcctcactcccaacatctacctcagcgagctctttggaaagtttctcttcatcagctgcgacctcctcaccgctttcctcttataccgcctgctgctgctgaaggggctggggcgccgccaggcttgtggctactgtgtcttttggcttcttaaccccctgcctatggcagtatccagccgcggtaatgcggactctattgtcgcctccctggtcctgatggtcctctacttgataaagaaaagactcgtcgcgtgtgcagctgtattctatggtttcgcggtgcatatgaagatatatccagtgacttacatccttcccataaccctccacctgcttccagatcgcgacaatgacaaaagcctccgtcaattccggtacactttccaggcttgtttgtacgagctcctgaaaaggctgtgtaatcgggctgtgctgctgtttgtagcagttgctggactcacgttttttgccctgagctttggtttttactatgagtacggctgggaatttttggaacacacctacttttatcacctgactaggcgggatatccgtcacaacttttctccgtacttctacatgctgtatttgactgcagagagcaagtggagtttttccctgggaattgctgcattcctgccacagctcatcttgctttcagctgtgtctttcgcctattacagagacctcgttttttgttgttttcttcatacgtccatttttgtgacttttaacaaagtctgcacctcccagtactttctttggtacctctgcttactgcctcttgtgatgccactagtcagaatgccttggaaaagagctgtagttctcctaatgttatggtttatagggcaggccatgtggctggctcctgcctatgttctagagtttcaaggaaagaacacctttctgtttatttggttagctggtttgttctttcttcttatcaattgttccatcctgattcaaattatttcccattacaaagaagaacccctgacagagagaatcaaatatgactagtgtatgttccacaccctctgctactgtgttacattctgattgtcttgtatggaccagaagagagctttgggacattttttctgaacattctaagcattctagtgaaagttcccatgttccaacagaacttaaaagcaatgtttgccttatatataaaagggacacaataattgaggtccaccttctaggaaatcctaggactcgtttatttgggacatggtgggaataaaggtcacatattggaaaatggaaaggctgatgaaactatcagatactaaaacattcttaaaatagaggaatatagttagagacatcaggtttaagccagtatttgttcctgttttacaatgcttctgtcttaagctgtgtcttaacttttaacacccatcttttctttctaaagctttcctgacagctgtgaaaatccaaaaaatattcttaaactgtgtatggtggcccttgcctgtagtctcagcactttgggaggctgaggtgggagggtcgcttgagttcaggagttctagacccacctggggcaagatggtgagacctagtctcaaaaaaaaaaaaaaaaattagccaggtgttgtggtgcacccctgtagtcatagctgcatgggaggctgaggtgggagaattgcttgagcccagagcaagaccctgtctcaaaaaaaaaaaaaaaaaaaaaaaggaaaggacaactttttagatagaaaagtattaaataatactaagatgcttagtagtattattttagagagttttaaacttctatattaaatgtggggtcttacaagataatccaaagactttgggaggccaaggcgggcagatcacgaggtcaggagattgagaccatcctggctaacacggtgaaacccctctctactaaaaatacaaaaaattagccgggcgtggtgggtgcctgtagtcccagctactcctcgggaggctgaggcaggagaatggcgtgaactccggaggtggagcctgtagtgagccgagatggcaccactgcgctccagcctgggcgacagagcaagactccatatcaaaaaaaaaaaaaaaaaaagataatccaaagaatttaaattgtaatcatgtttcatgtatttgttttattacttacttttatagcacttagtcccagtggtattagactgctatttggtttcatacaaaaaggattaaatttaaattcattcatgtttagacttgagttattacatttttaaaactatcatcttgcctttaatgtttgtggtcctacacaaactattagtacatttcagtatcctcttacccctttgtttttaagtttttgattgctaaagcaagacttttttcttctagaatttaagtcaaccaagtgttatctatgttgtaaaaatggataatagtagattttaggtgataaaacaacttgttagtaagacatttcctagcttaaaaaaaaaaatcaaaaattccatgatagaaatgcagacctgtgagggaaactcctgaaaagcataagaagcatcccagagagccatgggttttctagaccagagaatttagagggagattgtggaactgaggcttaggtggtcagatcg

SEQ ID NO: 56533 - DNA, 1048 bp, Homo sapiens
gagtttaactttgggcccagaaactcaaccatcaatggaaacagggcagtgacaagtggagggggtgtctggaagctgagcaggcccgacagagagatgaagccatcagaaggacttgagggggctcctggggaggtcggggggaggtggagcaggaagagttttaggggcaaaggacagaaccccttgtaggactggaggcaagattgaatgtgggagaaaatcggagagaagcgataggagttagaacatctggatgtgtctgcagcctgctgtcagcccaattgggccagggggtcccaaagacgcatattctcaccccacctccacctgcttcctgatcacatcccagtcaccagcggcagcttcctggatagtgagggagaacaactgcaagttgagagaggcagaggggtggaagggacctgaagctggcctggagaaaagcataggcccaggagagcctgccctgggacagcgcctgtctcccacacagcagcactggcccagcaaggacctcctcccttggccctggccacatcccactcctgccctttcataagccccctggggaaagcactccagtcttctctgttccaggctgggcagatagggtcctatggggcacagccagggtcctatgggcatagccagggccctatgggtcctctggaagcaagaaagggggccatggaagcagcccagacagctggggttcactcagagaggacccaagtcccagtcccttcctttcagtcaaaacacggatatctttgcctcaggtcacagggccactggggccctgtcatcaaagatgagattcctgaagcctggcattgactggtcccctaagaacagatgttgggatggagaatggggattcatttgggtttcagtaaaacaggggggtctggacaagagcgggtgggctacttggtatccacacacacgcactcacacaggagccaacccattgcagctgaacaagcagagaaactcagtctggaaaggcccctcctgcctgctgaagtcactgagaccctgccac

SEQ ID NO: 56534 - DNA, 1197 bp, Homo sapiens
caggctccccagctctaagccagggactggggcgtagagaggacccactaaggtgctgccccaggcactgctcggcctcccggggcaggccacacatctcagctagcatacccacgtactggggtcgctgcaccaaatgctgcgactcctttctgccccacactcagctccaggcctggccttgggtgcccgccctacgagggcagtgcctgcccagcttcataattgccccagagttggctggaggcccagaggccagttctgcccacgatctttgaagtaagtctctcccagttgcgctccacgcacttcatcaactgggggcagttccctctctcacccccatctccaccctgggttgggtccctctttgcccttcttcctgtctcccaaatggcacttggctctgcagccacccatcagttttcacaccgcttagttccagcttccttgcctcaggagaaaccaggttccatggagactgatcctgggatctccaagcaccttgtgcctgctgtggtgggtgttcatggtggggtgttctgggccaatcttgcatggatgcatggggataatgacagtggaattgtttttggcctgaactggagggctccctgtaggaggtggtctggggaagagtatggcatggagacagtgaaactgccagtacagatgttgatgaggctgaagcccttgaaatgagagtgaagcgtgggggtggggatggtgacttcagagctgctgtcgtcaaggcagaggctgaaggtagccccagctgcctgtttctagaccagagctccacagtggcaccaagcaaagccttcccctgctgcaggtccctgggccctgcagggttaggatgagtcctctccctggtccctgggcaggtggcaggaggatgtacagagaggaaggcgctgtggggcctgggttgcctagcacttggtgtgttttccccagtgggcagcatggagcagggaggagcccagggaggtggggaagtgctggcctgtgtttgaaaaaggagcacgcagaggtctgagcacccactgcctgtgggcacttacattcatttcacaaatgaggaaaatgaagtaacttgccccagagagcacatttagtgagtgttggggctaggatttgaacacagatctgattccaaagcaggcctctttgctgtccctttccttgctgcga

SEQ ID NO: 56535 - DNA, 1077 bp, Homo sapiens
ggaaggtcaggtccctgaaactctttctccttaccagctatatctgggtgtggtgctggcagctgtggtcattgtcactggctgcttctcctactaccaggaggccaagagctccaagatcatggattccttcaagaacatggtacctcaggtaagatggcagggctgggctctgggctaggctgtaaggttttggcaagagtccagctcatcttttgtcagctcccaggctctaagatagagatggacagaaaagatcctccagctttccatgccagcacctaattgtttatggggcttctccttctgcttgacggtgtgggagaccagcaggagaagaaggcaggggcagagacaagcatttcatgagctgcctgtggctccccacagcaagcccttgtgatccgggagggagagaagatgcagatcaacgcagaggaagtggtggtgggagacctggtggaggtgaagggtggagaccgcgtccctgctgacctccggatcatctcttctcatggctgtaaggtgaggaggtcataccagagcaagcagttgagtctaaggagaaggctgtgtgcagagctgagaggggcccagtgaggtttaaaggtggagagacccaggtccaaatgtcaacaccatgcctatgcccctgctaaaccttctctcagtgtggggtgcttgtgcagtgcctccttgcatctgtgtgttatgaatgctctatgccccaggtatttctttgttgtccactttttagcaatcatgtattgaataccaattatgtgtcagctgctttatatatgttcgatgtgctatctgatgtaattctgaaagagtggtgtaatcatgcagggctgctgaatgtggccacacacgttgcatcctgaatgaccccaggaggtgcattttcataactacagtgttagtgtctccccctgtggttgtgcaaggcagagattctgtttacattcaccattttacagttgagtacatggaggctctcttggttaagcaagtaacccgaggtcacataagaagtcaggaggagtcagaattccaaaccagggcaggggcaat

SEQ ID NO: 56536 - DNA, 1063 bp, Homo sapiens
ccagcacgtggctctgggggctgtcttctcgctcgtggatagacagctggagagacaacaggtagttacagagagggccatacttgtcttggtagcgcggcatagagcagcagctggtaaggaaaccaccttagaaaagtagccccaacccatcaaagattgtcaacaaagagaatctccttgtgcaggggggtgtttagacctcacagttccaacacttgtaacctgagagccacctccgtaggacagtctttcattcaacaaatatttattgaggtcaggttaagacaggcactgtgctaggggctgaacggctccctcctcagcatccccaccaccacctggcctcagggggctttacctctatggataataaggaatgctgagattgcattcttggcatttaacaggtgcctaaaggctaaggggcaccataaaggaattacagaattatggtttcactgactggggtagaagagttggaaggctaggccagaggatgcggagctatgggaagaagagttgagagagtgacagattgtagtaagggatggagtaaggtttgggagctggggctagttgcaatcagacatgcagtcatatgagctgtcctgggggacttagcagggggagggaacatgaccctcagacacccccactcctgctagtgatgattccccttggctttgtccaccctcacccatttatatccctctctcttcctctgtcctggcaacccaagcagacctggtacttgttggtagagttgaaaggaatctctgccaccttggggtttctgtctctcattttcctcactgagccacaggagagctcaatgcacttgagcagagctgactcagaggcatcaccagctgtgtcccgctgccagaagagacaagaattcagtgtcagcatgggagggaagggagtggaggatcaggtgaaggcggcactgaaacccccaaggcagccacatcatgtgagaaggaaagctggggccagcaagaggctttggagacacccccaaaacatacctggtgtgtgtcctgaccccctaccttag

SEQ ID NO: 56537 - DNA, 1181 bp, Homo sapiens
aatctgtcactctctcaactcttcttcccatagctccgcatcctctggcctagccttccaactcttctaccccagtcagtgaaaccataattctgtaattcctttatggtgccccttagcctttaggcacctgttaaatgccaagaatgcaatctcagcattccttattatccatagaggtaaagccccctgaggccaggtggtggtggggatgctgaggagggagccgttcagcccctagcacagtgcctgtcttaacctgacctcaataaatatttgttgaatgaaagactgtcctacggaggtggctctcaggttacaagtgttggaactgtgaggtctaaacacccccctgcacaaggagattctctttgttgacaatctttgatgggttggggctacttttctaaggtggtttccttaccagctgctgctctatgccgcgctaccaagacaagtatggccctctctgtaactacctgttgtctctccagctgtctatccacgagcgagaagacagcccccagagccacgtgctggtgatgaagggggccccagagcgcattctggaccggtgctccaccatcctggtgcagggcaaggagatcccgctcgacaaggagatgcaagatgcctttcaaaatgcctacatggagctggggggacttggggagcgtgtgctgggtgagaggccagaaacaggaggctcagaaggggattcccaagcctctgcggcatccctggggtgggggactgtgggggcgtccaggaagccactctgcggatctcactgatcccttctgcccccctttaggattctgtcaactgaatctgccatctggaaagtttcctcggggcttcaaattcgacacggatgagctgaactttcccacggagaagctttgctttgtggggctcatgtctatgattgaccctccccgggctgctgtgccagatgctgtgggcaagtgccgaagcgcaggcatcaaggtactggcctcccatcctcccctccattctagcctcccccatgccagagttcaaggagctgcagtggctgctgccctggaaaggcccaggccacggtggcctccttcccactgactcagagaagaagctgtccatctgcaaggaaaggcccacccctgccttggggcactcacccttatcccttttgctca

SEQ ID NO: 56538 - DNA, 1010 bp, Homo sapiens
agacggggtttcaccatgttggccaggctggtcttggactccttatctcaggtgatccaccagccttggacccccccaaagtgctgggattacaggcatgagccactgtgcccagccttgttttacttttaacagggataatgatgcctgcctcggagacagagtggttatggggttcagaaaccacatacacccacagaaacaagtctcctggtatgatagttaagaaatagcagactgccttggttcaagtacctgctctatgacttacactagctgtgtggccttggcatgttactttgtgcctcagtttccctctttgtaaaaaaggaaaaatactggtgcttattcacagggttgttgcgtagattaaatgaaatcatagaggtttagtgcttagaatagtgcctgatttatatgtgtcctccctggcacagctcattgtcccatctagatgtgtcatgtgacacaaattgtttactatgtatcaggcactgtgcaaggtgctagagtttgcaccttgcacagtgtctgaaacatagtaaacagtaaatatttgttgaatgaagaacaaacatagcacagaggagggagtggtcagtgagaagcaattgtagttgaacaagagaaccttgagtgggaggcattctgtggggttatgggctgagccactgggagcatacaagagcctgctaatcccatcctaagttgacagagagggtgggcagtagttgggaagggtaggacaactaggtcttcaagataggagtgccagattatgcttcaaatcagaatggaagggtacacatgcagatgggacaaagagctgtgccagggagggagaggaggggcatgggacactggcctctctgagcaaaagggataagggtgagtgccccaaggcaggggtgggcctttccttgcagatggacagcttcttctctgagtcagtgggaaggaggccaccgtggcctgggcctttccagggcagcagccactgcagctccttg

SEQ ID NO: 56539 - DNA, 1026 bp, Homo sapiens
cacacatcccacacacacacatagacacacacaatccccaccccccacacacacatctcacacacacgcacacatacacaaatccccaccccacatacacacacacacacataccccacacacacacacacatcccacacacacacattccctctcacacacacacacaatccccaccccctcacacacacacaatccccacccacacacacacacacacatcctacacacacatacacacaccccacacacacacacatacacacacacacatacaccccaccccagccactcccctgcccacagacgcacacacacatgcccttatttcggttgggatctgccatccccagacatctcgctatctagctttctcttactttgggagaggaacaggagggggataaacccttaatactactttcctgttgtctcctctccttcccactaggtgatcatggtaaccggggatcaccctatcacagccaaggccattgccaaaggcgtgggcatcatatcagagggtaacgagactgtggaggacattgcagcccggctcaacattcccatgagtcaagtcaaccccaggtgaggcctctgcaggaagcccctgtgccctaatcaacacgtcctcttgcacagaaggcttgggtgtcccctgggagtatttggatagcatttctgggacctttataggccttacctctgacactattgtgactggttcctcagccctgagcttgtatccaggctgtgccactgaatacccatgtaaccttggagatgtcacattcccttcctgagcctccattttctcaccacaaaattaggatgccatctccactgctgtaggagtgggatgtgagtaaagaaactagcccagggcctagcaaactgcacttacaactgcgatgatcccatggtgaggatttagactcacattctcaaagagaaatgggggaagtgagtactgaggagaggagaactgaagcaacaggggaagcaggctcagcagggagcctgcag

SEQ ID NO: 56540 - DNA, 1433 bp, Homo sapiens
cagcccactgcaccaccacgatgctggcaaagaatgccgtgtggcacgtgaactccaccaccttccgctgctcataggtctggagggagggtgggcagagacagatgagagtgtcggaggaaagggtaggaccagaaggtagcatggtttctcctgatccacccctagccccagtcccagttggccaccactggccactcctgccaggcattcagcttcccgtaccttcacacatgtgcgctgtgtttacacagcaccactcacccactcctgtccatagctgtcctccagatcattcatggtccggtcatcccagtcgaggcggattcccagtagccgtgatggcaggaaaccgttctctgccaggatcacaaagtaggtgaagaagccacccagtgcctggatcatccctgtgggtagagggccaaaggcaggggcagggtcagagcaggaagcagaaggggcacagcccctcagggccagagatggaggtccctgacccttgggtagctggcctctgtcctggaattttgcttggggctcattcctctgaaagctgggaaaagaaccctgttggggttccctcccgaggcccggggcttggcgcaccgatctgtccgtaggccatgctgatgagcctctcattcaccagcttgtccgtctgggagtttcgtggctgccgcttcatgatatcactctcagctgcctcataggccaaggagatggcagggacctgtgtggggtaggaaatggggcagggagggcatttgaagggacgtaggagatgacagaagcaattgatcttcgacagtgacgatcgttgacacagttaaaaaagcgtgtattcagaccccattgtcttccaggcctgtgcctgtctcctgtaacccccacagctggggccactgccccagtgcacctctcctccctgccactgtgccatcacgattgccttgcctgtcccctcctccacctcctgcgctcaccatatctgtgcccaggtcaatgcaaaggatggtcacagtgcccagaggtagggggatgttggcaatgatgaacagcaggaagggggtgatctcggggatgttgctggtcagggtgtaggcgatggatttcttcaagttgtcaaagatcaggcggcctgtggggagattctgagggcatcagggaggtcagagggactcttccccacccccagcccctgaagcatggctgcctgtcttcccaagagaggaagattttgtgttcaagggaagctaaagtgggctgggctgcctagagttgtggaatgattcttcaactggggtaaagggacagggaacagaggtgccggcttcagtatcctgcaaaccatcccaacccatgcagcctcctcaccctcctccacccccgtgacgatggaggcaaagttgtcatccagcaggatcatgtcg

SEQ ID NO: 56541 - DNA, 1004 bp, Homo sapiens
ggttcctacaggagatagctttctttcccttactccctatctaacacttttgctctgcaggcagccttgcccattctctaagcctggcttagaaggcactgggaatgtcctgtagagagagacctagataggtcatgcaagtgagaaagacatctgaggaaaatggaagacctaaggcagacaggaaggaagcacaaaagacaagcattgggtcagacccataaaccacctcccaaaggctgtcatttcattgcactggaattttgctttatcagaagcaaggaagtaagggagtcattgccttgggcctgggaatctaagtgggagacaatattaatttggatccgattaattggagattactaactgtggacaaaagtttatctttgcacaatcaataaaaatggcatttttttagtaaattaagagcataaacaatattgctagaggtggcatgtttagtctaccaaaaacaatacttttcaggcactttagaaatatccttttagaagcagcgagtgcatgggctaattatcatcaatctttatgtatttgttaaagaaacatctacaggatctttattggtgaccttttgtaagacattagtttgaggtactacctatgtacttgaaaataataaagtggcatttctttatgaaaaaaaaagaaatctcttccataattcagatttctacactttatacttgcctccctcctaaatcgtgatattgaaatatgtgctgtggcagaactcggcttgtagggaaagcaacaaagagatagcaagtgtcagggatgggagggaaatggtctgggagcagatgatgtccgtggagaaagcaagaggggaagaagttaggttgcaaaataacctacaagaaactatagcaggagcctccttcctcatgctgatcccaccctaagagccacaagagtttgtccaggacagggaggggcctgtgagtctattaagaacaagatcctcaggggcacttctgcttttt

SEQ ID NO: 56542 - DNA, 1029 bp, Homo sapiens
tagatactgaattttactgatagcctcctcaaccttttttgaaatgattatttcatcctttgtctagttaatgttagttgtttgtaacattttccttgtaatatgctatccttgcattccaccatttggggtagtcaatttattatctatattaaatataaaattttaacaaaatagtacttatctcataaaataggctgggcaacacaaaacacaaaataattttttatattccagcacattttaaataatataaggaaattctttgaggaatttgcaaaaaatccttcattgaattcactggagccaaggatatttttgaaagactcactttgtattaaatgtcttcctttgatattgatctaaccactttcttcctattttttgctgcgttcttagcattatgaatatttagtgactatctctgattatctctgatgcatgatcacatttcctattctgtagataaaaagaaaatgccatggaaagactttctgcctgggtcaaaagttggccttagcttctcagattacattcaatagtaagattcttctttttgctaaaatcctctagcagaccatcaaatctctttggatctttttctttctttcttttcttttctttctttcttttttttttttttttctgagatgaagtcttgctctgtcacccaggctggagtatagtggcacaatctcggctcactgcagcctctgcctcctgggttcaagccattcttctacttcagcctcctgagtagctgggattacaggtgtatacccggctaatttttgtatttttagtggaagacagggtttcaccatgttggccaggatggtctcgaactcctgacctcaagtgatctgcccaccttggcttctcaaagtgctgggattacaggcgttagccactgtgcctggcctggatctttttcttaaccccctaccgcatctttgagatcatatcttctccctttctcacggatctgccttgcccctgctgctcaaatgttaattgtccacaaattcc

SEQ ID NO: 56543 - DNA, 2001 bp, Homo sapiens
gggcaacacagtgagacctcatctctattaaaaaaaaaaaaaaaaaaattagcctggggtggtggcccacacctatggtcccagtcacttgggaggctgagggaggaggatcgcttgagtctgagaggttgaagctgcaatgagccatggttggaccactgcactccagcctgggtaacagagcaagactctgtttcaaaaaataaaaataaataaataaaaattctaaataaataaaactttgtttttagcgagcataactccctaaaaatccaagaaattcagccaaaacaaagcaacagcatcaataacaaaaaaaatcctagaagcaataaattcaaagttacagggtatatgggtatcagttttcaaagaagcaaatgtatccctaaatattagggagacagaaaatacagcataaagagcttctatttacaatagaatgaaaacaaattacgctcaaggtttactgtgtgcagcacatagtaactattaaagaaaatttaaaagtacaatgagaaaaataaaaaaacatgaattcatggaaagctaaacttgactgccatttgggaaggcagaacgtagtaaagataaaaataagttactatgaaagagtcaattcaatatcaattaaaatcctcgctgcatttttataaaacatgacatattggttgtgacattcagctgcaagagtaatcaggcaagaatctcagaggttttttctaagtaattatgaagcaaatgaatagatcactgatgctaacatatttaccccaacagattttaaaacacatcagaccactggccgggcgcggtggctcacgcctgtaatcccagcactttgggaggccaaggtcggcagatcaagaggtcgggagttcaagaccagcctggccaacatagtgaaaccctgtctttactaaaaatacaaaaattagccagacatggtggcgcatgtctgtagtcccagctactcaggaggctgaggcaggagaatcgcttgaacccggtaggtggaggttgcagtgagctgagattgcaccactgcactccagtttgggcaacagagtgagacttcgtctcaaaaaaaaaaaaaaaatcagaccaaagtggcaattatcaaaaccttgtagcattaagataaaacctgaaaactcattagtcattcaacatctattcagggactatttgtggaccagctgccctgtgccaagcactatcctaggagccaggtatatagctgtggaaaaaaacagggaaggtccctagggtcatggagaaccagacaagtcaacaagacaagtcaatcagacaagtcaacagttaacaggcaggataatttcagagggagagaagtgttgtgaagatcaaaagtgatagagagagggctggcgccggaggggctgttttggatttaactatgagagaaggcctctccgaagaggtggacttttgagctaagatctctagaacaaaatgaggtttctaaaaataatttcaattgattgtatctccataaagttgcttttgggcaatgcccatctgcaagactgagctaagtgttattgtcacatagatgatgcatagaaaaacatatgaattttaactttaattctaaccttcttcttaagaattttatgttcatctacattaaacacaaagactgggagaaaacatttgtgttatatatgacaagggtttcctacaaatcaatataaaaaagaaaacaatggaaaattgggcaaattgtaagaatgacaatttacaaaataaataaataaagtccaagaccaggcatggtggctcatgcctgtaatcccagcactttgggatgcccaggcaggcggatcacccaaggtcaggagttcaagatcagcctggccaacatggcaaaaccccatctctactaaaaaatacaaaaaaatcagctgggtatggtggcgtgtgcctgtagtctcagctacttagaaggctgaggcacgagaatcgcttgaacacagg

SEQ ID NO: 56544 - DNA, 1006 bp, Homo sapiens
cagatgagggacaacactcagcacatggccattcccaagtcatttaacctctctggacttcaggcttttcactgatgcaatctgatctcttctagcaccacagcgctgtggtctgcaagctggtctcaggaactgcaaggtggggtcagatgactccaccccacctaccccctgtgcggatgctgtggaccctcttcccacgtgtgacttagctgctcctctctcccccaccttccatttctctgatctcagctggaattttgaggcagtcatttgccctgtccttgctgtccagtggctcggagagtgactttaaagggcaaggatgcttgatactgatcctatcccagccttgactctggtccttaaaacacttccccagcctggtcatcatgaagacctgtggagggagcttcacagtaatccccactcccccaagatcagatttgacacatccagctggtgagggcttttccagacatttactgtctagactggctacgggattcagcaggaccatgcccctccctgcggggctccagctagatgcaggctgggcttcccttcagcccacctcatcctctgcccatgattccctcaagccagcccaggattgcccatctttctcatccaagataattcatcctagtgtctcagatgttgtgtcaaacttataatctctggccccatcccagctctcacaacacccctgtgtcacatgaagctcttcatctgctgagtttagtagtacgtctccctttccacccagcctgtggaagagaagaggccagcgtgaactgggagaaggaattagaggcatccaggggagacaggcagaagggaaagcagggacaaggttggaggtgggaggtctggaacacagggcactgagggtcagatggagcagaggggtgcagccaaggggtagagaggtctcggctccaggcgcagtcaaggctggcagcgaggaggggagaaagtcagtggtgggtctggagggactagg

SEQ ID NO: 56545 - DNA, 1220 bp, Homo sapiens
atcatcccccactatcgtccccaattctttgcaggcagggttcattttgagacccaccccttctagttcttcgagagtgaggggaaggtggaatactggaggtgcttgtctgggaacccccagagtacagggaggtcagagctgttgatggtgctgaccacggctggaggaagaggtgggaagtgcagaggtagaggctgagacactgggtgatgtggggaggtgggaggacaggtgagatggggatccagagaggggcacagtggagtctgagggttacccacgctctgagtctttgctcttgaagtagccaatgagtttgatctcatcctcaatattctcaaacgcctgcagctctcgttcaccttcaatcaattccacagggtcctctaggacctgaaagaggaggacattgcaggaagagagtttctatcctcaagtagaaccagaaagggacctagggaaaagaaggctggggaactggaggagggggctagatgttgacagtgtgtgggtgtgtgtgtgggggattgcatgtgcgtgtgtgtgtatagtgtgtgatgtgtgcagtgtgtggtgtgcatgtgtggtgtgtgtgtgcatgtgatatatatgtatggtgggtgtgtggtatgtatatgatgtgtgtgtgatgtgtgtggatggtatgagtgtggtgtgcatgtggtgcatatgtgtagtgttcggtatgtaggtgatgtgtggcctactgtgtacatgtgtggcatgtgtgtgatgtgtgtgaatgtgtggtgtgtgtacgtgtggagtgtgcatgtggtgtgtgcatgtgtgtagtgtgtgcatgtgtggtgtgcaggtatgtatgtgcatgtggtgtgtgtgtgcgcatgtacggtgtgtgtgcatgtgatatatctggtgggtgtgtggcatgtatatgttgtgtgtggtgtgtatggatgggtgtgtgtggtgtgtgttgtgtgtgtggtgtgcatgtggtgcatatgcatagtgtgtggtatctaggtgatgtgtggcctattgtgtgcatgtgtggcatatgtgtgatgtgtgtgcatgtgtgtagtgtgtgtgtacatgtgtggcgtgtgtggtgtgtgcatttgcgtggcatggatgtggtgtgtgtgcatgtgtggtgtgtgtttgttgtgtatgtgcatgtggtgtgtgatgtgtgtggagtgtgtggtgtgcatgtggtgtgtgtg

SEQ ID NO: 56546 - DNA, 1028 bp, Homo sapiens
aaatggattacctttgggcatggggacaaggattagccttcagcccttggtctagaaagagccagacccaagatggggcatcaggagatagctggcactggatcaggcagagcagaggagggccggctgatggcgaggaggggaatggggcctaggactctccccagcccatctctgtttccactcttctggtgtggcactccctgcttctatttctgtctctctccatctctctcactctttgtcatgcatttcctttctacttcatctttcagtctctcttttcctcctttctataggctttcaccccttctagcatttcctactcacctatccaacttagtggtagccatgaatacttaggactcctgagatctgtgcttcactgtccccatctgaatattcggagctgcaattaggaaggggtgagcatccctgctacaaaagacagagtaagtttggtcggagtggcttggagattcagtggttggctgcctaccagctggtgaagatatccatcatgacattgtgcgtgaggatctgtgtgagagagtgaggcgctctgtgattctgtgaccctcttcatgcatgataatacatccacacatgatgggcacggaattgaggaagtaggcaaccagggaagcctgcagcctagggcatcactggcaatttccccaatggagtatttaaccacaaagggaagagcaattaaagctaatcgctctgacagcctggggcccagacacacgtaccactttccctaactcccagtggtctcccccaaccttcatcctccctaatttgtttagtgcactctcaaacactgtttgcacttctctgaccatctctttctctcacttcctccctctccctggttccctgactatctctagacctctctggagatgtctgtctgcttctcacacacattcctctcattctctctctgacttgggttccattcttggctgactcatacccattctttttcctctccgtttcttccaccccctcctcctccatcc

SEQ ID NO: 56547 - DNA, 2359 bp, Homo sapiens
aactcatgtgttctagcttccccattctgcctcaaaggcaaaggggtccctcacttcaactccccaccaccccactaatgactcattttggatagatgcctagttgcttggtctgatggttccttggccccaccatgctagccttgtattcagtcattagggttcgaggtgggggaagcaatggaccacccccacctttgtggagcccattttctcctttgatggttaccaggcccccactcagctctctctcctaccctttgtgctgtgcctgcagcccccgtgcccaagaataccaagcaactggctctggccccctgcccagttcccaggctggctgggtggtggggggaggggactttagatgcggctttgggagaatggcaaaaggggactgcccccccttctcgtatcgtatcaacatcctactggcactaccttcagcatggtctgatgagatcagcaaggccagatctcacctaggctttcaccctatccctctttcatgatccttaggtgagaagtagagaacattcaaggccttccttccactaagataggaactgtggctaagacagaagaaagaaggtcagatgtttgaatggactttctggatttgataaaatgtgacactagtggtaagctcaaaaatggaacttatttccacaatgagtatctatttccttttagtcagaaaagtaaagcatgttttaaaaagtaaattgtatcataaacactctgtatgcgactagaccaaggggtgggcaagcagcaagatgaccttgtccctgacggaggctgcctgcaaatcaccccagcattaggctgggaatgtggcagatcaaaggggcttggttgacacattcacattttccttcttgctctactgcaggggaactgagattggcatggtggtcacaaaataagagatacagacccagaagtccccattcccagccccctacctggaccagaataaacaagcctcccttggtggcaggcaccatgacacaggcagacaatgagccagacaggagggctaccatgacccccgcaagaaacaggcagtcataggcatgctcagttgcacacccaggtgcaaccagacagaagggcccagcagtggccctgccaggccgggccaggaacaatgctctctgactgtcagcaccaggaactgtctctgccttgaaatctaggtcacagcagcaagctctggagcccaacccccctcacttcactgataatccaaggacagaaggaggggggtacgggtgagggggatgatggggaggggactagagatggagataagaatgagtaggggggcatgagtacaactggaagggaaagcgcagcaggagacaagaagaccctgccccagtggaggaaactctggggccaagccctcagctggaaaagggggcaggattgggggttatacttccctgctttcatatggaaggagagtttgtaaatattacagatcctgcgggaggaaagagtgcatctgtgtgtgtgtctgtgtgtgtgtgtgtgtgtgtgtgtcgggaggagttcagatttagggctttgaatctaaaacagatctacagaggaggtaggcgggaagagattaatgtgtgtaacacactcacccacaaagacttgggggcagtgggtaggagctttctaagagagtgaaagatacaaggaggcccctaagagagatgggggtaggaatgttaaagtggcagaggagaaatgtgtgtgtgctcggatcttatggatgctaatccccgggttgtgggcacagctctggaggaggcagtggctgggtatctgtgggtgtgtttggatgttctggtaatggaggtgtatgtgccagcactggatatatggctgtgggtgcactggctgtgagtatctgtcatgtgtgtgtttgtatgtgtctaaaccagccaagagcatgtgtaagaaggcatataaccacaggctcacatccagaggggtgaggggagcctacagaatggagaaagagagctggagttgggagacagaaagagactaaggctgcaaatgaggcatggggggcgagggggaggagagcatacagtccacaactatagaaggctgtagcctcatctcatctgttactatagcaacctcagttctgggtgccccccacccccagtcgttaggatgacaccactagatgggaggagtgtagggaatggtgagtaagaagggacagaaaggataggaataaggccccctgacggtacaaggaaaggcagcccagttgcctcccttcttggagagatccatttgcctaggccttagtatggcagaagaagcaaagggagtgttgtttagggga

SEQ ID NO: 56548 - DNA, 1093 bp, Homo sapiens
agtcattcaggctcagttcattcagcaaatagagatgagctcaaagcttttacatccacaatgtgtacccctctatagcaaggcagaagagaggtgctctaagagtatgggggccttagacatttttcactgtgcccctcatcggtaaaaaatgttattcagatactcctgtgctattatcacatatacaacagaacataaaaacaatctaaaaatagtaaaattttaagtggcaaaaattgggaagaattctagacaataaaaatggaagaatacctgaatgaggggagaactcgaagtgtaatctaactggtaaatagtaatactaatctttgttaagcattttttaaaaactggtaaaatttaaaactacaagttctatcattttcttatccactttgagagactactgcttggggagtgggatctatggattagagtaatccctcacagctggaggctttagggaagaattggtgtttaagatggccctgaaaggtgagtgggatttctaaggcaagatccaaaggagggcatgccaggcagaggaacactgtcacagagtatctagtgtgtttggaaatgcaatcagtcctgcttggcttgactaggatgtagggtgtttagaaatggctgggaaggtaaggtaagactgtgttgtagagagcctgggtattggataggtgaggtgagtgaactcagggcccttcagatatactattctgactgctgtgtggctggcagggagaacgtataaaggaggacgtgttacagttagactgtatggcaacagtcagaggggaggagccagggaagaaggtctaagggcatctataatctcctggaattggccaagccatggacatcgtccttctggtggtgtccataccttctctcatttagaataacctttctcaccaggcccagaatctctcctgggttgcctagagattccaccctgctggtcctacatgtgctgtcagcaaattctgatacttacttggatggaaagtggaaaaggatgggggtgggggtggggtatctggaagtcaagttgatttttcttttgtcccctccccacaacatatgggag

SEQ ID NO: 56549 - DNA, 1068 bp, Homo sapiens
acacgcgcacagtaagggggttaggaccaggttagtaagtgggtagatggtgggttgcccttgccccctctcctggaggatgggggaagggagtggtctgatgaaggtccaaccttcctcctcttcctcccccttgctcaggccttcttcggtgggggagccaatttgatgatctcttcctcagagggctgccggataatgtctgggggcaaaaaggtatgtgtccagggacagcagtgtgggagatgccaggcaggcccattgggcatctgcctccactctcccaaaactcaagtactccaaggatagtcaacgggacgaggcagaggtgcagctagttaaaggagtggccgcttacctttgtacttcttggcactggggatacgggttagcttggtgtccagctcatcctcctcagagatcttcagcacacgggttctgtagtcaaccaccatagtgagtaggtcaggacggcgggagatctcaaagatgtgctcaatgtaggagaggttgtctggaggaaggcaggagatagggtcagagctaggctgtagaggtcagcttcccctactccaccagactagtgacctggaaccaaagctgagttgctgacattggttatgggagggtacaacactggaggaagaggggctactaatccaggagaagaaagctaaggtacccaaacaacaatacagaggactgttcgcaggaagggcagatagttggtcagtgaagtttctagattgtggttagaatgaggggtttagcttagatactagctcccatatgttgtggggaggggacaaaagaaaaatcaacttgacttccagataccccacccccacccccatccttttccactttccatccaagtaagtatcagaatttgctgacagcacatgtaggaccagcagggtggaatctctaggcaacccaggagagattctgggcctggtgagaaaggttattctaaatgagagaaggtatggacaccaccagaaggacgatgtccatggcttggccaattccaggagattatagatgcccttagaccttcttccctgg

SEQ ID NO: 56550 - DNA, 2087 bp, Homo sapiens
cacacatacatacacactctctcactctgtctctcttacctttagctgcttgatcattaagccatccaacttcatgccagttcccttctttatagaagagtgaagggaaagacttcctgggtttgacttaaaccttgtccacctcttgatattttaggattgaggaataagtcattaatctaaggactgattacagtggctggagcttgggcacttgtcttatcactggtcactgagtctgaaagtcccagctgaattcttgcccttaagtgcttttgctgctatttttttgcccccagttccacaagatccaaccaagaattctgtatcctgggacagtcagattcttctaaatcaggccaggaaggaggggaaaagagtgagagaatggtattcccagatacttcttcctcctgccccttttcccagcagctctgagaccagatgttggctgctgtacttactccctgaggtagggaatgtgtggtgatcgagtggtctgtgttcctattgctggtggggtgatagggtgggctaaaaaccatgcactctggaatttgttgtattttctcccagtaaagcttttcttctcccgactgctgctctgtgtggtatgtggtccatttattcacaatggatggtttttgttcctactaatgtaggtacctagccttcccctctcattctgcacatgatacagtgttagaaagtccattttgggagacccgtatttccagtgcttgggctccaattggagactgttggaagtaggatacactccatttagctcagtgatacttaggagattgggtggggtgagggtatacacttggggtattttcccagcccttattctgggccataaatattgttccccctcccttcccagtgattcaaagcctgcaaaatcctggtcactcacagaaattttaaaatcagttagttgcaatacaatcaatcacctttattccgggttagaacaaggccgtgcacactgcagacagaagagcacaagataggggcaatctcacagcaatataaggagtgggtgggcaggttagtctttttagattattttgccttacagagaaactactagactctgctgaaaagaaccctgtctctcttctcccatttcttccataagaaaggctccttattctctctctcactctaatgtaacatatcccaaatggaaggacagttcatgctcattccccccacccaattctacaagtatctctctcttcttaagggagaagccagacagggaaagggagacttgggaaggtcctttaaggcaaaactgtggagtcctagaggtgtgtgtgttaaggcaggtgtctgcagcagtggccagaggggcagggcacgctaggctgggctaggagttaagagtactgtctaaccagtctggcttcttccttcttccagcagccagccctcccctcccattaaagttttactcccacatcctaaaagctcctaacttgaactttgtctaaatagtctctgagactgcatgtgaatttaatgttttttgaaaaagccttcttttttgtttggactatgtagcaatttgattctgccactcccttcactgtggcattcccctcccacccccgctctggcctagacaataagttaatgctagacaccacaaaaaagggcagacatggcagtgcagttttaatatacatatatgtagaatatatatgtacacacagttagcacggtcagggtggggaggggcatcttggggtaggcaggaggctggggtcactcactgtactgtagtgatgtggctaggaggtgttcacaagcccagggggccaggatatctagtaaagaagggtttcctaagtaagtcccttccgggattgaattggggtggggatcggtgcaaaggaaaacactgtagttaacttctttctggcttgggatgttcttcaccaaggagagagggaaggttgcctacaataaccaagttgggaccctatagatggtggtgtcaggattcgtgttaaaacctaagggtctcattcttcaacctccctaggtttagagtgcaacagtctgagtaggaa

SEQ ID NO: 56551 - DNA, 6210 bp, Homo sapiens
tcatggagggggacaagggaggcgtggtgagtatggtgtgctgagctggctggctccctaatctctccagtcattaaggtaggttttagcagggacactgaattctcactgtgactacatgataccatgttttagaggtccagccagccataaaagactagttagcctggaggtgctgagtttttgatggagtattttcttcctgttcctatcttctgtccctgtaaagcacagtttattgagacaagaaagggatcttagggaagaacctctgtcctgtcctgagtgatgtaacttatctctagacgtgcaccttttccaaatgaaaaagcgttagtgttcagggcgtaccctcctacacaaggctaaagatttctccatgtctcttccctttaaactaaactaagtagtgatcttggctggatcttagattagcagataaaagctataaagagcattttttggacagttgggaaaattagaatatggtttatacattagataacatggtattcaatattaaattgatttgattacttagaatattcttgtacttaagagatacatgttgaagtatttaggggtgaaatgtcatgcgtacattcaaatagataacaaacacatatacatgtgtacatataaggagaacgcaaatgtggcaattgttttttagtagctgagcagtctgcttgctgtataacccatgatcgtatcatagtctgcctggcctttgagttctgcagccctctgtggagttagggcaaaaaggaagagtgagaatcgagttagggaatgaagagcaatcagctcttaagatgtatctggttaaccttatctttttttttttttttttttttttgagacctagaattaggaaggagttcaatcgctttctgttacaaggtttttggaccacaggagatgggaaaaacacagtttggaagactaaattatactgattgcccagaatagtctggttatccaaggcctctaaggaatgactgagacagctaagtctctcttcctttttattccttcttagctgtggggaacttcaaagagcctagccatctcttgatgaggttttttcagagagtggttttagaatttagaatggttctttgcaatcaggatcccattccttatgtttttcttgccctggtgaaagggtatttcaaattttcttctggtttcctctaaatttcagggacctgggacctgcatagatctagggtttttatggtttgaatacaaatggagaggagtctagaagttcaaggtgtgtctcactcttccctgcttcatttccaactcttccataggtccccctgtgtcatctgcagtgaacaaacccaaaacacttgagtcttaatgggaattatgcaataggcatttagagaaaggaagtcagaaggggccagtgaattttttcttgacataagctattgccttgcattctgttccagagagatgcagggctgaatgccctctcccaggccagcatttgtccattctccaaaagcattctgcaggccagtttgcttttagctcagccaatgccagggtttgatgattaacccatttgcccaggtgaggaaggcatctacttgggatgggtgggccccaggcctaagttttagtggtcctaagagtaaatgagtagaataagagatatagaggctacccctgaagcaaatttccttacatattcttgtctctgtgtaagctgaatgatcgatgtggtcttttacttggctccctctgctctgttttttggtcctaattttccagcagtgggggttaccaggcactactttcaatgtagtagactcagcagttctatatcatgcaaattgtaaatgtagagtagaatgtaattgtaacgtagaatgttagaaccaaagatcttagaagttattttctgccttgcccagatctcctgactgatttgaggatcttttctttgttcccattcagcttcacagggacaagggttgggggtggtatcagaggacagccccttagtctcccaagagcactttgatgcttgatcccattctctacattcccccagcccagtcatctaaggccagagctcttttctctgctcaggcattattgacaggataagtcctggcattcagacaggtctggtgaagtgaccaggtactctggcccagaagttctctgtcggctccccccgcaggctccaattcaggtactgtatgttattctcttgttcctcttgccactggctttttccttagtcttaagttccaaggaattgttcccctgtgtttttttattttcctgacttattcaagcagagctagctcagagtacaggtctgtaacaagggcttattaggagatagatgaaaaagtgcaggtttgtatatgtaagttgtccattactatagatagatactattccaggcattggactttaactgcactgcctaaaagagcccaaagataaacttcacaataggctgatatgtggaatgggaggaggagataaagaacggggtttctgttttattcataagctcagtcttagcttcagtcttttctgagcatttgtttatttgtaagatggaagtcaaagtaagtgggaagtctgtaggtcagctctattttccatgcctgcccttgacttctcctcagctgttctctgcctgtgcaggtgaggcagcggaggtggttggtccagagagaactaaaagaagttgttttcttggactataggtccagctgcaaggcagggtgcctttcctatgtgttcctcttttcactaaaagactcaaaatgctttagcagctagatctggaactaactcttctggatggggtaggaacttccctgcccttcccttagggaagctcatgtttccaagtcagacagcagggggcattgggtgcctttcggacagaaggaagctgcctaagctagaaggcctgcctgctggagtttatttcttttgccttgttcagtgaatttacccagagggtggctgagattgaggctttgggagccccaagaagctgcttggttttaatgtgctgccttatagctgagcctgttgtgctcagggcaagtagtaggatgttccccctgggatgtgcaaggttctctcaagcagacatgagcctccatcactcccaccactccctgcaactcagcctcctcttctcagcctgtgccttcctccagttctagtaaacactgccaaatgaatatagttctccgactcttctctgggggttcattggcagctgctgctttcttcattttttaaaatttatttgccacttggtgaaagccactgagatggttttttccagccttgggcaagttggagctttggaatctggagtgaatgaggtcatctggatttcattgtcttcttacgaagccagcagtaagcttgggcagtccactcacccacccctagggccatatctggggatgaagccacccccgacctatacataggaaatgattgatgtgcctggtcttatacccagtctgtgtctggtttctctaccctcagtgccctttggcttaggctcaggatgggtgggcctcccttccccagcagctgcctcagccctgatcaagggcagttatttggctcaaggtgagtagtggtttttaaaccctactcccacacactgctgagtctgtgttttcctttcttcctgaccaggtaaactgtcttgagccccaccctcacctgcctgtgctggcaaccagtggcctagaccatgatgtgaagatctgggcacccacagctgaagcttccactgagctgacagggttaaaagatgtaagtggctgactgcagaagttattttctttctgcttatccacatactgttgattcttattgtcatagggaggaataacttgctgcccagttctttaaaggcactgctctaacaccctcccccacattcctgtaatttcctctgtaggaatagtcctgctccagggggcagctgtgaagtggcactaatttgtaataggatggggataaggagcatctttaagaattattctgtattaaagcctgctaccttttcagcagctgaacctagggcatcatttcctaatctaatgtagctccacttcaacttaagggaagcttttattgggataggagatcagccttcttgatcaggtcccgggttcctcttcattgctgccccctcttcccaacctttttgggttccaggtgattaagaagaacaagcgggagcgggatgaagatagcttgcaccaaactgacctgtttgatagtcacatgctgtggttccttatgcatcacctgagacagagacgccatcaccgggtaagctagggttggaaatgaattcccaagggagtgacccttttaagagggctaaaaagttccagagtagtgacttcaagcagtaatcaggtgatcttggtcggatttcctatccactgtcctctgtccccatcagatccctgatatagccttggaagagacatcagcagaaaagggtggtatctacttttgtccattgccgtccatgtgtaatgctatcttcataaaggcaaaagctggagggtggaggagggaattgagaagaaataacaagtctcagtgtgacccttctatttttcctcttatgccaaaagaggcctagttcaggggttggcaaactggcagttggcctgctgctggtttttgtaaataaagtttcattggcttgcagccatacccattctgtgtattgtctgtggcggccttcacgctacaatgagttgaatagttgcaataaagaccatatagaccacaagtctaaagtatttactctctggccctttaagaaaaattctgctgatctctggcctaaagcatctaaattctggctaagacctaacaggcttgtccttgttccatccagggaagttactaacaagcctttcccatccacagcgctggcgagaacctggggttggggccacagacgcggactctgatgagtctcccagctcctcagacacatcggacgaggaggagggccctgaccgggtgcagtgcatgccatcttgaggcctcatacctaggtggggcaggctggggctgccaacctgatcctgcctgggcaaccctttcctgtcccaggccctacattcagcagaaacgcactttggactttttgctttagataaaagaaagacatcccaggagaaggacaaaccagaggagtgaaccaacaaagagtacctaggaatgggagttgagccctggaatggggctctatggagaggtgcataggactcggcagaaatggcctctccccaaagcctctttttgagaggagagggaagcctattttgttaactggtttgggatagggaatggggtttctttttctttaatctcccttgtttcttgggctgggggaggggtggggggaacaactggctattcagtaccaaggggccagagtggagggtaggagtgccactctctctttggtttaggtttttgaccttttcttcctttgttttttaaaagtttatgacagttggctccccccccacccccagcaaccccatcccagaatcctattttcctgggaagtccttaaagcccctaaccatcccacactcttcactttcctttccaccttattcattctctgtacttaccacagtattttgcacttgattacatatccttcactctcttctcttcatcccatcaccccctaaataggtcaggtgagggaggctgggaagaggtgggaggaggggcagaagtgaaggaagaataggaaggatattacctcttctgttatttttttaagaaacattgtttggtggcagcaatctccctgtccctatcactgttagaggcctaattttatatctataaatatattaaaaagcaagtcaaacttggatgtatcaaggtaaaattattgtcaaagtttaaatacctatatattctctgaatgcaataaagggacttaagagtgaacaagagtaatggtgtggaagtgacacctggggtcagtttacctctgtgtatggtcactagagattgggacttaccctttaggttttaggaggcttgagaatggaaggatcctcatttctgcccttcctggttccctgctttggtgtaggggttgggaaaaacaggaaattcctctcagctctgcctcagatc

SEQ ID NO: 56552 - DNA, 1101 bp, Homo sapiens
gaccttatacctctaggaaggaggagtaaacaattcttttagatgaggcagaagaggaggaatggtggtagtaactagcccaagattggcctgttttgttccatgtctgtggttcccaaactttggggcacattgaaatcatctgatgtgttttgttttgtgtttatgagacaggatctcactctgttgtccaggctggagtgcaatggtgcaattatggctcactgcagccttgacctcccaggcactgcagcctcaacctcccgggctcaggtgatcttcccacttcagcctcgtgagtagctgggactacaggtgcatgcctctacacctggctaatttttgtattttttgtggagatggggtttcaccatgttgcccaagctggtctctaactcctgggctcaagtgatccgcctgcctcgacttcccaaagtgctgggcatgagccaccaatcccaatcctggtgttcttttaaaaataacagtttggccttaaccccatatattctgatttaatagggatggactgcaacttgagcactgagatttttaaaaactacccacatgattctaatgtccaggaaagttgaggaatcatttctctattgttaccactcctagcagatacctgtcatgattttgtcttggagatagcagttagaggttagttttattttttttcctgagctggtaagaagggagggaaaaatctgttcttggatctcagtacacaggcagataaaggaagggtgccagtctcatggccaatattgtactgaccatagtcattggaactcttggcttcttttactgattccggagagtggagccctgttaatggtagcaagcacagatcacttgcttctcgaggcagttgtggcatataccttcatcagtctcagatcagctgatgacccagaaatattgacaaggtaccaatgaagtccacatatcaaagataatcctaggccataagacagtgctgcctaagagtaggcagagctgggatgattcagggtgggacaggtaagagattagagaggcctgtggttacttgatagggtataaacttgagagactaaggctgctgctaaagga

SEQ ID NO: 56553 - DNA, 1630 bp, Homo sapiens
gccagagaagtctcagtggtgagttgagaaccaaaaccagattaggatggactgagaagtgaataggaagtaagaaagtggaaatattgaatgttgattgttcttttcagtagtgtaactgtaaggggaaggagaaaaaaagcaatagtaggaaaggacagtcagcagaaggatttttagaaagtggccagctggtgatgaggaagaggttgagaaattagataatcatcaaacaaggtccctggaaggatgaaatgaaaagcatttttcaagagattggctctgagattggaggagactgggtgagaacagatactggatctgtcttgttcctcactgtatttctagcacctagcataatatttgacacataatatgtgtgtcctcatgagtttaaagcttggattagagagaggaaggaaggtgaaggtgtagtgtgcttgataagaatgaggaaaggagagggagtcttgaggatatgggtggtagtttttaataattattgtggggtatgagagggagaacaggccaaatacagttttaaggagggattacagacccattgacttacattaagcatggtttctgcccgtgagtaacctttttcggtaggtaatgtacatgtaaaaagctccatactaatgttagttgtttcagtgaaaagtagcagtatgtgatataaaacttgaggagagagataaaccacttcaaactgacagaattgaggattgccacttaaaatgggaagtatgtggataaaggatttaagggtttgcctggccaacagatgaaactctgtctctactaaaaatacaaaaattggccgggcgtggtggtgtgtgcccatagtcccagctatttaggaggctgaggcaagagaattgcttgaacccatgaggcggaggttgcagtgagccggggtcatgccactgcactacagcctgggtgacagagcaggaccccatctcaaacaaacaaaagatttagggtttggaaatggattggaaaagggatgccctttaaggaagagcacaaaccaaaagcttggtttggaaaatgttgtttatctgcatccagctggcagtttcctgccactacatcaaattgcagctcttcaagggtttcgtttgtacatttttacattttcattgcttttccaactgtaggatttatgaccagaggaaaattgatgagaatgagaacaatggagtactcaagaagttctgtcctcatcacctggtaagattcatgaagggccagttgctgcaggcttccctgactcaaccccaaggctgcacctgaacttgttggtatggtgggaagagcttggactttcaagtcagtcatctggatttgaatcctggctttaccacttaccagctttgtgatcttggcagtcacttcacttctgatagcctcagttttttaatcgacaaaatagaaataaaaataactgccttgcaccttgatggtgaggcctaatgagacagtgtacataaaatggctagcacatggatgacaaccaaaagaaagccccaagatgctaccccctgaggtggtcatgtttcatcagttgtactcttgtctctgtctgtctttctcaaatctctgggagaagatataggggagt

SEQ ID NO: 56554 - DNA, 1937 bp, Homo sapiens
tagccatagatttttttttttagacagagttttactcttattacccatgctggagtgcagtgacacaatcttggctcactgcaacctccgcttcccgggttcaagcgattctcctgcctcagcctcccgagtagctgggattacaggtgcacgccaccacgcctggctaattttttgtattttcagtagaaccgaggtctcaccgtgttagccaggctagtctcgaactcctgacctcaggtgatctgcccgccttggcctcccaaagtgctgggattgcaggcatgagccactgtgcctggccaattttttttatttttaaataagaagctgttgatcaaaaagggttgtagtttgtatagattttcagttgctacctcctccaagttgagcattcactgaaattttgagttgagagttcctacttagagctccagattacttgaaaagtctgtgtctctaacaaattccaccactaggaccaagatgtttggaggggaatgtagtagtttgctgtattgagaactgtattcatatgtatgtatgtattcatatgtattcatatgatatgtatatcatattgccttaacccaaagctgatactttcccagggttagagtaaggcttagagttttagcatttcaacacaaggagaaatactcaaatcttctgtgtcttatcagcctcaatattcctctattggctatttactgggcagaagttatgtgaagatttttgttttttttttgagacagagtctcactttgttgcccaggctggagtgtagtggctcgatctcggctcactgcaacctctgcctcctgggttcaagtgattctcatgcctcagcctcccaagtagctgggattacaggcatgtgccactttgcctggctatttttgtatttttagtagagatacggttttgccatgttggccaggctggtctcgaactgtcttcaagtgatccacccacctcggcctctcaaagtgctgggattacagtcgtgagccaccgcgcctggctatgtgaagattttgaggcacgctgatcctacacaagcaggtagccctttcagcactccagctcttctctgacattaggttacactcaacttctctggcacctctcctgtgcagccaactgaatgttttgaggtttctcctttcttattcttcctttgaaagaacccaaacagctcatcttctggtataaatttgaaaacatttttgctgaatattatatatcataacatcattaactttcactcctagcctaaaggaattacttcaagggaatatagagaaatagcttactgatcctcaaggcttttgcatcattaatactgaattttagtttagggttattaaaaagtatttaagggaagctctggggagacatgctttttggcctgtggccaaaaaaaaaaaaaaggtaagtagaggaggtataggtgtgagtccctactacacctgctaagctaagctaattcctgcttagcttagttttaagaatttataggggtaaagaaaaagagaatatatcaggtgaatcctttagtggtaaatttggctgacatgaaaatttattgctaaaggattaagtataggccctgattgatgaagcacagtcagtaaatcatctcttcattccccagttcttaagccaacatcagcaacactgagagaacattagattaaaggcaggtatagaagagagacttagggtaacaagttagtgggtgcctgaaggcatgtgggaagagatgtggtaaaggtgtgcacactattccttacgtgacttaaaatgtcaaggggcttggtgtggtggctcatgactataaaactagagcactttggaaggccaaagctggaggatagcttgaggtcagaagttcaaggccaacttgggcaatatagcaagactgtgtctctacc

SEQ ID NO: 56555 - DNA, 1014 bp, Homo sapiens
attaggggatggaggtttcccctaatgacattcattttcagtgccctctgtattttttttgtttgtttttaattttaaaataaatagagatgggagctcactatgttgcctaggctggtcttgaactcctggattcaaacgatcctcccacctcagtctcccaaagtgctgggattataggcatgagccactacacctggtcctctgtattcatttaatgaaaagctgcagagatactaagtaaaatctcaacactttgcctagaacagttctaggctgaagtgactttggctatgcagaaaggatgctaaaatcatttctttacaaagaaacttgttgtcatggttatatttctttctgtttccatagcatcagaaataaataaaaccttagacttaaaaacaaaaactaaagccaagcctcttcctatagtttcttgaagtctttcctttgctgtaaatttaccaatcttcattatgtcatatttgactaattgaatgcttagatctgagaagaatattcctcatgccacccttaacctggaacaaattatggctgttttagacagattattctggatttcttcagtgaaaaatttatcagttttcagtgtgcatattttaagctgggttttttatttttttactttttgagacagggtctcactctgtcacctaagcagaagtacagtggcaagaccacggctcactgcagcctcaactttctggactcaaggaatcctcacacctcagcctcctgagcagctgggactataggtgcatgccaccacactggctaattttttataacaattttttttttttttttgagacagagtctccctctgccacccaggctggagtgcagtggcacgatcttggtccactggaacctctgccttctggattcaagcagttcttctgcctcagcctcccaagtagctgggattacaggtgcataccagcacgcccggctaatttttttatttttggtagagacggggtttcaccgtgt

SEQ ID NO: 56556 - DNA, 1056 bp, Homo sapiens
tgtggaaaacaaacaaaaaaaaagcgaaaaaattagccaggtatagtgccttgtgcctctagtcccagctacttgggcagctgaggtgggaggatcacttaagcccacaaggttgaggctttagtgagccatgatcatgccactgcacttcagcctgggtggtaaagtgagaccctgactggaaaaaaaagaaaatgaactctaatggctgatgtttttctttgctatctgttcatatctcttgaggacttagttgaaatagcaaatcaactgtcctttgactagttatagaataaacaaaactataaataattcgcatagaacaagagtaagtgggcttagattatgtcctttcctgggattttatgacaaaaaggtagacatttctctttttggaacattttaagtgcagcccttcccaaagttataggaatgaactagatgacctctaattctaatatttagaaacctcatgtttttcctttttcttcttcagttggcactggaaccagactctccctgtacgttcttatctgcaggtgaagatgcagttgttttcaccattgacctgagacaagaccgcccagcgtcgtaagtgtagcagtaatatcattacagaactgtatctcttagccttgaacatattccatatgtcttggtaatgcctaactctggttcatccgaatagtacctttgtgcctatggttaagaggtagtttaaggttaaggggaattccttacttcctctctttctcagtagtgaaatactattcagtctaccttcatttctcaaacagtttacttgttatatgtggcctttaataatttgatgatcttttgctctttattcacttggatatcattcatcttacccacagaaagcacattcttccacagactcatgtagaggtacagtcctgtaaattttaaatttaaatacatttttaatttagttatttatagaaacatacaaacataaaatttgaacaaaaatactggtagctgtagttgagttctgttttatcacagttcatttgtatgtgaatctgagactca

SEQ ID NO: 56557 - DNA, 1056 bp, Homo sapiens
agaaacatcagctctaccccgacctcgctggcaagccctccctgcccttcgggagcgggagctgggttcaagtgcccgctttgtctatgaggcctgtggggcaagagtctttgtgcagcgtttccgcctgcagcatgggcttgagggccatactggttgtgtcaataccctgcactttaaccagcgcggcacctggctggccagtggcagcgatgacctgaaggtggtggtgtgggattgggtacggcggcagccagtactggactttgagagtggccacaaaagtaatgtgttccaggtgaggcaagggagcataatagcaactgagagaatcaggcatgagttagagaaatctgaactgcagcatggattgggagctgatagtgagttattgtaggaattacatatcgggacatggccctactttggctcccctaatgacctaaatacactgaaagactcttggcaaccctagattccttgagcatgtggactgttggaagcctcataggtagggtgcatgcagcttattaaatgtgtgctggtaggaggcagtgtagtataagcacaggctcttgaaccaaactgcctgagttcaaatcctagcccttctgcttactagctcagtgatcttggccaagttattttacctttgtcttcagtttatctgtaaaatgggactaataacacatagggttatgaggattaagtaacaatagaagctaagcagttagaactgtgactggtacttaataaacatttgataaatgttagcttatactgttgttattctggaaagattttactccttggccccatctactgtactggtaccagccatttatcctaagggtgttctcttttcttccctgacattccccctattttcctttttctttgtagcaaatttatatttactttcttaatcaaagtagatttttcctcctctattccttttctcctctgctagatacagtcctagttcatctgagctcttatcatgtgccagttcaatcttccagagccaactgaaatgctctcttacatcaaaggaag

SEQ ID NO: 56558 - DNA, 1058 bp, Homo sapiens
gtggctcatgcctgtaatcccagcactttgggaggccgaggcgggcggatcactcgggagatcgagaccatcctggctaacacagtgaaaccccatctctactaaaaatacagaaaggtgggcatggtggcaggcgcctgtagtcccagctacttgggaggctgaggcaggagaatggtgtgaacccgggaggcagagcttgcagtgagcctagatagcgccactgcattccagcctgggcgacagaatgagactctgtctcaaaaaaaaaaaaagaaagaataataataataggtttgaagttagtcatctgagtgaacagaaagctcaatctcttcccccaagaggttgatttctgttgatttgtgtgtaaaatgatactcagaatctgacccacctctttatgttgtgaaaacaagtgttgtacagagtttgaggatacatatgtcacttatttacattggaagattcttgcctagggggcaatgctgaagttagctttatgtattgagttgagactcttggcttgcagtacctgtcatttgatatgtgcctcctgttccaggttttattttagttcccactttcgcatctgaaaaatcactgccagttactcagtgagtgaagtaaagagatggcacttgacctccccaaaaatatatcattatatggattttaaacatagggaagaaaacataaggaagaaaaaatttcacaagctgagaagacctgttaagcatgcatacacaaatcatttttataaaaatgataaaacctgtacattgttaaatctccttgtccctattgtcttctttcccaggtggtttcctaattgttttggtttcttcctctcccaaacccaggctggctacagcaaacatcattcaagatgtccagcaaagggagcagcacagatggcagaacagacttagctaatggtaaggggccaaaatgaaggtgaagctatttttactatcaactgaggttgtcctcctccctgcaagatagagtggaggcctggattttagtggagagagggaaactttcctgtgttgttc

SEQ ID NO: 56559 - DNA, 1007 bp, Homo sapiens
gctgcttttgaattctctgggagtggataatagtggggtgaaacgtatggtaaagagttttgattatggaggtgggaaaacatcagatctgttcttcatgttacactggtctgcttattaccttagtttataagttttttttaatttttttttttgagacggagtttgctcttgttgcccaggctggatggggtgcaatggcacgatctcggctcaccacaacctccgcctcccaggttcaagcaattcccctgcctcaccctccctagtagctgggattacaggcatgtgccaccatgcccagctaattttgtatttttagtagagacagggtttctccatgttgctcaggctggtctcgaactcctgacctcaggtgatctgccctcctcggcctcccaaagtgctgggattaatcttaacaaagtagtacattttccccacttgataggaattaatataattttaaactctagatggagaagataggctcctattctaaagaatataaacaaggactgttgagagggaaaaacaagtgctgtgtgaggaatgctatacaaaactgtctacctcaaaaatgaggaaaacaaaatgcattgcaaacagcttctcactatttttcttcatgttgcttcacatatctgttttttgttgccattgtctttcatcatcacccttccaggtgtcccttcctgaagttcagtcagcttcagccccagtcttgcagtatttctattcccaccttggcctattatgaacaatctttgggctactgtcttttgacagaggatacttttaatgaagcagcttagatttctatagagggtagcggaggaaaagataaggatgaggctgcttctggaataattgtcatgggaatgaaagggctgttgaaagattagaggccagtgtgcctgggtacaaggactggggtcataattatactttgtcttttactagtgccttttgtccaagtcactgaaagggcttaataaaattctggt

SEQ ID NO: 56560 - DNA, 1340 bp, Homo sapiens
ctttttaaaaaatgatagatacttttatctcttgtatcactcatttttcctaattgattaattggctacaaatgggattgtgactgccttgtttatatttgtagcttctaaattgcctggtaccaatgctgttgtgtaacagcatgtttgcttacacataggccactgggtggtgccagaggcttgtgatttgtataaaaatgagtagcctagactcccagctagagtctacctgctagagtctctctgcagttgggttgtttgtactgtcagatcttcagcacagtaggaatagagattaatttttctgttacagaaacattcagtttctttctgctcatctgtccagcctaccagaggagacagtgtcatatgttggacccctccaagtacttaatagaaaatagcccagaactaaagtcctacctaccataaacatgctttatataatgagtttcagcctctttggggtcatcctttgagtttcagtgcctgaggttctctgattaataaacactatacggccaggtgcagtggctcgtgcctgtaatctcaagcattttgggaggccaaggaaggtggatcacttgagtccaggagttcgagaccagcctgggcaacatgttccccaccaccatctctacaaaaaatttagctgagtgtggcagtatgcacctgtagtcccagctactggaggggctgaggtgggagcatcacttgagcctgggagatcgaggcttcagtgagctgagatcacattactgaattccagcctggacaacagcgagaccctgtcttaaaaaaaaaagaacatctgcaaaaccactatgctattagagtgtggaaggcaagtaggcttggagaagtaagtgtttcttgtgaaggagaaatattaagaaaagtaaaataaacttaaaatgagccatttcatcttggaaacaaaaattggaggtggagaaagtagaactagttgataccagatggactgtgggacctagaaaagcaaatttgtactttggatggagatcaaccctgaacagctgctcatttatgagtggtatgggacatctgtcctcccaagagaaacttgggactgtgtggctctctgtcttaataataattgaagtattttcttatcaccttcttctttcagaggaaattctaaaaccttgtctcatttaaatatgggtgtttatgtaggagagttgggcacttgagtagcagaatgaggcaggcactggtttgagagaatgctgggattatataaaccatgagatttgacagaccgaattcaggtcttagtaaagggatcaaggacaataataatatttacacgttga

SEQ ID NO: 56561 - DNA, 3800 bp, Homo sapiens
ctgtgtctcgttccggctcggcctgcgccccccctcgcttcccagccggtttcccctaaggatgggcctgacccgtatcccaagctcttagcgctcaggtcttttccttccgccgacccgaagtcatcgctgggagtactggttgccctttcctcaggtcagccctggtgttgcccccaagagccagccgcacagttcacagggacgccttgcttcgttgggtgacccatgtgtgcgctcctatttctccccttagattgagggacacggctcgccctgcgtctccccgtcacctcagggccaccgcgcaatgtgtccccctcccccatcccaagttcccaggcccagcaccttgtacggaaggcggaggtccaagaattccggagtcggttgttgtcttgtggtcttgtaccctttgtaatataattatcttagtttacctcctctaactcccaaatcttttaggatatcttagaacggtcccatttggtccctgttagttggaaagcatctggtggcttgaatttctgactcatgattgttactggagtctctgtaaacaaaccggcactagcgctatcacattctctccgggatttccccccctgctctgtggcttcttgttgagaggttgtttggttatggtttagcgttgaaaagattcaggttatccttttaaatgactttacgttttagtggagctgggagattacttgcctggcttctaatcttcatgttggttcattttatttccatatgtgtgtgggttatttgttcagtaattagaattagataaagtattctgcttttaagtagttttgagaaggcctaaaaatactaaagtgtattcataaatatttttattatgttcagtagaagacacacctttgccatgtaaattttaacttttctcagtccttcagtgaatctacagacctattttctcaggagctcagcctggccttacttcagtgataaaaggaggaaaggtgagtgggagttggaggcattaaaattcttgagttcaagacagactgcgctgatgctcaactgctgaccactaaagtcataaaattcctaccagtttcccaaagagcttgagtgttgttcttggctttgttccagctctggttgaattacttttacaagtttaattgtctgtgggcttcttgtctttctgtcctaaactattgctgtgtatctccaaatgacttaagcctagaagtgaatgtgtgccccctgccccatgtcttcttttcttctttattcattttccttgtattttgtctttgtgtcgatcatattttttacgttgttaaaaactggaacttagtttgcctgagttctgttcatcctgttgtcaaatcaggtctcttcccctctcacagcttcgggttgtcatcccttggtatttagaggagaatatttagctgcttgtgactaaaagctggggagtgatgagtgatgctgcctttagttggtgtctgagtccagtctatttcagaattccgactttttaggatatagtgggaaattttttgtaaaaaaaaaaaaaaaatagtggctgctctttcttttgtagctggtctgaagaattcttggttagcagaagaaacatcctgggcattcagcagcatgggttggtgccaaaaagggagtcagaacatacttataaatgcagttttcgtgaggctttcaggtttctggtagcagagactagaggctcatggcatgtgacagaaaagctaagtgactggaaggtaggcctggccaattcctaatatctttatgatttgtagtaggaaaatattgagtgacactggtgagttttattccatctgatgactgaattagaaaatgctcatcatggactggaataaaattattagtgatggtgtatatgtgtatcagtaagatataaagagaaaagtacagtctttagagattggacagacttttaatttaattttaaggtttaaatactagactaatatttcttagccatgtgaccttgagcaagttacttaaacttctctgactcttaatttccacaactctaaaagtgtgataataccacttacctcccagggtcattgttagtattatagggaatctatttaaagctcttagtaatctaagaacacgtggtacacactcaaaaaatgttgttttttggttttttttttttgcacatcattgatacagctttgaataagttatacgttaatttatgcttcttttacattttgccttagaacacatttttctggttaattttcccaactgatttttaattggtcagcttagacgtgtcctttgtaagtgcccacctagagttgtcttctgaacatgaaacccttggtgggggttcataaccagaggacagagaatattagatattggtgtatgtatatttcaaaatgtattcttaaacatcagtaaatttttttgttcattggttccttcatcttggactctctgttagcacacctgatcagagttggccgtgttgtaattctttccctctctgctgcaatgttgtttacttctactgcaactattctttatactttccttttttgccatgaagggaatacattttttccttcttgttgggctatacagtgatcctcatcaacaaattatcaaagaactgtatgaggaaaaggtctctttttttaaaagtgaatcagggctggggagttaggaatgaagaggttttttttgtttgtttgtttgttttttgacgagtcttgctctgtcaccaggctggggtgctgtggcgcgatctcagcccactgcaacctccgactccctggttcaagcgattctcctgcctcaacctcccgagtagctgggattacaggcatgcgccaccatgcccagctaatttttgtatttttagtagaggaggggtttcaccatgttggccagggtggtctcaatctcctgaccttgtgatctgcccgcctcagcctcccaaagtgctaggattacaggtgtgaaccaccatgcccggccaaagagttcttttttcagctccacagctggaccgtcttaataatatgacagcacagatgaagagttttaaaccttttgttggcttttctttcgtatctttttggcaagggcacatgaaaattaagtactgataatatcacaatgaaagcagctgtgtcattcagaccagtgaccattttaggtttgatgaacttttcattaccatcatccagggtctaaattctccattgtaaggtaaggattctccagggtggtggtgaggtgggttgagattgcatttgtatcatttgtgtttttatgaactctgaagatccatgtcgggtgaaggaaaggatgggaggagaaaaggaaatactttgaaagagggataacttggactgtttatttccttatgtgctgggtaagaatgtccaggtgacatctatatgtagtaaatcagtatttctagtctgtggaccacactgtaaactttttatctttctaaagttttttttatttttgtagagatagggtctcactttgttgcctaggctggtctcaaactcctgggctcaagtgatcttcccacctcagctgagtagctgggaccgcaggggcatatcaccatacctagctaatttttggttgttttttttttgtttgtttgtttttttaaagagatgaggtcttacttgcccggctcaagtgatgctcccatcttggcctcccaaagtgctgggattacaggcatagccgcagcacccagcttgaagatatttttatatttccagggttttagg

SEQ ID NO: 56562 - DNA, 1041 bp, Homo sapiens
tccatcaacacccaccttccacaactcagtctgcacctcagttggcaaaggagactggatggccatctttcctcatgttcccttgagtatttcaatgtagaaagcccttcaagtggtattatattttaaccttttacattattgttattaatgttagtaatatattgttatgttttctaaattatttttctttaagctgacgtggctttttttctgtggctcccagtgggtctacggaccttggctgacatatgttggtaggtactctggtcagctcagctggctgtcctggttcactcagaagataagtctctccaaagcaaattcacatgcattatgagtcgctttgagcttctgacatgtcacttgccccgaggttaaaacttttcaccccttgaagaccttacatgttttatggtattggtgaggaaggaaatgttctcaaggtctcaggctatttgggaaattccaactcctataccttaccagagcatggaagagcccagatctgaatgtaaaacgtctctgttctgccagagatggaaaaaatacaggtatacttgtgatatagtcatggggcttcagtgtcactattttctccttaaagctccagccaaaaactggacaaggatagagaggaggagggaagaacaaaagagcccttctctatgaaccttgtgccttctgtcctaccagttttcttttacagattctcacttctgctagcctagccagggcttactccaggaatctaaatagatgccctagtccactttatctttgttcccaaggcactcatttttattttgattttgattgaatgtgagcaggttgacctcaggtcacactttgttccaaaaacttttggaattattccaggacttgtggtggagttatggtactctagggcagtctttctcaaactatgtatggtaaaggaccaggttttttgttttccagtccttcacttatcaatatgcattcctattgcccatgacaggtatggagttcacactgtgtgctgccgacccggcaagtttg

SEQ ID NO: 56563 - DNA, 1654 bp, Homo sapiens
tgcagcaggtaaggcctcttgccttctgcccactggtgctgtccacttaggtgttcagtgaaggaagtatctgggaaggatgcaatactgctagacctaggtggaggagggatcctctcttgtgatctctctcagaagaaatagagagatcattcattagattcctcttctggatcctctgttgttttctgggcttttctctatttcatgttccattttccttattttctagctacaagatttaggccatcctccaaaagagctggctggagagatggtgagtatgtcttatttttccagattttaatttgagtccccaatttccagaattctttaacctctcaggattccacctaaggtgaaaattgtggctactggggatggatcttcacgtctgtcctaaaaaatgagcaactatctgagtcccttcatctcttccccagcctcctggcctcaactttgacctggatgccctcaatctttcgggcccaccaggtgccagtggtgaacagtgtctgatcatgtgaaacacaacacgttttcctctctgagtcccagctatggggaacatctggagtcagcagaaccattgggacctgaggcaggagtgtcacctgcgggagaagtctgcccgctgccctctgtcatcccattcaagattgtgccataccagctgaggtttttcctctgtctctctaggaatagggtctgtttcacaggccatttctgtgaaccctactccattgtggtttctgccactatcaaagttccagctacctgcaaggtgaaggaaggcatcccttttggggcatgcactttctttcctttctcaaaataatgttatatgtggccacactgatgttcacctttacgtccagggtctttgtgccttgtctctactccctctcttggatctggggaggaggggcagagacctgggactctgtatttctatagttctcctggcagagcctttgagaatggggagaaacagcctgggctggggctacaggtctgtcactatgctctcttgccttcagacagaccattctgaattctctaaagggaaagggcttttgcatctaatcacaatagagttgaaagagaggccttaggattctcctctctctaggtgctgagccctcacctccctgttccaggctgagaactcaaatggttaccctgcttcttcctacaatgctgtgtgatatgggtgaacccagcccctgaccttcctctatcccctgcccatcctcccttttacctcctctcttttttaaacacctgtttatcccaacctttttgagctcaagctgtgataaagaagggcccatcctatttcccctcatctagtccatttacgattctcactgactccccgtcttcctggcagacacaaataaacccagtgtcaggtctaggaaattaatggctattcttccccagatacattctggcttatttgagatacatgattctcttagaatcctgtcccttggttcaggaaagtagcttggaaaaggagtaggggtatagcttgggtcccttttcctgcaaggccccatggggcagaatataataaatattctgagtgaggagtgtggtctttttctgatcttcctcagcttccgtaagttgcagagtgaggtatatt

SEQ ID NO: 56564 - DNA, 1007 bp, Homo sapiens
ggccaacatggcaacaccccgtctctaataaaaatataaaaattagcctggcatggtagcatgcgcctatagtcccagctgctcaggaggctgaggcatgagaatcgcttgaacctaggaggtggaggttgcattcaactgagatcataccacttcattccagcctgggtgacagagcaagactctgtctcaaaaaaaaaaaaaaggaaaactctgtgatggacatttgtttagtaaatcccttcagtatttatccctcctttccccacagcagctttctttcctgtcaactagaaaggagcaggatgtaataaatacattttggtgtgactaggccacaccaactcttaatcatctcccattttccttagacatttaaatttcaaggcaggtaccctctgtgtactcagaaatttgaagaagttatttggttttccaaaatgcacactgcgggttattgatttgttctttacaactattgttctcatatttctcacactaaataaatctctatgagagcttcttgacttggccatttatttcttggacactctcatgttcttgttcacccatgcaggcaccccaccaaagtacatatcttccttccagtaataatttttaattacaaaataaacatccactattggaaaaaaaaaaaaaaagctagccgggcatggtggtgggtgcctgtaatcccagctactctggaggctgaggcagaggattgcttgaacccgggaggcggaggttgcagtaagctgagatcgcgccaccgcactccagcctgggcgacagagtgagactccatctcaaaaaaaaagaaagaaaaaaagaagcacatgtttttcatagggtatatatgaggacctaaactgctgtgaaaatgatagaaagcaagtagctcccttattctgtttttgattgcagccttttatcttttgctaattatagcaatatttattgagcacctgccatgtgactgtcactgttctagatattttacatgt

SEQ ID NO: 56565 - DNA, 1005 bp, Homo sapiens
ctgcccaaagagactctagaacagcagaagcgcatctgtgaggtaagatctataggaccctgagcacaacagagacgtccttcccttcacccttcactaggtttgaattctttaatttcaaacccagatctgagtggggatgaagagaaatttaggcccttcatttctatgaggggaggatacatttcttcatcctacttcctcatctcaccagtcctccatacctaggaggtagaagacctctcagctttatagcccatcatcctattttgtgttgtgttttttatgcatgtgtagcagcttagaaatgacttctaccaggtgtagcatcaacctggcatgtgttcctttttctgtccaccagatggcagcctatttcacccactcaaacctgcagcctgtgcacatgatcctggtgctgcgtacagccctcaatctgttcttcaagctcaagaacttcaagacagctgccacctttgctcggcgcctactagaactcgggcccaagcctgaggtggcccaacaggtagatggaactccttcagtgaccatagggaagccagatcagctcttacatggagggagcagaccaaggtccttgcctctgaaacaaagcaataaataacaacattcaacaaaaagccaacagaatgctaccctctgtttacttcctgacttggtgtttcctttgttcctggaaaattaatagtttattgagacatggcactcgtctaagagtgccgtgcaacctagaatagctccactgcagctgaaagtaaccccagtcctgtccttaagctccagatatcccatcacaaccaccacaaagcttcacatacacatctcattacttgtgtcctccaaatgcattctttttgggtgatggaagtctgttttaaccctttctaggacctgaccctgataatctctagagttggtggaggaatgtgggtctagattatggagccacttttgtattgagaaggggaaagtttgatacaatag

SEQ ID NO: 56566 - DNA, 1040 bp, Homo sapiens
agctaggtgcctccggcttaggatctctcatgaggctacagtcaaagtgttggccagaactgcagatatctgaagactcaccggggagagaatctacttctgcactcactcaatggccattggcagcccccatgtccttgctccctgttgtctaagaaacatcactttcttttcgtgttgacctctccataggagtttgtaacgtggtagctagtttcccttacagcaagtgagcaaaagagggcaccccaagatagaagccacaatctttgtaaccagatctaggaagtaacatcccatcacatctgccatgttccatccattagaagctatttaataaatccagcccacacttaagaggtgggtattttgcaacaacttgaataccaggagtcagggattactggggggccatttcagaggttgcttaccacagcagcatgcatttggaaatgtacctataccacaaagtctgttttctctacagagtccctggcctatctcacagctgctacccatggcttagatgaagaagctgagagcctaaaggagacatttgacccagagaaggagacagtgagtctttatttacataattgtctcttattacaggattaactctaggatcttagaacaatttaaaattatgaatgtcactctcccacctggttaccaggagaggcagagaaacaaatgagatcaaaggaggctccataactttccttacgtgacttccaagtgctatttgtttttagcctcttttcttctactattcagatcccagacattgaccctaatgccaagctgctccagccacctgcacctatcatgccattggataccaattggcctttattgactgtatccaaaggattttttgaaggcaccattgccagcaaaggtaagtacctatttctcccatagcacttttgttgtttgttttgtgaagaactgtcctagagaataccattagcatttagtttaacttgtcctttttttctgcatggagcctaatggaatattgaaatgccagtcattta

SEQ ID NO: 56567 - DNA, 1070 bp, Homo sapiens
ttcttttttttgaggcggagtctcgctcttgttgcccaggctggagtgcaatggcatgatctcggctcactgcaacctccgcctcctgggtccaagcgattctcctgcctcagcttcccgagtaggtgggactacaggcgtgcaccatgattcccagctaattttttttgtatttttagtagagacagggtttcaccatgttggccaggatggtctcgagctcttgacctcgggatccgcctgccttggcctcccaaagtgctgggattacagatgtgagccaccgcacccagccgattttcaatggaattagactaaaagctaggagtaattgaaagtataggaagttcttcaggaaatctatatagatgcagatgctttgcagagtccttggttttgagtcacattgtccttcaacctgttaacacgaccctggggattctttagattgctctggaagcagccaaagcactggatgacaagaactgctgggaaaagctgggagaagtggccctgctgcaggggaaccaccagattgtggaaatgtgctatcagcgtaccaaaaactttgacaaactttccttcctgtatcttatcactggcaacttagaaaaacttcgcaagatgatgaagattggtgaggccctcaaactaaggatgggaagaggggttcttgggggaaggaggaaggtgaattaaggagaaagagaacttaagagaaaagacctaacttggtgtctcttacttggtgcagctgagatcagaaaggacatgagtggccactatcagaatgccctatacctgggtgatgtgtcagagcgtgtgcggatcctgaagaactgtggacagagtaagtatccgagacttgccagctttttcagggtctgaggaagtatttttctgtttttgttgagttaatctgtgtatagtggtgagggatttctctttattgtgcatttttttaggagagacaacatgctcctactgtgcttagaagattttcttcaaagccaaagggaggtgcagccagaatattcagtccagccaaacacccttaggagaatagttat

SEQ ID NO: 56568 - DNA, 1030 bp, Homo sapiens
tgcatgtagaacccaataatttttaatatttcttctaatgcagtctgtaaattatctgttaaatgttgcattagctatattgacaaacttcaatttgcaatctatttattattattcagttcaaaatactttgttttttattatttctttatcagaactcttcacatctacctctcttctactttcagttatagattataaaggagttacctgtccataatcacctactgattatatatcagaacttaagatttaacttttaggtctgattcctatagccacatctgttactcatcttctaggataatagcatataaagatcgtgccatctaccccatcgtagaaagaatatgataaatttggcatttagttctgctcttttttgaatcacttcccatctatatcattgttcaaatggcacttgacaaaagaccgtttcctaggtttgttccgtttcttcacaggatggattttccctctcacttactgaaagctgtgccctctgttcttagggaccacgggatcattcgaactctggatttacccatctatgtcacacgggtgaagggcaacaatgtatactgcctagacagggagtgtcgtccccgggtactcaccattgatcccactgagttcaaattcaagctggccctgatcaacagaaaatatgatgaggtatgaagtgaggatgcaaactagagtattaagagaggcagcactctttttttttttcttttcctgtaagtgatgtctacttcttgcccgactccaccccaaatgtctaggtactgcacatggtgaggaatgccaaactagttggccagtctattattgcttatctccagaagaagggctatcctgaagtggcactgcattttgtcaaggatgagaaaactcgctttagtctggcactggagtgtggaaacattgaggtgagaggaatatggtcatcagccccatattgtcttagaggtgagagagttagagtgccattgggagggcattattctgggcttgcttctttagccag

SEQ ID NO: 56569 - DNA, 1030 bp, Homo sapiens
ctgcagtggtaattgacatggacaggacaaaaaatacttagttaattgaagctaaggaacaattgctgaggaacatcatcagttgtcatcatcatctatacacatttcttctcttaaccccatctttaatacttattgcagcttctgatcaagaatctgaagaatgagatcaccaaaaaggtacaggtgcccaactgtgatgagatcttctatgctggcacaggcaatctcctgcttcgagatgcggactctatcacactctttgacgtacagcagaagcggtaacatatcaggtgcccctaagcagacagccctgtagttggggagagtggacatctttagtgggaaccttttttccccaagtgagtttgtcttgtggcttggccacttcttgtgctccaagactctttatagtaacttttcccttctgtgatcactctccattcttcacgtccacactagcattacagtgagattcttggttatttatctgtttttacagtacttacctgaacaaagcgtgttctccgagcttagaatgagagagagacagagattaataacatagttcctacatttaagggagcttgcagtccagtggtgaaaacagacatacacagattccctaataatacaaggaaatgagggagagggggttgaggaaggggtaagtgcacaatgtgagccaaaatgtttaagtcactgagctactatgtaggaattacattaagtattttatgtaattagaattacattaagaaattggggtttacattaattagagggtgcaattgatgtagatcaaagcctgagacaagggaaatagatccattcatgtttgcacatctctatctatctcaggactctggcatctgtgaagatttctaaagtgaaatacgttatctggtcagcagacatgtcacatgtagcactactagccaaacacggtgagtcttcattatatccaccctgatttagagaccattcccttccaccccgatccctgccagtctacggcacttaccctatc

SEQ ID NO: 56570 - DNA, 1049 bp, Homo sapiens
aacccaagtaagactaccctaaggcatataaaagtcaaactctcaaaagtcaaggacaaagaaaggatcctaaaatacacaacagaaaagaagcaaagaacacacaaaggagctccaatttgtctggcaatagatgtttcaatgcaaaccatacaggccaagagagagaggaatgacattttccaagtgctcaaagaaaaaacctgacatctaagaatactgtacccagcaagattattttattttccaaatatgaaggatagtatttcccatacaaacaaaaggtgagaatttaccaccaccagatccatcttacagtaagtgttaaaagtagttcttcgatctgaaagaaaaaaacactaatgtggtagcggaagttactgcagctgcggtgttgtgctgtggggaagggagaaggatttgtaaaccccggagtgaggttctgcttacccgaggccgctgctgtgcggagacccccgggtgaagccactgtcatcatgtctgaccaggaggcaaaaccttcaactgaggacttgggggataagaaggaaggtgaatatattaaactcaaagtcattggacaggatagcagtgagattcacttcaaagtgaaaatgacaacacatctcaagaaactcaaagaatcatactgtcaaagacagggcgttccaatgaattcattcaggtttctctttgagggtcagagaattgctgataatcatactccaaaagaactgggaatggaggaagaagatgtgattgaagtttatcaggaacaaatggggggtcattcaacagtttagatattctttttattttttttcttttccctcaatcctttctcatttttaaaaatagttcttttgtaatgtggtgttaaaaacggaattgaaaactggcaccccatctctttgaaacatctggtaatctgaattctagtgctcattattcattattgtttattttcattgtgctgatttttggtgatcaagcctcagtccccttcatattaccctctcctttttaaaaattacgtgtgcacagagagc

SEQ ID NO: 56571 - DNA, 1038 bp, Homo sapiens
atggtggtgggtgcctgtaatcccagctacttgggaggctgaggcagagaattacttgaacccgggaggcagaggttgcagtgagctgagatcgtgccactgcactccagcctgggtgacagagcgagactccgtctaaaaacaataaaaaataaaaaataaaatttgtctggagatattaataattatttgtagaaataagataaaaataggcaagtaaaaaacaaagcagaatatcctaaatgcaaatgaggctgagtttaggggttagaaatatgtatttggaaattcacatgagaatttggggtaatattggaggacagacatggtaattctgatgctcaaaattttagagcagcgtagtctcttgaatctgttcacatgaagaataaatcagagacattttttacaacgagtagcttgattcattggtttgctttgagtaatgactataaagatgttttagaagaaccactcttttctacagggtcacgatcgtggagtaaactgggctgccttccaccccactatgccccttattgtatctggggcagatgatcgtcaagtgaagatctggcgcatgaatggtgagtgaaccggttacattatcgccatatctaagaaactgccagccagcaaggtaaagtagccaggtcttctggactctgacctatttttctaccttaggtgattaattaatgctaatcccaggagcatagaaattattttacaaataaaatatatcatctttacaatttttatgtgtacagttaagtggtaataaatatatttatattctgttttcctccatttcctccttcaccctccttcccattctactctcgatcttaataatatccactttttagcttccacatgtgagtgagaacatgccatatttgtctctttgttcttcccttaacataatggcctccagttccatccattttgctgcaaataacaggatttcattcttttttatagctgaataatattccattgtgtgtgtgtgtgtgtgtgtgtgtgtgcacgtgcgcg

SEQ ID NO: 56572 - DNA, 2090 bp, Homo sapiens
tacaggcgtgagccactgcgcccagcctttaggttttattttcaatgagagtttttattttccattacacataactgtctttttaaaaaatatttacaagtgctaggtaatttcatcttccactattcccccaaaatacttcaaaatataggattttagtctcaattctttttttctcatctacaaactgttataattttacctgcttgttcattccaaaggtttgttatcagagtccagttacataacatactctctgaaaaccacaaagtactttccgaatgtgagatagtagcagtgctatcataattttggttctgactatagcacaaatagcttttaaagatagatttacttgagccatatatgtgggtcctctacaaataagactattattattctggtgtctttttccatcgtttttaagttacaggataattcctcccagtaaaactagcctccaaaggttttaatggcaaaatccaagtattcaaatctataatcagccttttaagcaggaacttaaaatgacatgacagttttaattatcttgttcttcgtccaagagtcaagtagtaggcatgagtacactttttacatggcttatggttttacgttatcttctaccaaacagctgttttgtacttaataggcctagtttctgtaacccatttggaacttcccccatcagctgtcgaaaggcttcaagttgagaaacactgcactgtggcttcttcaaatggcttttcttttttgagatagggtctcaatgtcacccaggctggagtgcagtggcgccatcatggctcactgcagcctcgacttcctgggctcaagccatccccctatctctcagcctcccaagtagctgggactacaggctcgcgccactgcacctagctaatttttatattttttggagagacggggttttgccatgttgctcaggctgatctttaactcttgggctcaagcgatccacctgccttagcctcccaaagtgctaggattataggcgtgaaccaccacgccaacctcaaatggctttcctttaaaatttcttgagcctagtccgaagatagtgagttatctcagttgattgttcacagtcagttacagattgaactccttgttccactcttttccccattctcactactgcacttgactattctttaaaaaaaagaaaaaaatttctgaaatgatcggggaaaagctgctataaattttatgaagttgagagtagaaattgaatgtttaccatttggggccacatttcaagaacactgaagaatggaaagtgggcattaactgaagcagacacctcttgaggtaagatttgtggaagaagaggttaaagtgtgccagaaatttgggttaccctcctctagaaagaaattccagtaatggatctgtttaagtgttaagggagcagaagagaagacggtgaatgtacttcaatattttgaacatttttagaaataggaattcttgagtctcttttctttcttcagtcttttccatttctttttcttttctttttcactgtaatttctgtgtttctgatactgtgctgttttagataatattatgtttacatctttcatcccactccttatcccttcaaaggtctgaggaaaaaaaacctgtcccctggtgcggtggaatcggatgtgagaggaataactggggttgatctatttggaactacagatgcagtggtgaagcatgtactagaggtacttatctttatagccaggggctgaatatgggctgtcatcttgggaaagtcacagtatgttgttcatttattcattccttcaacaaatatttacagagtgcttattaagtgccaggcactgtttgaggtactagaaatcaaattgtgcgtgaaccaacagagaaatgaagcttatgtgccacctgagggagagtcttattaccttataaacccagtgggaaagggagaaagccaggcgtagacctcatcaccatcccaaagcagagcccattctcaagctttctgtaaggcagggcagcaggaaatttaatcggagttatcgagaaccagccatgtgtaacttttgtgc

SEQ ID NO: 56573 - DNA, 2084 bp, Homo sapiens
actattttggccaggctagtctcgaactcctgacctcaagtgatccagctgcctcagcctcccaaagtgctgggattacaagcacgagccactgcccctggccggcaattattcagaatatcctttgtcaacctggattctgtgagagaattaagtgctatagaaagtactttcagtggctgttttcgtagttcttctaagaatggtatatagctaatgctattctagttcatagagaatttgttacatacctaaactgatgcctttcgggcattaaaacttaattcttttccagaacgccgggttgagaagggctccactgtaaaagtaatgtttgtgccacctgatgccagccttgcatgttccctgcagtctagccaatgcagtttgggggcagtcaggtggttggattcttggtggtcatgaaatgctcaaggcatgaaatacttttctttaccttttgcagacagagaacatttttacatcaaaattaagggccctagatcagagaagagagggagtgtgaccccatggggtttatacttgctcttgaatgtgtgaagtgcatggattactatgtaataaccttgcaattgctatactttatttatgtgatagtaagaattttgtgctagcttgctgtactaatgttaatgctctttttaccatttctaagtgttgttctttacccacaactcttgacttccagtaaccccttaaccagagtggaaggagatgctttggtatttaacaaagtgcaagaagcttttgggttagacttttatactttccttctctagaaatcagcatattctttttcagcagggttcttttttgctattgggttcaaataagtctgaaaacaggaagaggaattagctttccgatctgttaaagaccagtgcttatatttctgaaagggagaagttagttctgaatgagagtatgaatactcccaaatttagaggactagttctaatttttttgactatttttttttgaaagggacactctctgagttagttaagcagtaagagaatatagagatctttaaaggaaaacctatctcttggtacctctcccatagggattgaaccccacagggcttagcttaacctgaatcttttgtgttaccctggcaaaaactatttgtttaaaagggaatgtatttacaaacctacatataaaaggttactttcttaacttgagcttctaagtaaactgacagttaaattattttaatatgcttatacctttgcatgtcaagcccatgtaattcaggctcagtctctgaaaaggctactaaaaaagtattaatttgctgccaaatcctgttatcatccctctctttttcctgctttccctggtccgtattgggaggtgtgcatcaaactggtccattctgagagtgtcctctcctccctctggatttgggtagctgctgtagaaattttccatctgtcgttcagtcctagcgagcggcttgttgaaggctcaaatatttcttctctgagtatcttttcactgcctgtcaccattcatctgtctgtttttgcccttccccttttcccggatcattacacgcaaatgcaacaaagccttccattctgtcatacggctttccttttaatgtgtttgttgaagcttattggaggtgaagtttctcacagctgtctatctttgtattttcctttgaatctgtttcatataccagactcgttagaaaaagttgacagatcttattaaagggacaagtgaaataagtgaaaggaggcatcccagcgataaagtatttatgagcctttgggagagtatattgtaaaacatcagctttatttctctctacctactggctaaatgctcatcttggacagaggacaagataattaaaattgttgtggccttctaagctcttgcttctccagtgttaacatgtaggtgccaccataacagaagagatatattataattttaaaacaataaatataaatgcagttattaaacttaagttcttatattttcctacagatggcaaagtttaggcttaaaatgacttaggttttctttcctttttttgagacgga

SEQ ID NO: 56574 - DNA, 1005 bp, Homo sapiens
gttcaagcgattctcctgcctcagcctcccgagtagctgggactacaggcacatgccaccacgcctggctaattttttgtatttttagtagagacagggtttcactatgttagccaggatggtctcgatctcctgaccttgtgatccacccgcctcgacctcccaaagtgctgggattacaggcatgagtgaccacgcccagcctgaaaaacttcaataattttatctttagcttttccctaatcctaccccaaccccatgttgtttatctgacctatattttcattcttgttcttttcccctcaaatcttaaacaaggctttctaccaaggttcctacctatttagaaatgccaaaatacaaataatgtatataaatctatatttatatacatatttctatctctgtaaagatatcaatttctctgagccttttagaggctcaataactatttctgtttcttagtttgatttgtctttgcaggtttggaattacaagcttcggcgctgtcttttcacattgcttgggcacttagattatattcgcaccacgttttttcatcatgtaagtagtcatggtggcgctagttttggagcattcttagtttccccatagtaatctttatttgatccttgagaacccatgttttaataatagagttgtttttggagtggctcttctacaatctgtgtggtattgtcctttctgctttttttctttctgcaaaaggaagcacttgggattatactgaatttaattttattggattcagtggattctatgggaagtcattgtttctctgtagggaaaagtagggatttgatttcagatttgctgaaccaaaaaacaaaagtttgccagctaatcccatgtagggtattattagtaagtagtaggtgtgtctggaagaaggtcagactaagatgccattttgatcagctaacaaacgtttcgaagtattaacaatcatacccctctatcctaggatttttgggtctggtggag

SEQ ID NO: 56575 - DNA, 1030 bp, Homo sapiens
tgaaaaatcctgaataggaatcaccttagagattagaaaggatagctctgtctaacatacattgcctgccttctccaccaggtccagtgcgaggcattgacttccataagcagcagccactgttcgtctctggaggagatgactataagattaaggtacagagggtctgtcataactgagaataaaggaaagaggatgtgggaaggtttgggaatcatgaaaggaactgaaagacaggaaatttcattcatacagagctcaggcctttgacaacattatccggagaacttactcagcaaacatttattgaatgcttactgtgtaccagacactgttttctttttagggaattcaaaaataaataagaaatggcttctgttttcaaggagcttttattctaatacagaagataaacatatatccaagtaatagcatgtacagtttggtaagcaatataatagagagatattcacagtgaaataggaaagagcagtataggtgcaaagacaaaaagcatgacacagctagatacagggcagctgttattggttttgtatggagaaaacctggagaaatggtgagagaaggggcagaagatgagaggggccagatcatggagtacctgtttgtggcgctcaggagtttagatgttatcatgcagataactaggagccatttgaggaacttaaatacaggagtgataccagatttatatgtttttaaaatgattacttggtggtaattaaagaaaagattggatgatttgggcaagacaggaggcaaaaataccagttaggaaacctgagcttaggtagtagcatttgaaatggagagaaggagatggatgtgagaatttaaggaaatgaatcagtgtgtctgttgggtgatggccaataaggagaaataaatgagatggccaataaggagaaataagggccaataaggagaaataaatgagctgactttcaggcttctagtttaggtcactgggtaaagggggtgtcattaactaggaaaggaaaatcaggag

SEQ ID NO: 56576 - DNA, 1401 bp, Homo sapiens
ggtgctgtgcggcgcttaaaaggtggatttcttatttcttcctctgttgattacatcctaagtctgtgtccccctgccttgcctcaggttttttttttttttttttttttaatcagtaaagcaagaataaggtaggatatgggtactcttaactgtgaagaccctgaagtaacaattcaaggaacttttggcatttataatgtacttaagtgtttgctgatacgcgttcatttactgatacatggctttttagttggtcaagccctaaaatgcaaatgcctgtatataactatgactgtgccttcccccaattcacattgtttttaaggatcctcaaaggagaaactacagctgccccacactgtgggcacacaaatgacctgctgatgttaaattaactgacccgtgtatgtcataaggtttctctcaattctgttcacactcttggaaaaatgcctcagaaagttttcttagcccagcacctgtgtattaaccaattagtaatatacatacaggatatacaagcagaagtgtgatcacctgtgcaaccagaatctggcaaatctaaggtcaaacacctttcctttgaccaagttttctctcttttagtgtcactgtcaatggcgctacatggactttgtaataaccctttgaggcacatagctgggtgccatgtagaacatgtatctgttacgataagtgtgtgcccaagaaatcagaagaatggactttaatctcattttagaaagtatgatattaaatgatttacccaagccatacttcaggttaatgacacgatagaagctagtacctgtgtctctcaaatttttctaacactttttatcttccgatcaggtttgtgcaggggaaactcagtggagaggaagatatatatccccttaaataaaacagctccctgtgttcgcctgctcaacgccactcatcagattggctgccagtgtgagttgagatggattcatgtttgtggacattgatatttgtctgtgccctagatactaagtaacatccatgtcctgcttaggagatttgacacttatattggactgtatgtaggcagttacagataaccgtctgtcaagctaggcaagataattaataagaactaacatttagtaaatgctgcataccaagctttttacatgtgcatctcatacaaccccaaccacaaccccacaaaataggtcttactgttattgtcactttataaatgatgaaactaaaacttaaagaagttgagtaactttcccaagatcatactggtaataagtgatgatgccaggatctggtggcccgagcactaagctgagagaccttttttttttgacacggagtttcactcttgtcccccaggctggagtgcaatggcacgatctcggctca

SEQ ID NO: 56577 - DNA, 2059 bp, Homo sapiens
agagatttagtggcatttcctagagaaaatataggtttgaaaactttggtgtctattgttgtagaatcttatgtatatggctaaataaggttgagggcagagggcaaaaaaatgaagttcacagaacctttctggcatataatgagtcctcttgtgctcttttatattccattccctcctgataaccttcagatggagctggggcaacagcttttcagttcaaatctagaggtgcctgtattcacccaaatatgttgtgacatctttaggggataaaagatacgcagaatcagtgaggcaaagtcagaattgttaactatgggagctttaatttgactcattctgtcctggcagcttcaattagtggagacacaggggttatccacgtagtagagaaagaggaggacctacagtgggtattgactgatggccccaaccccccttacatggttctgctggagagcaagcattttaccaggtaagaactagatgtatctgctgggaaaacatccatagagggaaagtttcagtgaacagtcctcacacttattagtgaaaacttcccttggctgccctggtctggtcaggggagagggcagggtggtcctcagaaggaaaggtgtaccatcaaaagaaatgatcttgagcttagggctaaatttcacctacctgtccctgagtaaccctgggcatccctcccctccctccctggggtccttactcactaaagctctactttttagagcagatcattgtccagactcagaatttagagactgaaagggaagaaataagtcaacagtttgattcccctagttccccatttgtttccatcctgcaggcagaatgtcaggctgtctgataccttcctgtgttccttcatggaattcctttcctattccagggatttaatggagaagctgaaagggagaaccagccgaattgctggtcttgcagtgtccttgaccaagcccagtcctgcctcaggcttctctcctagtgtacagtgcccaaatgatgggtttggtaagtgtcccaaaggatcaggagagcctactgtcacctaaggctcactgttgcttcggtcttacgtctttgtgagggatgtatatgtgtttgtgtctgtgtgtagtgtcagtaactgactcccaaacagggggtagtgtttatttgtctttgctgctcatcccttccctctcctgcttccccttcctttgccttacctggcattatctctttttgtcacgtgttcacatccctaatcttacagcctaagactccctgataccattgtctttctattttagtgtggatggtaatagacttcatgcctacttctttgagtcaccacctccttttgaactcttagtcccaactgaaagattcttctgccgtcacctggttcctaagtacttggtgtcccagtaaccagtccccctattccccatccttcccttcaggtgtttactccaattcctatgggccagagtttgctcactgcagagaaatacagtggaattcgctgggcaatggtttggcttatgaagactttagtttccccatctttcttcttgaagatgaaaatgaaaccaaagtcatcaagcaggtaatgacactgccagctcctagcaattccagttagaaagaagattatttttctagccaggtgtggtggtgtgtgcacgtagtcccagccacccgggaggctgagacaggaggatcacttgaggccgggaggcagaggtttcagtgagctgagatggcaccattgcactccagcctgggtgacagagcaaggccctgtgtcacaaaaaaaaaaaaaaaaaaaggattattttataggctctcctatttggagggtggctcattcttctggtacacctgctgaaagacggttgctccaaaaagaaccaagacgttagttcttctcacattctttccccacattttgctcctacctgatattacagcattaaagccttttagactagaagaaaatataaagaatatctgaaagagtaatatgaaacaaggtacacagcccaggttaagaaccact

SEQ ID NO: 56578 - DNA, 4057 bp, Homo sapiens
tagagattgagaaattcaatttggtaatttctgagcttctttttagctctaatatgccttaattctggtctagtatttccattttgactcatagagtagttaagagatttgtccaaagttgtatggtgagttgatctccaagctgtgtcatatctgatttcctatctctagtttggtgctctttgtatcagaccacactgaatcttttcagtggctgaagcttcaaattgggccaggccatctggaatgggatagtttcatctccagctaaaccactgagtctgcaaccctttgtaactcttgatgagtttttttctttgaccttatagatcctatggtggttctaggataactatagctcagggataaatgtctccgaaaagggtgtggctccatcccaaaaggatggaactgggccctcctccttctgggatgtaagggagggcctccacaaactagctgtctcagtggggtccatctcccctttcagtgctatcaagatcacaacctgagtcagaatggctcagcaccaaccttcccactatgtgccatgcagctcttttcacacatgcatgctgtcatcagcactgccacctgcatgcggcgcagctccatccaaagcaccttcagcatcaacccaggtagggcagatccgaaccatgagggtaatggaataaggggcagagggagagtggaaccaggccagggaatgttagagagactgtaatagggaaggagtagacaccatgaaggagctctgcatgggagaactagaaacaattctgaaaaatttaggcagcttgttcctaaagtggatagtggcagagaagccaacctcggactgttggaagtagagaaaacgacttagagtccgtggggcactggtcagagatttccaatgttgcctttatagctaccttctcctttagccttgttgatctctcattgtttgtgtcctgcttagaaatcgtctgtgaccccctgtctgattacaatgtgtggagcatgctaaagcctataaatacaactgggacattaaagcctgacgacagggttgtggttgctgccacccgggtgagtgttggcttctgatcaggatgggcagggctggcacaaaaagagctggtaggccccgctctagcatatcagatttcaaagttgctaaattgggaagcctcaaatggggaggaatctgggctgtgggactcctgggttgtctccattgccacaggacaggtatattctcttgactggagcaagaaaggaggtttggggccagttttaaagtatatatcccctgacttttcttctgttgtacctagctggatagtcgttcctttttctggaatgtggccccaggggctgaaagcgcagtggcttcctttgtcacccagctggctgctgctgaagctttgcaaaaggcacctgatgtgaccaccctgccccgcaatgtcatgtttgtcttctttcaaggggtaagggctctttggctggggtgcaatggcagggaagaaagaggatagtaaagatgagagtggctactggttggagaagacctcagcacttgacctaagttgttaaccagcacagagcttctggatgtgtctacatgtgtctcccctttagattcctccattttaggaagcttagattccttctttttaggaagcttttacaccctgaattggtatgtaaccagccccctctttcccccactgataagatatattggaggcggccttttacttttattctctggactcctttactgctatctccatccaggagccgttaggctcctgactctcatcactaggaccacagcagaataagggaacagcatctgtggctgagtcactggaggtgggggaccgttaagaatcagacacataatagctgatgttcatcttagacctttactaaggctactttccccatttctgggcttcagaagtcttgtaatacatatgagggatagtcacagctgggaggtggggccaagagaagccgaaagtcacatgactgtaagctgactagcagttgaggtgacctgagatagtcgtcttacctacagctttgatgatctggccgccttcgaggctctcctaaccctttggaatctctgttccccctcccacctacctccatctctcaggaaacttttgactacattggcagctcgaggatggtctacgatatggagaagggcaagtttcccgtgcagttagagaatgttgactcatttgtggagctgggacaggtatgtggcatgtcccccagccccttcctttttaattaaatcttcctcctttgttgttctgcggtcttaactgcaggaaccaccgcctcttcccttgacttctatcccctaggcatggcccagaacaggagactgattctaagtgttgtttcttcatcctccccccaggtggccttaagaacttcattagagctttggatgcacacagatcctgtttctcagaaaaatgagtctgtacggaaccaggtaacctgagcatctcccctcatttcctattcctacagctcagaatccagaccccaacccctgccctgtttccaccaacccccagggcctgtgagacagggtaagagacaggattggattgggtgttggccaaaggatgaacaccacagctgttgttgctgctgggaagaatcaggaactcagtgacattccattggttccctggactgggtagttctctgatcatttgttgcctagcagactaccactgcccattaaggataggtgagtgactagctcccttcttgccttgctgccccatggatccaattgtcaaggctgctctacccaagtcctggctgtgtcacactcgctgcccaacttgtcctccactttcctcattgcttgttcaaaaccttcccttccctctaggtccacctttaggcctgcttttttccaggtggtcctctttctgcaattccagccttcagcatcatccctgctctggactcctgtagcatttaaagaattggttatctgtttggcattcagcacgcagttttctattattatttgctcccttcaattctgcacaataaataataagtgaagcatccactgaggataaagcagagtcttgaagacagtagaatttacttataaatatgaaaaaaaaggtctcttctttatgccccaattttctaactctaaaaagaatggtggaagctacaggaaattcagagagccttggtcccaaaaggcttgagggataaaggtctactagagatagggtagctccccaagcagggaacttgaagtatagagcatttcaggcctaaaagagacctcctgcttcccatcccccagcctcccatcagttaatctccctcgtaccccccaggtggaggatctcctggccacattggagaagagtggtgctggtgtccctgctgtcatcctcaggaggccaaatcagtcccagcctctcccaccatcttccctgcagcgatttcttcgagctcgaaacatctctggcgttgttctggctgaccactctggtgccttccataacaagtaagaatcacttggccctgcaccctcttcattcttgaagagagtctattctgcagtctgggaggaaggtcactgccctccgctttcccacactaccccctccagaacttcaggtccatctgtattctttgctcagtggcgttttcacatctgaactgaaacccttatttgtttgactggatattcatcttagaaactcatcctcacccttagccctttactgtcaacaatccttggttatggttccactgctccctagctctccagggtcctgagttcctcagggttgccagcagagggcatcatctcaaacacaagcatgggaaggatggtgggggccctttggctagaagacagaaagcagtccttctctggaactcacccagaggtgccagaaacagtattcatactctgtgaaatgtaccatgttcttgccatgtggtagatggccatggttcagtgcgagggtaaaagtgcctcctatagctgatggggctc

SEQ ID NO: 56579 - DNA, 1957 bp, Homo sapiens
tcatcgccagcaaagagcttgaggtgagatggggcaggggcataggtggcagggatctgtttgacttctttctctgctttcttgtgtcatatagccctttccatctcccatttgccccacatttgtagcaaaagcctactgcaaatctgtccctggtcagccagcatgttcccttaggaggccttttttttgagatggagtttcattcttgttgctcaagctggagtgcaatggcacaatctcagcttactgcaacctccgtcccttgggtttaagcagttctcctgcctcagcctttcgagtagctgggattacaggcatgtgtcaccacacccagctaatttttttttatttttagtagagatgggtttcaccatgttggtcaggctagtcttaaactcctgacctcaggtgatccacctttcttggcctcccaaagtgctgggattataggcgtgagccactgcacccggccaggaggcctttcttcacagatagtttgagtaggtgttcattctggagagcccctgtggatcccagaactctttcacagcttcaactcccggctggcattccccatctggcacagctgggatgagtcagtctaatgtaccgagctcctgtcacaagtcagtaatgtaagtgccgcaagggaaccaaagccatgggccctcctttcaaaatgcctaaaatctaagtaatacaagatggaagcaagaacagagatgctttacttctcttttcaaatggggagacaaagtctgtaggctggagagatgttgcccatgattattccatagttggtgcttagagccagcatccgaattcccatggctccaaaccccaaacagttatccaaaaaactgcactgagttctgagaatgcctttgtcctttcctgccctccctccccctgcagttgatcaccctgacagtgggcttcggcatcctcatcttctccctcatcgtcacctactgcatcaatgccaaagctgatgtccttttcattgctccccgggagccaggagctgtgtcatactgaggaggaccccagcttttcttgccagctcagcagttcacttcctagagcatctgtcccactgggacacaaccactaatttgtcactggaacctccctgggcctgtctcagattgggattaacataaaagagtggaactatccaaaagagacagggagaaataaataaattgcctcccttcctccgctcccctttcccatcaccccttccccatttcctcttccttctctactcatgccagattttgggattacaaatagaagcttcttgctcctgtttaactccctagttacccaccctaatttgcccttcaggacccttctactttttccttcctgccctgtacctctctctgctcctcacccccacccctgtacccagccaccttcctgactgggaaggacataaaaggtttaatgtcagggtcaaactacattgagcccctgaggacaggggcatctctgggctgagcctactgtctccttcccactgtcctttctccaggccctcagatggcacattagggtgggcgtgctgcgggtgggtatcccacctccagcccacagtgctcagttgtactttttattaagctgtaatatctatttttgtttttgtctttttcctttattctttttgtaaatatatatataatgagtttcattaaaatagattatcccacacgacttgtactgctagttattcttcccaggccaccttgttcagcgagcctagactggaagtcatgaagttatcttttatgctatcatcttgggctccagaggacccaaggagtaaggctctgtcaaaaacagttgaagtcctttcaaattgcagagccctggttctcctcttgtaagaacaatgttaacatagtttcttctcactttgtaatgaacgggcattttttttttttttttt

SEQ ID NO: 56580 - DNA, 1846 bp, Homo sapiens
attggattttgtgtagtcgggtccgtggccctaaagagaatatggccagccccagggatctgggggctccttctccgacaggaggggtccaggaagacagccccaggagggactgcgggctgggccaagtccaagaatcgaggcattcccctgcccaccgttcgggacccgagtgtcagccccaccgcggattcccaggatcggggagggccgctgggcatctgaaggcgcagggctgggggagcggcgactccgggaagagcggggccgcagacaatggacgcggcggtaggaggggcggcggctgtgggaacagccgggaggcggcacccgggagctcgcgctcccccgccccctgcaccccccaccctcatcccctccccctccgccccctcccccctgcgccgccggctcccgatctgattcctgatccttgattccttgatccttggtcccgccatgggagcctgagcgccccctattcccccctggcccccagcccccggggccttgagggggaagaggcagcggtctgggacggagcagggggtgaccagactcaagaacccccccctcaacatcccccatcgcgcgcgctgcctgtccaggagcgccgagttcggagcgacccggagcgctgcggatacaaaggcgacgggccgagcggggcgcccgcggagcccacccggcagttcgcagcggcgggtgagtgccgggccgcgggggcgcgggcaaagtttgaaaaaaaaagaagaaagaaagagagagaaaaaaagaaatggaaaaggaggaaaatcatgcaaggggccagggggtgcccgaccccagagcgagcggggtggcttatgggggaaggggggctggactccgggcaacccccttccggtccgcttccccactgcacagcggagtaccccccccaactttggggaggggaaggggctcgtggggagggggcggagcccaggcctggagagccggggactttcctgggcccgggcgggggccttaatgatcccaggggagccggttgaagccggagacggggagcttgtgttggaggtggggggagaggcgtggaaggatcggagtctggaggtattggaagccaagggtgttttggggtgcatacacccctcaggagcgtggggagggacggaggcaggtatgcgttaagggtgtagagtggagtcaggggggcgggttgggcagagtagatagggtgtatgtacagaccgaggatggggctggaggcggtagactgtgtataggggccgaggggacaggcgctggcatccctctccccactcatatttacccatctgggggactgtgggctctgcgttagtgagttttgaagggttggtggaggatccgtgtgcatgattctttgttttggtgtgtgtgcacgccttgacgtgctgcatgttcctgcaggtgggcccctggtttggatgtgtaggtgtttttctgtgcttgagtgtgtgtgcacccagggagcggctgaccatgcatctgctgtgtgtttggatatgtgtttatatgtatacttaggggagggcgtgtatgtctatgtgtgtgtactgggagaggggttcacgggaaagaggtgtgtaggtactgaggaaggtgggtgtgtaagagcagaatggagtgtatgtggataggtgtgtgtgcacctgtgtactgggaaggggtgtgaatctgtgttctcttgtgtgtaacctgtgttgatgggtatcaatgtgtgtgcctgccttagctggtatgtatgtttctgagtgtgtgtcgggggtacctctagactctgcaggcagattttcctggcaaaaatcccgaaaagaag

SEQ ID NO: 56581 - DNA, 1048 bp, Homo sapiens
ataggagaactaggctttggttctgatcttcctttggccgaccacattaggcactctctcctatctgccaggcacagtgtgaagcacaggggatggaggggcaaataagatgttttcccaggggagacatgtgaaaacatgttgattcactgcagcccagtgagtgctgtgtggaggtgtgttcaggaggccactggagcatagaggaagagtgcttggccctggggtgaggtgccagggaaggttcctgcaggagatgccctgttagctggattttaaaaaaattaaggtgaaattcacataataggaaataaaccattttaaagtgaacagtggcatttagtacattcacagtgctgtgcaacaaccacctctgtctagtccccaaacatttgcaccatcccgaaacaaaacccatacccattacacaattgtcgccatttccccttaccccagcccctggcaaccaccaatttgcatcctgtctctatggatgtacctattctggatatttcatacaaatggaatgatagaatgcatgaccttttgaatctggcttccttcgcttaacataatgttttccaggttaatccacacggtagcatgtagcatgtattagtacttcattcccttttatagctgaatattattcccttgtgtggacagactttacctggttaaaggatgagttaggccaacaggaagggtcttaggatggcactcctggtggaggctgagcgtgagcaagaaggcacacagggtatttggtagtcctgtaccttgcagtatgaagtggggatttggcctcagtttctctgtctataaaacaaagttaatcatccctttcctgcttgtgctatgggcttggtagagttggaggtattaggggagaagagaggctagggtattattgcctcttctcagggtctgggctggggatgggacttttaaaacttgctctttcctcctctttcctgggcagctcactcctgtatgcatcaaccctcatccttgtggggagccatctccctgttcacttgacatcagc

SEQ ID NO: 56582 - DNA, 1009 bp, Homo sapiens
aggcactattattgccattttatagataaggaaactgaagtttggaaaaggggagcgactcacctgagattacatagctcgtaaaaggctgtgccaggtctgacttcagtgctcttccttttcccaaagtctcttcaccttcccctactgtcattccagttcggtctgattgctcattattgcctttaatcttgcacttgagtaattcccctgttttctgaaaagcaaacatgagtccagtgtcagcctgaggagtagagaagcctacccttgagggtgggagtcagagaacgatctcatctccaggaggagcaccttggtgtcataagcctggggcggggccagcatctgggcagaaacctctcctggggtgggtctctttctccttgctgggccatgattttggatgggggttggggtaaaggagtgactgtaggctccggccaccatggcccgtggggtcttgtttgtgaatgggaggagcctggtccttattgtctgtagggttttctcacagcccctaacaatgtccttcagactcctgttttcaccagagtgttcttggctccctcagcctggtcagagagagagggtgtgtttgtttgtgggtctagggagggggttctggtttttttttttttgaaaccgtttcgctcgttgactaggctggagtgcaatggcgcgatcttggctcactacaacctctgcctccctggttcgagtgattctcctgcctcagcctcccgaatagctgggattacaggcatgcaccaccatgcctggctaattttgcattttttggagaggcggggtttcaccatgttggtcaggctggtctggaactcctgacctcaggtgatctacctgcctcggcctccctaagtgctgggatcacaggcgtgagccaccacgcccggcccagggggtctggttttttagggtaagtagggtttagataggaacaggtgctgagcccgaagtgtgaatgcagtcacttaaaaaacaacag

SEQ ID NO: 56583 - DNA, 1031 bp, Homo sapiens
gcccttcccctgcggtgcaccctgcactggggtctgctggtgagaagctgctctggaagcctagatgcctggatgacacaagcatggccaggatcccacccctcctctgccactcagcccagtgaggagaaggatcctgcccccaccctggggctatgaggatggtgagctcatctctggggctgtcctgggagaatgcctggttaacagggcgggggtggggcacctggtgccagctcctgggctccctgctctgcccttcccacccctcagcccaccaagatacagctgttctctctggcctcctgggcagcactgtcacccaaggacagcctttttcagggtttaggaatgagggtcagggcaaaatcttcatcctatttttggtccagggctggagctggtccttgcccactctgtaccttagtcttttcggtgatagcaaaagcccagcctctctggatgggtggcttgcccatagcccaaggctggatggggatgaaggaacatcaaggttcttagttgtggtagatggatgggtgcaggaaccaccccttttggggatagaggctctttggttctggctgtcttagctgaggcctgtctagtctctgtctctttgtccctggtgagaagagggggcaggacggagtcagcaaatcctctcctgtcgtggccctcttgcagttgtggctactcaaggaaccagtgtccagagcagtctcatggagaaacctggtctcactccaagaggagcactcctcaaagtcagtgttactacgattttccaacaattagaggaggccagaaatgggctgccgtagaagtagtggccatgggctagtcaccttctctctctgggtcccacttttttatttgtaaaatttgaggttgtccctctaaggcccctttcagcttggtgctgggaactgctgagaagagggtggttcagccagctgtgtcctcctgaagggaaaagggaaagggaaagggaaaggggaaggggtgtcaggggaatgatatgggcatag

SEQ ID NO: 56584 - DNA, 1029 bp, Homo sapiens
gtgtctggcttcaaggtgtattccctcggagagggtgagcagccctgctcctctgcccttccctgtctcttcccaagcaggactccaagttcccgcctctcttttaccctttgtcccttgctttttcctttccttagcccatgttctagccgcttctattcagtcatttcccttgactccaggtggctgatcttagctgctcatcctacttgctgtccctttatgctatggcatgtcccctgatctggctcctctgtgtctctcatcagccctggtctaagccctttggctctcggagctgcagaaccccctgcactggggaggaacaactgcaggactcttgcgcttccagtgccttccttgttgctttcctatggcctctcccagaggtggccaggagggttgggattaggaggtattgctgggtggtgggaacagcttcttctggacatgtcaggctgctgtctccagagctcctggagtgggaagagaggccacactctgatgtgaccatctcctctatcctgttcctgtgcagaaaacagcaccaacaactccactggccagtctcgggctgtgattgcagcggcagctcggaggcgggacaacagtcacaatgagtactactatgaggaggctgagcatgagcgaagggtgcgcaagaggagggccaggtgggtccctgggggagaagaggagaggaggtgcttgttgggtgaatggggagaggaagaccaaggaacttctgtaactgctggaaatatagggcaatgatgacatgagttgggggtgtgtgcttgttttccgttgctgccctaacagattaccataaacttagcagctgtgaaacagcacacatttattatctcccagttccatgggtcaggtgcaggctggctggaggctgtgctcaggcctcacaggctgaaatcaagaggactctcatctgagcctatgctttctctttcaagctcattattatggggagaattcagtgccttgtcacatagccccataggcagtttacat

SEQ ID NO: 56585 - DNA, 4397 bp, Homo sapiens
agccattgcccaccttcaactctattgccagcttcctagaattgctttccctgagccacccttggtgagcaggtaactaaagatgttgcactttaaccttgacacctttggctccctcctggtgcagacctgcttggcacgaatcatacaagctgtgtgggaaggaaggaagaatgagggagggcttgcccaggtcacagcctggtgcagggagaagagcagcagatgggggtcaggggagccgagttcagtcctacctgatgagccacatccccctgtgcactccggcttcttcatttataaaatgagggtctgaagcagatgatctcaggccccttcctgctgtaacattctgaggttctagttcatatgcatagagtgagctcagggacgtccttcttgtctttggaaactatgacctaggggatgaaggaccgtgggtagatgacagagattcttatgcagccccttctttccacttcaggccttcttggagcgatacttggcggctggacctaccatccagtaccacaaggaacgctggctggccaaacagtggacattggtgagcgaggagccggtgaccaacggcctcaaggatggcatcgttttcctcttaaaacgccaggacttcagcctggtggtcagcaccaagaaggtcccattcttcaaactctccgaggaatttgtggatcccaagtcacacaagtttgtcatgaggctgcagtctgagacctcagtgtgactgtgcaacagcagggggagtgggaaactctggggggtcctgagggggtgggagggggcttggttctcaggcccagccacattcctgccacccttcttcttcttgctcttttttttttacttgaattaacgcacccccaccttctctcctcgcttcttccttattttaccccatgtgaacctggagagaccatcctgctgtcaacagtacctgggaaggactcccacctcaccaacaacttttgtattactctaggccctgcaggaatcagtgcctctctccctcttctttccctagtcttttcccagattacagtctctcctgaaagggcacagggccctgctgattgtactttcccctcctgagccccgactcacaaatccaagttcttaaaacatttctcttcagtggcccaacagggtttctctggggcacatggacatgactccagagagccacagtgccaaactcctccagggcagcaactggccctcctgtccctcaccccagccacaacaaaccctgggttctagggcagggatactcctgccacacagcccgagttagaaatctccttgctaggagcatttgcttccacatatatttagagcaaagaaggatcccatccttttcccagaaatctccacctaatgtttttggtttgtatggtcacgtgaccataggcaaccacgtggaaaccctctgtgaccacttttccagggacttaggggaaggtacctttcttccaatgtgtcttcctaggcagcccctgaggaggagggctgaatagatccctgaggttttggagagacccccatcactgactcctgctccctaaccctaccctcactttcgtccccgctcttcccagtgaaggatggtatgtagactcctgtacagacatagtggcttgcagaccctgacccagcccctgtggtcttagacaaatgtttttatttttgtcaccagccacccctgtcctgccgccttctctcgactccagagacctgttgcctcatctcttttggggaagagccggcagctcctcctcatcccctgccttaagtccagttctttgcctcaggggtctcgtttccttggccttccagggtccccaccccttttctccctgcctgattctctgagctctgggctccgtctgtattgggttgaggggcaaggattactgccttttgtaggtacttcacccctcaccccattttagcttccatagtctttgcaccaaatccaaattcttgataatttagatctcattttgagcaaaatttgctggccctctaataaatattttcaatataaatctgagcctttgactcagacatttttgccaaggagagtagaattaggaagtacccatatacatccagccaggatccacatggaggacctttctgatggctgcaatgactaggccattcctctgagtaactcacagtgtccttttgtaggcccttcttttccctgaaagactggttggtacttaccttgcagagcacatcctgggataagatccccagtgtctcccctgggaggctccccctctgtgtagcaccagccctgggaatgatggagcctagtgatcggggtttctcctgctgtcctttctgcaaaagttcacttgtttacccaccgcatgctagagaggagctcattggccaatgcttaccttgtccccaaaggggtgggttgtggagctcacttaggcagggcctctggctggggccagggttatgagataggcctgtatgaaatatgtcctgttctgggggtctgtctcttttcttctcttcaaaaactttgtgtcagagagtcccttctgagtcacataaatacctcactatcctggaaaacagggcctggatggtgactggggtcattgcctttgtggacaggatggagtgtggtgtggtctgaggagcaggttggggtgggggagagggaaaggatttgggatcttagttgctgccctaggttaggggctggggagtgtttattttaagatcctgccatgtttttaatcactgtgatttttttttcattcccctttcctaaaaaaaattttttgcctccaactctctaagcactaagggctgtgcctgagaatggtagcattttggtcttttgcttcagaactgtggtatctttgtcttttttcattattattattattattattattattattactattgttttttaaaatgtcaggatgaattgtcagacatatggccatgtgtttgtcctctgcttctcccctgtgggaagttgtctccatgctgtgaactgctgtggggtgtgcagctgactcagtccctctgagcagtttccccactgtgtctgtcccatcatgcgctggatctgctcattctcctgctgtgggggtatgcccacctcttacccccttgacaccatagggctgctgtggctgggcctcaccagcactgtcttttgtgtgactcatggcatcctcgttcatccccaccgtgcctagcaggccttccttttcaccacctcggaacgcttgcctttcctccctccacaacaggacgctgtgcctcagtccttcacctacctcgccactctgccactgtccccattggtcctttctcctaaactggtctttgtgctctctttgttttttcttatttccctcttgtctctcattttttcttcccattcccctcccatttcagcccttaacttttctctttcccatctccactcagtattccaatggcaaaccctgatgatgtaacacctgcgatgagacatcggactctccggaactttctcatctgacacgtctttttcccagggttcgtacttctcctccattggtcccaggctaactcccctgttcctctgtggtgtctgtcagtccgtctgtcttctctttcctctgcccttcccacagggcagtatctgctgatggattcagtcctggtgtgtgattgttgtgatttgttcttccgtgcgcaaaaggaagagggctttttgagtcccttccaagtgagattgtaaatgtagaattttccactgttggatctagattttttttccttttttttgggggggtggggttacagagctgagaccttgtgcatgcatgtagaaaattgtaaaatgtaaattttttttaatatataaaaagcttgtttctacagtttgcagtggatctaaacattacggcaattttaggatttttttcttaaacataggaactaaaactgtacaaattttttttatataaaataaagacatttgacttttgtgggggcattctgttgcttttctttctttacaggaatgggagcaaatgagggccagggaataatgaatatattccttgttagggagggaatgggcaggagggggcagtgtgagctcatcattgctctgcaggccttcagggtgtgttggagagaaatgggaaaatgaaaaaggaaattgcttattctgaatcctgattctaaagagagagaaacaacaatgtgagggcttaaccacttcctggtgtagttgtcaggatagagaaagaaagattacttcctgggtccaccctcctgagcaagcttgtgtctgtatggcctctagggcaggagtgggtttctaaaacgtatttctaaaacat

SEQ ID NO: 56586 - DNA, 1016 bp, Homo sapiens
ctgttaatgttagttctctttgacataagaatgtgtgattttagggtggggttggctgggatggtttttactgtaataaagaacacttgttgaaggacttcttgtcttctgtcagtttacttatatcttaacacagtacctctggcctcaaagatggaatccagttgaagtgaaagcagatccaaactgtatcatcagggaaagctgagcttgtagaattcattttcagtgactggtacgagattgtgtacttctggtttggagcatattgaagaattcgaccctgggcaacctttttcctggaattgaaatgttcatcgggtttttactctgtcttgaaataggtccccaaaatagagtttttcaaactttaatggtgcgtatagcaagtgtacaaatcacttggggattatgtgaaatacagaccctgattcaacaggtctgggtagggtctgagtttcttcatttcaaacaggtgcccaggtgtcttagtcagctcaggctgctgtaacaaaataccatagactgactgggggtcttaaaatccagaaatttattcctcatagttcttgaggctggaagtccgagattgggctggcaagcatggttaggatctgatgagggatctcttcttggcttataggatgctgctttcttgctgtgccctcacatggcagagagagagagagagagagagagagagagagagagtgagagagcgaggtttcttatgtctcttcttataagggcactaattccatcacgagggccctagtctcataacctcatctaaatctaattacctcccaaaggccgcatttccaaataacatcaaattgggggttaggcttcaacatatgcattctggggcaacacagtataaagcaccaggtgctgctgctgatgttctacagaccttattttgagcagcaaggccctaaaagaagcttaatatacccctgaaaatttgagggtcctaaacacgccttacttaactctaagataattgatgcaag

SEQ ID NO: 56587 - DNA, 1924 bp, Homo sapiens
aagacccatcagtgtgctgtattcaggagacccatctcacatgcagagacacacataggctcaaaataaagggatggaggaagatctaccaagcaaatggaaaacaaaaaaaggcaggggttgcaatcctagtctctgataaaacagactttaaaccaacaaagatcaaaagagacaaagaaggccattacataatggtaatgggatcaactcaacaagaagagctaactcctaaatacatatgcacctggcactcccagccggccacagcctgacacgccgcgcggccccccagtctcccgcggccgctcccccaggcatggcacagggcctcgcctcactatggcagcagcacggcacagcacgctcgacttcatgctcagtgccaaagctgatggtgagaccattctaaaaggcctccagtccattttccaggagcaggggatggcggagtcggtgcacacctggcaggaccatggctatttagcaacctacacaaacaagaatggcagctttgccaatatgagaatttacccacatggattggtgttgctggaccttcagagttatgatggtgatgcgcaaggcaaagaagagatcgacagtattttgaacaaagtagaagaaagaatgaaagaattgagtcaggacagtactgggcgggtgaaacgattaccacccatagtgcgaggagagccatcgacagatattggcccaccgccgatgggcgcctggttgaatatgacatagatgaagtggtatatgatgaagattcaccttatcaaaatataaaaattctacactcgaagcagtttggaaatattctcattcttagtggggatgttaatttggcagagagtgatttggcatatacccgggccatcatgggcagtggcaaagaagattacactggcaaagatgtactcattctgggaggtggagacagaggcatattgtgtgaaatagtcaaactaaaaccaaagatggtcactatggtagagactgaccaaatgatgattgatgggtgtaagaaatacatgcgaaaaacgtgtggcgatgtcttagacaatcttaaaggagactgctatcaggttctaatagaagactgtatcccggtactgaagagatacaccaaagaagggagagaatttgattatgtgattaatgatttgacagctgttccaatctccacgtctccagaagaagattccacatgggagtttctcagactgattcttgacctctcaatgaaagtgttgaaacaggatgggaaatattttacacaggggaactgtgtcaatctgaaagaagcactgtcgctctatgaagaacagctggggcgcctgtattgtcctgtggaattttcaaaggagatcatctgtgtcccttcatacctggaattgtgggtattttacactgtttggaagaaagctaaaccctgaagatcagtagcccctaatcacatgtgctgcaaatagccttcctgacctccatatgctgtacatgacatcaaaatgagtcaggcaattgattgtgaagtccttaaagttttcctttttttagtaattatttttaatttaaaaaagcaaatggaaaatgtatattttgatgagcttagggtgttttttttgaaagtcagctgaaggatggttagacagcacagcgaagactgctaaatgcactgacccccccattagaatgtgatttttgttcctttttatttatctgtgggcttttgtttttgtttttgttttggtagatcttcagtttggatatttggaggagtgaacatcgttgttttgctggagggaagatcttgatggtgtttctttccccaaaaattgacttagatattaaaaattggtgcttataagagagagttaaaaaaataggattgcttcaattaaaattacaaaagagaaaa

SEQ ID NO: 56588 - DNA, 3401 bp, Homo sapiens
accttcaagtccgtgacacgggaagacactgggacatacacttgtatggtctctgaggaaggcggcaacagctatggggaggtcaaggtcaagctcatcgtgcttggtacgtgccccatgtcttctgggtgggcctggagttagttacttctcatagcaggctctgctgcactttggagctctttgatggtgagaatacccacaggtgggctattcagagtcctggagctgccagagagggagatgagcccctggttaggtggcagccaggggcatggtgagagtaggaggcttgagctgagtagttgggggtaccattgtagttggttacttagactcaagcagcccccaccctgtactcagcaccttctgtctttctcttccacagtgcctccatccaagcctacagttaacatcccctcctctgccaccattgggaaccgggcagtgctgacatgctcagaacaagatggttccccaccttctgaatacacctggttcaaagatgggatagtgatgcctacgaatcccaaaagcacccgtgccttcagcaactcttcctatgtcctgaatcccacaacaggagagctggtatgtatggggtggtggtgaaagatgtgtgggggatgcagttatagaaccccaaaaggtgggaggaagaacaggcaacagggtgaacttggaactggggtcaagagacattaaaaaatgtctattttgcttcttcagcaggaagccaatttgttttccttcctcaggtctttgatcccctgtcagcctctgatactggagaatacagctgtgaggcacggaatgggtatgggacacccatgacttcaaatgctgtgcgcatggaagctggtgagagttagggcttgagcccagacctggggtggggattggggtctgcttttcatcctgccattggtgatactgtaggtgccgtgagtgagtatccccgtgcctgacttcttatttgtgtctcgcagtggagcggaatgtgggggtcatcgtggcagccgtccttgtaaccctgattctcctgggaatcttggtttttggcatctggtttgcctatagccgaggccactttgacagtaagtatctgcccccagaggctctcctttgtactgcccccatcccagggcctggcatgggtgtcatctgagtactgaccctgatactgtgctcatgtgtgtgggtgttgtcccctggggaacactgatcacccatctaacaccaagagctgggggcctgcccctccatcttcccaagccatgctgtcttctgtcctgctgacactcatgatcccatttcttctctttcaggaacaaagaaagggtgagtgaggtgctgtcctggggttctccaagtttgagagcatggatgcatgtggtttgaagctgaagtgggcctaggggaatgggttgaaggcagaagcaaccagtttggagggaaggcatttggatatccagccctttctctgtggccttggccctgggtctgtcctgttaccccacccatacctgtctgctgcgcactctgtgcttctgtagcattctcgcttctggcctttaaagttggcaaggggaggttaataagcacctaggtggctgagtgtctctgtcttctggcttgttcacaggacttcgagtaagaaggtgatttacagccagcctagtgcccgaagtgaagtgagtatgcctcccctgggcaggggtgggccacctggggctggagtgaggagatttctagcccatgtttatgtgttttggggattatcagctaaagaagactattgagagttgactggatgttttatttctgcagggagaattcaaacagacctcgtcattcctggtgtgagcctggtcggctcaccgcctatcatctgcatttgccttactcaggtgctaccggactctggcccctgatgtctgtagtttcacaggatgccttatttgtcttctacaccccacagggccccctacttcttcggatgtgtttttaataatgtcagctatgtgccccatcctccttcatgccctccctccctttcctaccactgctgagtggcctggaacttgtttaaagtgtttattccccatttctttgagggatcaggaaggaatcctgggtatgccattgacttcccttctaagtagacagcaaaaatggcgggggtcgcaggaatctgcactcaactgcccacctggctggcagggatctttgaataggtatcttgagcttggttctgggctctttccttgtgtactgacgaccagggccagctgttctagagcgggaattagaggctagagcggctgaaatggttgtttggtgatgacactggggtccttccatctctggggcccactctcttctgtcttcccatgggaagtgccactgggatccctctgccctgtcctcctgaatacaagctgactgacattgactgtgtctgtggaaaatgggagctcttgttgtggagagcatagtaaattttcagagaacttgaagccaaaaggatttaaaaccgctgctctaaagaaaagaaaactggaggctgggcgcagtggctcacgcctataatcccagaggctgaggcaggcggatcacctgaggtcaggagttcaagatcagcctgaccaacatggagaaaccctactaaaaatacaaagttagccaggcatagtggtgcatgcctgtaatcccagctgctcaggagcctggcaacaagagcaaaactccagctcaaaaaaaaaaagaaagaaaagaaagctggagctggtggcttaggccatcacccttcccttggctggaactactggacagacccttttgagatgtgcctgtggtgctgtggagatgtgtgtagtggtcttagctctttgttgagcttgtgtgtgtgttgtgtagtcttagctgtatgctgaaattgggcgtgtgttggagggcttcttagctctttggtgagattgtatttctatgtgtttgtatcagctgaatgttgctggaaataaaaccttggtttgtcaaggctcttttttgtgggaagtaagtaggggaaaaggtctttgagggttcctaggctcctttgtacaacaggaaaatgcctcaaagccttgcttcccagcaacctggggctggttcccagtgcctggtcctgccccttcctggttcttatctcaaggcagagcttctgaatttcaggccttcattccagagccctcttgtggccaggccttcctttgctggaggaaggtacacagggtgaagctgatgctgtacttgggggatctccttggcctgttccaccaagtgagagaaggtacttactcttgtacctcctgttcagccaggtgcattaacagacctccctacagctgtaggaactactg

SEQ ID NO: 56589 - DNA, 1067 bp, Homo sapiens
aacgtgtcataatgtacacgaaaacacttttaaaagcaccacatgctccacaaatgtcgagtattattattatcctcatcatggctctgcccttcccttccatcccttgcctccagccctgctggcttccttccaggattgtcctgacaagtggctgcaatcatttgttgagaagctttctctgaacagtgaaatgtcattctggaagctgcccttggactagtagaaatctaattagattattgggagtcacagagagaaaaattagaagcaaaagaaactgcattcccatggataaaagaagtattagctggcaattgtagcaaaaagcacttaaagaagacatttaggatcatggtgacaaagtgtgagagccagagggagcataagtctggaatcccttcctcttagggtctgtgaatggagaagccctgtccactgggtctgtgactccttcttcctggcatttctctgtccactcctgacagggcccacctctttctttctccttaggctccctggcattgggcagtgttacagtgcactcttctgaacctgaagtcagaattcctgagaataatcgtgagttgggaggggccatggagggtgtgagggtgagcagttgccggccgcctggggatctagagagcacccagcccagcctgcagtttggggctgttccccatctcgtgtatttgctgctgcttcttccttcggctcattttgaccctgtctgcagctgtgaagttgtcctgtgcctactcgggcttttcttctccccgtgtggagtggaagtttgaccaaggagacaccaccagactcgtttgctataataacaagatcacaggtgagttgcttctcctccttcctgattgcctaggttgtggagggattatcatgcctggattctacgatccagactttgtgcccttatcccagggcacaccctggggctgaagtcctcatggccttcctacccccctttctgggggaagaggagagcacttgcgtaccttggatgcccccttcatcagcctcccttagctctccagttcactctgtccttg

SEQ ID NO: 56590 - DNA, 1108 bp, Homo sapiens
gcctgcctcagcctcccaaagtgctgggattacaggcgtgagtcaccgtgcctggctggagaatggactttctatacatgggcccaaaacctaagcaggccaaaatctattgatgcctttaactttgtggcttttcttgttgtgaacttagagaaaattaaacttgacaatggaaaggatggaatttccttctattattcgtttaccacgtacatcagtaggacatttgcatgtgtgtgtacagtatggtatgtatgggcccaaggttaagtgcaaaaggggggctgtgaagaggcacgggaaaatatgaaatagatgaggaggatggacagggaaactgtgagtgtcctgatgtagattggattcagtgagagcaagttcctagctctgctggtacagctgtgaaggttctagagaaggggccgccttcccaaggcagctgcaatgacaggggagatatggtttggtaggctggagtaggcacttttcaggctttatttatatgtcttgttgaagaaaacattgaagtcagaaagaagtatgtgtacagaagggcctatgaacagatgatgataatcataaaatataatacttatttggggtttcctgttcagacactgctctaagcactttatttgtacagtattagcttgtttagccttcagaacagccctttgatgtagaaactgttattatccccattttacagatgcgtaaactcagatttgaggaggccaagtggcttgtccaggtcacatagcctagtaagtaacagagctgggatttttttttttttttcttttctgagacagagtttctcccttgttggccaggctggagtgcaatggcacgatcttggctcactgcaacctctgcctcccaggttcaagcaattctcctgcctcagcctcctgagtagctgggattacaggcatgcaccaccacgcctggttaattttgtatttttagtagagacgaggtttctccatgttggtcaagctggtctcgaactccccacctcaggtgatctgcccgccttggcctcccaaagtgctgggattacaggcatgagccactgcgcccagcattttttttttttttttgagac

SEQ ID NO: 56591 - DNA, 1073 bp, Homo sapiens
agcctgggcgacagagcaagactcagtttccaaaaaaaacgaacaatgaaacctaaataacgttaaattgttcttgtacatgaatttttttttttttttttttttttaagatggagtcccactctatcgcccagactggagtgcagtggcgtaatctcagctcactgcaacctccacctcccaggttcaagcctcagcctaccaagtagctgggattcaggtgcctgccaccacgcccagctaatttttatatttttggtacagatggggtttcaccattttggtcaggttggtctcaaactcctggcctcaagtgatccgtccgcctcagcctcccgaagtgctgggattacaggcgtgagccactgcacccagccaaaatatttaaacttatctttgattgctttcttaggctatattcctagaaattggggtgagattaattttgactgaggaaaggtataagagatcaatagacatttgaacaggatcttgaaagatacatgggatttccttgcttgtccaataaagctacatatagcataatagttttagagcctcaaaatcaggcagagttaagattcctaccttgctatttgtagccatatggtttggatcaactgttttttttttttttttgatggagtctcgctctgtcacccaggctggagtgcagtggcttaatctcagctcaatgcaacctccccctctcggcttcaagcaattctcctgccttagcctcctgagtcgctgggattacaggcgcctgccaccatgcccagctaatttttgtatttttagtagagacggggtttcaccacgttggccaggctagtctcgaactcctgaccttgtgatccgcttgcttcggactctcaaagttctgggattacacgtgtgagccactatgcctggcctgggtcaactgttctaagcctcagttttttcatctgtaaaatgaaatggtaacggtagtacttcaatcttcaatggtacttgtctcataggttttttttttttttaagagtttagtgagaaaatgcatataaggcctaacattaataatatgccac

SEQ ID NO: 56592 - DNA, 1065 bp, Homo sapiens
caccacacccaaaaatagatttaaatgccatgcacattttatgtgataataatgagacttgtttatcacatctgttaggtttgactagagaccctggagatctctaaactcaaaccagtttctgtttcagagattcaggaaagacctggatgaccttgcgtccaacataattgaggatgaggtttcactattgtgtgacggttgtggaaagcagtatgagtgaacacatactgtgagagtggatacacactagggttttcctggcattgagaacccagagttcatctgcctggactccctgataagcagggtttctgtctaaagtccggctgcgtcatttgtttcacaatgtaggggcggaacaggaggaagcagctggctggcaggaagtgggtgctgggcccctgaagtaagtcctgcgctggaaggctcgaccttcccttgcactgggaagatggggtggcgggggagctgagcaggtagaaccggaaattctgcagagagggcgggagggagccagggagtgaaagcgagcctgtcttaccctgccattaccactttctgccatcctcagaggacccgagccagctgatcgacatcactgaaagtgcagccaaggatggctatttagacatagcccagcctgttgttggcctcacagagccttcctcttgctcacacatttctaaactgttctaccccaaaccccggaaaggcccttccctgtggaacttccctggcccatggagcctcttgatctttacgaggaggccaacccttatgggagttacttcaatctctacagggtgagtggtggggaggaaggggaaaaccagagtggaagctctaggtccaggttctaattgtattgcagtgtgaaattcacttgttaatccaacaaacattggtgtttactatgttctgagcactgtgctagagattagggggaaaacatgaagttaaactgggtatgctgtagctggtggggtgaggaggccctgactcatccttcctattgcagggctccagctccctggcaactggggggtcttgtgagtctcatat

SEQ ID NO: 56593 - DNA, 1716 bp, Homo sapiens
ttacaggtgttgggctgggggacagtcaggtctttcccttcccacgaggccatatttcagactatcacatggggagaaaccttggacaatacctggctttcctaggcagaggtccctgcggccttccgcagtgtttttgtccctgggtacttgagattagggagtggtgatgactcttaaggagcatgctgccttcaagcatttgtttaacaaagcacatcttgcacaacccttaatccatttaaccctgagtttgacacagcacatgtttcagagagcaaggggttgggggtaaggccatagattaacagcatcccaaggcagaagaatttttcttagtacagaacaaaatggagtctcctatgtctacttctttctacacagacacagtaacaatctgatctctcttgcttttccccacactggtgagtcactcctcctttcctctccctctactcccaggagtgaattgttccctccaaactagaaactggtgactggcacttcctagttctacctggaactaggaaacgagtggcagtggaatttcagtgtcctttagtctttgccttctggctccagatcactttttttttttttgagacggagtctcattctgttacccaggctggaatgcagtagcatgatcttggctcactgcaacctccacctcccggcttcaagcgattctcctgccttagcctccccagcagctgggactacaggcacgcgccaccacgcccggctaattttttgtattatttatttatttatttgtttttgagacagagtctctctctgtcgccaggctggagtacagtggcacgatctcggctcactgcaaactccacctcccgggttcatgccattctcctgcctcagcctcctgagtagctgggactacaggcgcccgccaccatgcctggctaattttttctatttttagttgagacgaggtttcactgtgttagccaggatggtcttgatctcctgacctcatgatctgcccgccacggcctccaaaagtgctgggattacaggcgtgagccaccgcgcccggcccctaattttttgtatttttagtagagacgggttttcaccatgttggccaggctggtctcgaactcctgacttcaagtaatcctcttgcctaggctttccaaagtgctgggattacaggcgtgaacccctgcacctggccactccagaccacttttacctcaccatgttgctcttcagttcctttgtgatcatgtcttgtggagtctccagcccagttccgattcaagatagagctactgtgattttttttaaaaaaatttaattagaataggttaattgacatggttttataattaaaatgatatcaaaggggtggggtatctcattcccatgttgctcctgttcaccccaaaccccaatagtttctaatgtctcttcagtgtttcattttacagatacaagtatatataaataatacttgttttttctcccctttctgacacaaaaagaggcatactacatatattctacatcttgcttatatatatatatcatggagttttgttgttgttgttgttgtttttgaaacagggtctcactctgttgcccaggctggagtacaatggcatgatcatagctcactgcagcctttttttttttttttgagacaaagtcttgctgtgttgcccagggaggagtccagtggcgtgatct

SEQ ID NO: 56594 - DNA, 1056 bp, Homo sapiens
caccgcaacctccgccttccgggtttaagcgattctcctgcctcagcctcccgagtagctggaattacaggcatgcaccatcacgcccggctaattttttgtttttagtagagatggggtttcaccatgttggtcgggctggtcttgaattcctgctctcaggtgatccacccgcctcggcctcccaacgtgctgggattacaggtgtgagccaccgcggctggccatgtcttcctttttttctactctttgagttcccttttctttaatttcccttttttccctaccccttgcctattttacttctgcctgtattttagaactgctagtgacacccatagtcaatttttggttatgtggttctggtactaaaggtttttccaacctttgtactgtgccagtatttttcccctaagcccagaagtttcttctgtgtgagtgactgtatttgtaacagtgtttgtctgtgacagtatttgtcaggcttaaaagcttcctggagctgcttactccctatcctttgccactgcttcctttcttttttctccctctaatttcctatattatttatgataatcctaaaataatcatatactggcactggaaggtcatgataacaccattttgagcttggaggtgtcttcagggaaccaagccacagtagtgcagagggaacctgagatgatgtcgcattagcctgttaggacagtgggtcctgggaagtgacttgtccaggggatggaggaactgaccttgtaacttttaaatcaggctagatctggggttgggttgggggaggggagtgatttggttagtgcaaatgaggatggaaatgggagctgggccaccatacctgcattctagcttggctttctctctgccttgtttgtgatcttaggcagtagctcagtcttttcatctgtaaaatagcagtaatacttgtcccacctttgtcaggaggatcaaccagcataatagttacattacatatacatgaagggattatttttgggcagctgttatcccctgtggattttgtgaggatggaagaatgcc

SEQ ID NO: 56595 - DNA, 1522 bp, Homo sapiens
aggcgccgcgaacaggtgctgcgggggcggcgcgggaggcggtgcccttgcttccggatccggtctcagctctgggagggaacgggagatgttgcaggcgccgagagggcgggccagggccgcactccggagactcgcggttgctacgcgcaccatggctggaggtacctgcgggggattcctggggccgcggttctcttggtcctctgggttgaggcgtggcagggagtggggtggcggagcgaaggggcgtggctgaggggtcttcgtgcacaccctaccgggaggggcgctgccaggtgaggggatgccatggcggccgtgactcctaggccccctcttcctgaaggctgtcgcgccccttcctcagcgcccacggtctcgcttcctgaactccgttcactcctagcctccggacgggcccggctcttcgacgtgcgctctcgcgaggaggcggcagctgggaccatcccaggggcgctcaacatcccgggtatagggtggagaggggacgcccaggtggtggaatagagaccgttcaggaggttctttgccaatgggacctcatttaggatggaatggggaaggcactgattatgggggtcctgcattcccgggagccagccctcagcttccgtaggaaggactgatggggggcggatcttggcatcggaactggcccatccagtttgagaagacagcaggcggagaggagaggggcagaccagcttctcttgacctccccaaatctggacgcctgagggggcatcccgccccgcctcctcacagcttagggagtggcttgcattcaaaagttgtcggtttctgttccttgaaattggggtgggggtaggggatggttatcatatgttgtttgggggcccccaggacccagcccttccaggcccagcttccgaacctgagtgccaaattgctggctttcccttctaccctctccactcctccagtgtccgagttggagagtgctctgcagatggagccagctgccttccaggctttatattctgctgagaagccaaagctggaagatgagcatctcgttttcttctgtcagatgggcaagcggggcctccaggccacgcagctggcccggagtcttggatacactgggtacggggaggtgtggctgctagctgggaggtgatggggactgcctgtcattcctgtcagtctctcacgcttctttgtctccacagggctcgcaactacgctggagcctatagagaatggttggagaaagagagttaggcaggaggcagcttactgattgccaccccctggccccttaatggccaccttaactaagggtgtgaacgggctgacttggtgaattgggcaactccttatagtgttgtgcacacaaaagcatcaaataaagaacatttaatcaaagtattggaagcacttaatgtgtcaggtggactgaaaacagttctaatctttatctagacctcaattcagccctggatcatcatttcgcagcattcatctgcttccccct

SEQ ID NO: 56596 - DNA, 1189 bp, Homo sapiens
aatggtagagagaggggcacacatgacagtagtcttatctctccctgaggttcctgtatccctgggagatattataccaccttccttagatgaaaatgaggtccaaagtgtgaacctacttttggaaagcaagctgggtatctgaaatcctagttctcattttgttgaccttatcttgcagagtaaaggtgggattctatccaaagcttgtgattatatccaggagcttcggcagagtaaccaccgcttgtctgaagaactgcagggacttgaccaactgcagctggacaatgacgtgcttcgacaacaggtcagactcctacccccagtgcagcccttctcagttctgctagccactgacccagtttgacaccctctactttgttctccatggagaaggcttcatcttttccccctcaccagtggatgtctgaatacattcaggggcttggaagtgccagctttactacccattccctttactgcctccttcccatgtcaggtggaagatcttaaaaacaagaatctgctgcttcgagctcagttgcggcaccacggattagaggtcgtcatcaagaatgacagcaactaactatggggattcaggggctttgggcccaagaactgcagatagcccaggagcaacagcctaatcccgtgcccctttccttcactgccccacttctggcatgggacagggggaagttcagaaggtgtgtccttgaactgaggccctgtgatatggcggcctgcagtggtgtgaaacacacaatgtggacgtgcactgacagccttgcccacccccaccatgcagcccctgggcccttgtgctcctctcgcacaatgcatgtgctgtctccatgctggatactggacacactaaactctggggcttgtcctgtgcttgcttagagtgcccagcagaggtttgctgacaggtgatgctctggcttgccccaggactctggcacttccattggttcttcctttccctggagctgaggtttagatgtgcaacctgtggctcaggggagcaagcttacacaagaagtgagggaaggatgtttagcagtggctggtgcccatgaagaggagattggccagtgagaagctgaggcctatgcagacatctctggagccagagagaacaacaggcaggggcccacttggggccttcccccttgtgggg

SEQ ID NO: 56597 - DNA, 1081 bp, Homo sapiens
acagaaggtgtgagcctttagaacactagaagctttggggtctttggatgagtgactgctgacgcgaataacaaggaacatatccaattctatgcatgccccgataggtcgtaatctctagcaggtaacctttcaaaaagacgccctgcgccaagatggcctcccaaatagcccttgttaaagatggcgcctccgtcggacgtccctcccttgatctcagctggattctcttctttcctggaatgaaaaaatgccctgccaagcactaagatattagtacaagttagtcgtctctttcccgttcttgtcgaaagtggccaggccttcagctacattctccaggacacggcttctttccggcttcacaaataacccacaaacaccaactctcatcaagatggagtgagcggaagtggggcagttctgagtttgagtttatgggcggggcgagagcgacacttccgcccctcaccaacatggccgcgggctggaagtgcgcatgagcagctgtctatggagatacctaggccgggagagggagaacacagttggagaaaatcggcagctgagacggccttggccggtgagtgtaggaccgggcagaagtctggaaactgggtggactggcaaggcagggcagctttgattttgtttccgtttttcaagttagagaacactgctggggaggaagcctttgttttgggggagggggctgtgctggttctttatctcataccctgctttgtgggccaaactctctcccttccccagagcgcgagcgtcccagccctcctgcgctgtccagctgcgcgccgcagccgccggcaccgggcgcttgagctccctagtccccgaggccctttcctgcctcctccgcggagcagctggggcgcggggctaagactgcggggctgcggggtcacggcgcaggctcccgggctcgcgcctggcgggcgctcagctccgtaagcgccttctggttggtgagcctgcagggagacgcctcattctaaggcaaggtctaggtgcctgacttctttcgggagttgattttttttccctttgtgtccagacttagcaa

SEQ ID NO: 56598 - DNA, 1031 bp, Homo sapiens
ttcacctttcccagggttagcctgtgtttcaaatgcatatgacctgcgctgagaggacaacagggggtcaggaacctggggttctctggggggcagactaagacgactccgggatccagacccttctgcaccttcagatgggagctccaggcagctaaggggccgaggagaatgggcagagatcatgctacaaggggaggttctggggatgaggcagtaatccccaccctcagtacaggtctgggttcgccgaactccttgagcctcagtcctttggcggtcccgggctagggccacagcagcatcaaaggaaagactacccccattcctccaagaggatcgagaagctcgggacccccaagccctttctccaggagtcccatcaagccggccaggcctcgggcatggatttgcaggtgccacatgaatcttgctacacattgcactgggcatcttggcaaactgtggcttggggggcaccacaggcacagagcggacctgttggacctgaaccagagtggaagctagacgcatgcccacgccacccaggccaagagaacaggggcatagacagccgtctggactgggctgcccctcaggctccatctcctctggctgaggtggctgtggggctacctcttccatctcagaagagtgaggattgccctctttggcacagtcaacctccagggacgctacacctgaaccttcagagagggtgtcctcttctaaatagtaccctccagccctctggtctccctcagcctctccatccccactctcccgttccttgctgacctcccctgctcctccttcagttgctgcttctgggcttctgctgtcttcaccatctccttggtcttttcttgcttcatggtaccccttctccctctgtcctttgtcctcatcctctctgactccctcagcctcttgtttctgtacaacttcccatttctcctcagcaacttgatcttcctgggccccttgctctaggtcccttccagcttctacctgggcttcctctctttgtt

SEQ ID NO: 56599 - DNA, 1041 bp, Homo sapiens
gagttctctgtggagccacccctggatgacctgtctctggatgaggcacagtttgtcttggcccccagctgctgttccctggactccgctggccccaggcctgaagttgaggaggaaaatggggaggaagttttcctgagtgcctatgatgacctaagtccccttctgggacctaaacccccaatctggaagggttcagggagtctggagggagaggcagcaggatgtggaaggcaggctctgggacagggtggggaagagcaggcatgctgggaagttggggaggacaagcaggctgagcctggaggcaggctagacatcagggaagaggcagagggaagtccagagaccaaggtggaggctggaaaggccagtgaggatagaggggaggctgggggaagccaagagacaaaagtcagattgagagaagggagtagggaagagacagaggccaaggaagagaagtccaaaggtcagaagaaggctgacagtatggaggctaaaggtgtggaggaaccaggaggagatgagtatacagatgagaaggaaaaagaaattgagagagaagaggatgaacaaagagaggaagcccaggtagaagctggaagggacctagagcaaggggcccaggaagatcaagttgctgaggagaaatgggaagttgtacagaaacaagaggctgagggagtcagagaggatgaggacaaaggacagagggagaaggggtaccatgaagcaagaaaagaccaaggagatggtgaagacagcagaagcccagaagcagcaactgaaggaggagcaggggaggtcagcaaggaacgggagagtggggatggagaggctgagggagaccagagggctggagggtactatttagaagaggacaccctctctgaaggttcaggtgtagcgtccctggaggttgactgtgccaaagagggcaatcctcactcttctgagatggaagaggtagccccacagccacctcagccagaggagatggagcctgaggggcagcccagtccagacggctgtctatgc

SEQ ID NO: 56600 - DNA, 1188 bp, Homo sapiens
aacttgttatatgatagatattgtcctaagttcttgatgtaattacttaatccttacaacattctgtgaggcaggtattatctgtattttattggtgaagaaacatcagaaaagaagtaattaatacttatgcattctgtgagacaggtattaatctgtattttattggtgaagaaacattcagaaaagaagtaacttgtcatggtctgacgttaagccatttctgtcaggcacaaaaaagctccttcctctaacttgtaaatgtgggactagaatttctgaaaaggcctggttttgcaggcaagtagaataaaggcaattgctggaactatagaagtagctaagaatgccacttgaaatagtataggttaccctgatttgattatatgaatatatcaaattatcacaataccatgaaaatatgattatgaatcaataaaaaataatttcaaaaataatgtaggtaatgaagaagtgctatgaatagaatcttagatcctgtggccattgtgggagtgaaagaggaagaactttcagaaaggagaaagaaggaggcttgagataggaaggagaactgaagggacctggaaaccaaaggggagtcgaagatctacattgtatcgggcacttgacctattatctcagttagttctcattgttaccctgtagcagtgattctcaactggcattatcttttcctaggagacatctggcagtgtctggagacatttttggttgtcacaaatcaaaggggttgctactgacttttagtgggtatagtccagggatttgttaaacatcctataatgcctgagacagccctcctagcaaagaatgatttggcctaacatgtcagtagtgacaatgttgagaaaccctgccctgtggtatattatattaagtccattttataaatgaggaaacaaggaaagttaagtgactcagtcatatagcaagtaaatggcaaaactgggatttcaacccaggtcagaataagaagtttgggttctttccactttactatgttgctacttggatcccagtacttggggaggctgaggcaggaggatctcttgaagccacgagtttgaaaccagcctgggcaacatagtaagacccccatctcgggctgggcgcagtggctaacacctgtaatcccagcactttgggaggctgaggcgggcggat

SEQ ID NO: 56601 - DNA, 1024 bp, Homo sapiens
aatatggagaaaagggggtaaaagaggaatataagatgtctctcaggtttctgtctttggtggataatggtgccataaggaatgtaggaagacagacaattttgggggaaatgtaagtttattttaggattttgagtttaggtttcttgtgggacacccaggttaaacattcagtagacactttgatttttaaatcttgagatacagtaagaaatctgagttggagatacagatttgagaattgagtttatggatgataaagccgtggttatggataaaaatgatcactttccatagtttgtacagaaagtgaaaaaagaagtagaacaagagtggaaccactgttttaggggagctaaagagaacccctcaaacttccctcaggaaactgaggaagtgtgataagtgagttttgaggctgttccttgattaacattctcttgcctttgtttattctggagagaacactgggtaaaacattacaagatttatcactgctgcaaatttgagccacatatgtcccttacaaacaagatggaagcaaataacacattgtgttagacacttgttttaccttctgttactgactgagacagggtctcattctgttgcccaggctggagtgcagtggtgcgatcacggctcactgcagcctcaacctcccaaggctcaggtgatccttctacctcagcctcccaagttactgggactacatgcgtgtgccaccctgcccagctaatttttgtatttcttgtagagatggagttttgccatgttgcccaggctggtcttgaactcttgggctcaagcagtccacctgccttggcttcccaaagtgctaggattacaggcatgagctgagccaccgctcaggcctaccttctgttattcaattactgccatttgaagtaggttgtgttgtcctccatttataggtgaggacattttaatttcagaggctttagttaacttgcccaaggtcagtaactggaagagcaggatttttaaatgagggacttaagaa

SEQ ID NO: 56602 - DNA, 1018 bp, Homo sapiens
gtagctgggactacaggcgcgcgccgccacacctggctaatttttgtatttttagtagagacggggtttcaccatattggccaggctggtctccaactcctgacctaatgatccgcacgcctcggcctcccaaagtactgggattacaggcgtgagccaccgctcccggcctacagctgtcttaattataggttcagtttttgttgaacaattaatacaagcagatgtatcagcataaagatttttatttttattgttttttgagacagagtttcgctctgtcatccaggctggagtacagttgcgggatgtcggctcaccacagcctccacctcccgggttcaagcatttctgccttagcctcccgagtagctgggattacatgcccgcaccaccacgcccagttaatttttgtagaggcaggatttcaccatgttgcccatgctggtctcgaagagcatagtctagtggggtaaataagagaagcaaaatgctcatatgaggcagaagataagtgtcctaagagaagtataaagtgctatggaatatggtttctgacttggggtgggggaagggaaaaggaacctaatgctttttaatacttttttgttgttgagacggagtctctgttgccgaggctggagtgcagtggcgtgatctcggctgactgcaacctctgcctcccaggttcaagagattctggtgcctcagcctcccgagtagctgggattacaggtgcaccaccatacctggctaattgttgtctttttggtagagacggggtttcaccatgttggccaagctggtctcgaactcctgacctcaagtgatccgcctgccttggcctcccagagtggtgggattacaggcatgagccacagtacttttttttttagagacagagtttcacttcgttgctcaggctgagtgcaatggcgtgatgatagcccgctgcagccttgaaatccctgggtgatcaagccatcctcctgactcagcctcctgagtagctgggact

SEQ ID NO: 56603 - DNA, 1159 bp, Homo sapiens
tttccgcagtccaaaagtcatctccgggaactatccttggttttcccaagactctctccttgactgtgcacttgcgcagctttactgactcgaagcatatttcccctttcaccagaatctcgcaggggaaagttcaccctctctcgtctcccacccctccctggtgggcaaggggcaaaggaacccaggccccaagccgcgccccgccctccaccctcccgccgcccgctccagttggcccgtccctccccgcctctcccagaggcagcatctctgttacacaagttaaagcaccgcaggtgggattcaccgcggccgacgggatagggagtaggtcctacatgaagatatagccaaaaccattcgcagggtccgatccggagggcggtctggagccagaagcgccgcagcgagtgggcggtaactcgcaggccggacgtgacgcaaggcgggggctgagctgcgccggccggaaacccagcaggcggcgaagatggcggagaacagcggtcgcgccggcaagagcagcgggagcggcgcggggaagggggcggtgtccgcagagcaggtgaggagtggctaacgcgaagcagggtacccacctgggtctggaatactagcgagaagggggagcctgtggcttgtgcaggcctttactccagcaccacatgtgcgtggcacctagagagggaagggtccccggaaaagctagccgaaccccttcggagaggtagacgggtgggtaggtgagagccacgcctccgtgaggtggtgggtgagcctgagcaaggggaaagccctgacatgtagggtctgggaagatgcacaggtctgaggggagatggtttgctgctttctctatctctcctcagcctctccaaacaggttatggctgggcaagacagctcgaaactaaccctagagaattagttaacgggctggctgtgtagtctgttacgtgatcctgaacccacgttgacaatcgccgtcacgctgcagagccacgtgactctcatactcgaacagcctagtgttctatatactattttaattcgggagttcattactagatcgaatttctttagagaccagaaacccctttctaatccgagtttgcattttccccagtgcctagcatcgggaagcgtttgataagtta

SEQ ID NO: 56604 - DNA, 1085 bp, Homo sapiens
cttgcttactcctcccaaggaggagatagtttataggctaggaactgaagtaggaccacccctaaatccttgggtcaaggaaataagagttgagaaacaattctggagaatctaggtagaagagcatgggaagaggcaggctaaagggttataaagtctcacctttgctgttcagcagcacgtgacaattgtagattttctgagtctgctcccagtcttggccacgctcatggaaaccacccaaggacagccagagtccacattccctggggggaagggacactgacaactcttcactgacttctcaaggctctaccctcatatctggcaacccagggacactgtccaacaaagattctacctctccctcgctatttccctgatacctggcaagctgggtgtattcttccaaaagtttcccacccagtggttcagacaggtgtagcgtctctgcagggtcccgtgcaatgaagtcaaatgcctcaggcaggaaagccaggcaggcacccagtctggcagcctctcgaaccagctcagcacatgttttaaagttctgttgcttgtctggcgtcgatgttacctggcacacagccaccaggggcagttcgcaggaggaagaggagatagccatggctctgggcctgtgaacagcataggcaggattctcagatttcatagcacagggaagcaaatttaatgctaaggggtgcaagtggagaggcaggaaagctggacttccttttgatcatgctcttacagggcacgttgacccagggctagtagggctcaccaatcaaatgtgtggatagttgacactcctgtgtctcccactatccatttaacaaactgagcatctaagtgccaggcactgaggacacaacaaaacgtgttacctgggctgagcacaaagtactgagagttgaggtatccggagtccaggacacagaagggacaggaatctgtgaggaggcctggtgatgaagcccagcctgaggaaggtgagatatgaggacaccaaccccttcttcaagcaataaatttctaggattctctgacttctctctttatactgtgagcctgaatca

SEQ ID NO: 56605 - DNA, 2070 bp, Homo sapiens
tcgaaacccagtgctatgtagtggcagcagcacagtgtggacgccaccatgagaagagagcaagttatggccacagcatggtggtagacccctggggaacagtggtggcccgctgctctgaggggccaggcctctgccttgcccgaatagacctcaactatctgcgacagttgcgccgacacctgcctgtgttccagcaccgcaggcctgacctctatggcaatctgggtcacccactgtcttaagacttgacttctgtgagtttagacctgcccctcccacccccaccctgccactatgagctagtgctcatgtgacttggaggcaggatccaggcacagctcccctcacttggagaaccttgactctcttgatggaacacagatgggctgcttgggaaagaaactttcacctgagcttcacctgaggtcagactgcagtttcagaaaggtggaattttatatagtcattgtttatttcatggaaactgaagttctgctgagggctgagcagcactggcattgaaaaatataataatcataaagtctgtgtctggacatcgcctttgggaactagaaggggagttggtattgtaccagctggactaagctccagttctagacctcctggctcattcaacatgcctccctacctaaataaaagtgcaacactcagtgcatgtcccagccccattctcccaagcatgggagtgggcgtaggagtggaggagggggaaggaaaaaggaattacttcacttacacctatgatgccctttgcccaagccagaagaaagcaaaggggaaaagggctgcagggtacattatttattttcacttgaacatggaaagaaagtgtcacactcccccttcccctttatagggggagtgtattttaatcagcaacctcttctccatccaccctgtgtatgtgtgtacacatataccaccacagttgggaggcatgactaggctgacccagtcttatctgttcctcctttgaagagggtttgacaaatgggaaaaaggaaggagccacatcaggcagaggtttcaagccatggaatggaggaaaggcggcagagaggagcagcaccagaggccaggagagagtggaaagggccacagcttgtttttaaaaaattctataatttggaagagggtggcgattaattttcaaaatacacttcagagtcccactttccacatagctcccttactcacagccctttggttttttagacaaaatttaagagctctcataaagccagaagtattgataactccttagtgcatccaaaaaaaagtgttcacatcaatcccttacaaagactatgtgctgtagactttgcttcttcctatacatttgtcttacggctcagtggtaaggtagctgtagagacacattacggggtaaatggaaaagggaaataaaggggaagcccaggcacatgggtgcagggaggggtggggaataccacttccactttcttttgtctttttctttaaaaaaaaaaaaaaaaaggcaggggtgtgattggttggaagggtagagaacaaaccccagaacagtgtaagctccagaggtgggtgatgggaacagtccccaaagtgagaagagggaataggtcagggcaatgcttgcagcatcaagttcctcaggagtttctgtcggcccagctcatagtcctcctcgtctacatttaccagcagcttgatggcttcatggcccacagcttgcttgagggagtctgtgatgaagacacctttaagtgcctctaataaagagccattgatgtagtcacgccagaatgcatcgaggtaggtgagctcagagaacttgatgtcacagatgatggagcccaggtcccgggacttgaggatggtgttggcctggttaaagcgctcaaactggcgctcaagtgggtcctgcttgttagagaagacattgccctgcagagcagtctcatgctggcagtattcagcccgaacccgcagtctgatgtctgttggaaacagaagatacagagcagaagaggttacagtaagggatgagtttacaagccaagcttg

SEQ ID NO: 56606 - DNA, 1016 bp, Homo sapiens
ggcatgtcccgtttaagggaacctcctgcattcaggcaaggatttcagagatacatagaaatagtcctggggaagaggtagagaagctgtcaggtgatattccctacttttttattctgttgtgcttttcagttttcaagcttggcttgtaaactcatcccttactgtaacctcttctgctctgtatcttctgtttccaacagacatcagactgcgggttcgggctgaatactgccagcatgagactgctctgcagggcaatgtcttctctaacaagcaggacccacttgagcgccagtttgagcgctttaaccaggccaacaccatcctcaagtcccgggacctgggctccatcatctgtgacatcaagttctctgagctcacctacctcgatgcattctggcgtgactacatcaatggctctttattagaggcacttaaaggtgtcttcatcacagactccctcaagcaagctgtgggccatgaagccatcaagctgctggtaaatgtagacgaggaggactatgagctgggccgacagaaactcctgaggaacttgatgctgcaagcattgccctgacctattccctcttctcactttggggactgttcccatcacccacctctggagcttacactgttctggggtttgttctctacccttccaaccaatcacacccctgcctttttttttttttttttaaagaaaaagacaaaagaaagtggaagtggtattccccacccctccctgcacccatgtgcctgggcttcccctttatttcccttttccatttaccccgtaatgtgtctctacagctaccttaccactgagccgtaagacaaatgtataggaagaagcaaagtctacagcacatagtctttgtaagggattgatgtgaacacttttttttggatgcactaaggagttatcaatacttctggctttatgagagctcttaaattttgtctaaaaaaccaaagggctgtgagtaagggagctatgtggaaagtgggac

SEQ ID NO: 56607 - DNA, 1019 bp, Homo sapiens
tttcagtacggtggggattgcagctgctgagcagggattctggaaagcattgcgtacctgagcccccagcatggcgggcctaaagcggcgggcaagccaggtgtggccagaagagcatggtgagcaggaacatgggctgtacagcctgcaccgcatgtttgacatcgtgggcactcatctgacacacagagatgtgcgcgtgctttctttcctctttgttgatgtcattgatgaccacgagcgtggactcatccgaaatggacgtgacttcttattggcactggagcgccagggccgctgtgatgaaagtaactttcgccaggtgctgcagctgctgcgcatcatcactcgccacgacctgctgccctacgtcaccctcaagaggagacgggctggtgaggaagtattaggggctggaatcagggaagagttgtgggaggccaggaaggagcagcataggcgtccaaaggggaggacacattgatcctggggagtacttagagtaagttgtgaggcccactgggggtttggactgacagaagggaagggtgtatattttcctgaatgattacttctcctcctacagtgtgccctgatcttgtagacaagtatctggaggagacatcaattcgctatgtgacccccagagccctcagtgatccagaaccaaggcctccccagccctctaaaacaggtgagaagacattaactccccctgctttccatcatcaagtaaaaggacactgatcccatcacattctgggctttgccagcttaaatgaaaggatgctgtgcgcccacatcttgccccataaaaaaaaaaaatcaggcgaggtgacatttctcctaggtcctgtatttgctctcacatgtcttgtcttttttttttttttttttgagacagagtctccctctgtcgcccaggctggagtgcagtggcgcaatctcggttcactgcaagccccacttcccaggtgcacgccattctcctgcctcagcctcctgagtagctgggacta

SEQ ID NO: 56608 - DNA, 1043 bp, Homo sapiens
cctgtaatctcagcactttcggaggccgaggcaggcggatcacaaggtcaggagttcgagaccagtctggccaatatggtgaaaccccgtctctactaaaaatacaaaaagtagctgggcgtggtggtgggtgcctgtagtcccagctactcgggaagctgaggcaggagaatcgcttgaacctgggaggcggaggttgcagtgagccaagatcgcgccactgcactgcagcctgggcgacagagtgactctgtctcaaaaaaaaaaaaaaaaaaaagagtttggagtgttcttatagataacgatggggcaatcaatgggtctgaagcaggaaagtgacttggtcagttgtggacttcagacagctaactgaactagatgtggcagtggatggatttaggtaggttaagattggtgttgcagagaacttttaaagttacagtagtccaggtgagagattattgtaatctgaaccatggcagtggaggtggaaaggtaggatagatttaagaaatatctagaagtagcattaacaggaatttaggattgattgtgtgattggagagtgtgaccagagagtgcacagtataggatggtactgtctggtggagcagtaagtatgagtgacttgagtcaaagttgttgaatttgggaattgattaatggctgcgtcattggtattacctgtagcccataacgatggaggaactttgtgaatcaagagccaaactatataacgaatgtggagctgtgattggtcattgataggggattggtaaatgacatccatgaggaaagcttagaaggtggtattgccaaggccaggtacggtggctcacgcctgtaatcccagcactttgggaggccgaggtgggtggatcacctgaggtcaggagttcaagaccagcctgaccatcatggtaaaaacccatctctactaaaaatacaaaaattagcaagacgtggtggtgcgtgcctgtaatcccagctacttgggaggctgaggcacgagaattgcttgaacctgggaggcggaggttgca

SEQ ID NO: 56609 - DNA, 1646 bp, Homo sapiens
ctcaagtgttcctcccaccttggcctctcaaagtgcagggattacagacgggagccactgcacctgtcctataggatgtttctaaatatccctggcttctactcattacatgctgatggcagtccccttccccaccaggcataataatcagaaatgtctccagacattgccacatattccccaggggtcaaatttgcccctggttcagaaccactgacctaaaagctattataattcctagtacattgatgatctagcctgggatctaggacttaaaggtggctagtgtgtttgtttcctctcaaatgtagggagttaacttcaaaggattgaagcttatagaattacatccattgatacataattaggaccacagtgctttcctgtattttgccttattttccattgcgagggtatgtggggacagtgtttcttcatttcctggggtttaagcacactttaaattagggaactgtggagcaaccagctcttctggttggtttaatgtgaaacctacccaatctgctttatctgagagcctcacaatcaacagctggcccaagggaacaggtgggatagggaacaaagagaagttgcaggggctctgaggaggctcagttttctcatgttgcctgctatgagcaataacttattttcctttagcaccttcatttgtacccagtaacagcaacaggtgaatcgagaggaagaggcaaggaataccagtctatagttgaatagctatttcccatgctttgggtggggcatctgggctctcaaaactatatatggattacatttcctgtctacatatcagaacccatggtatagggttaagtgatcccagagtgtacctccccttttcttaagggaatgagtttctctgtgctttcattttagtttttcatctgaggaagaaaggaccagttcctacttactcttcagctttctctatcagctttgtttttccaaagaagcttattattttattgtttcctagtctagcctcagttcctttttgtataaaatggacagagcaacctgtttaattgttgagtagggtagagtggtgtggtatggtgtgggtagttctggacattgcagaggaggctatggctagttagaatatatgcatggtaactgaattacctgtatctgtttttaatggggtcctctcttggacttttgtgaatttgtttcttaattggaattgcttgaggtgatctcttggagattaagttcagttcaacagtgggttgctcccactatatttgaggctctgtccattactaggcactagggatataaagatgaatatatctctccatgagttgagtaggatctaatgggataataaatacacaaataattttagtacatggtgataaatggtgtaaaggagatatgcatagtgttccataagcgcacagaagaggactacttatctctgcatgggggtgtagaaaatgcattttgaagatggcatctgagctgactcttaaagaatgagtaggagttagccatctgaaaaagagtgatgatgggggtgtggaatagagaagggagaggggcattcaggcaaagagaagagcctgaagaaggtatagagaaattgcatgatgtatgtgaactataaacaaactgat

SEQ ID NO: 56610 - DNA, 1051 bp, Homo sapiens
aattaaatgagtgctgtagtttccagacccttttgctgttttaagtctggaagggagggggtaacatggatactgtatgtagaaaaacttttccctggtgaaacatagacgtatgagtggatgctgcgccattagatattttgttctcattgtgtgctagttaagggaaagggccaaatgtagaatttggaggatagtgctggtctgctgtaaccactttcctcccagttttttctaaaggtgaaagttaacgttaatattgtaacaaaataggaataaggaattgtggaggaagatgagaagctgccagagggtaattggttttcccagaagttcttaaatttgggagctgtcttgccgcaagccattgagactggaaattcttggagttggtattgtttttgtaaattgactaatagagagttagggaagcctggagacttgttgggggtgagttctctaaatggttttaggcttgtctgtgtacttttgcaacgagattgtctaattctatgggcctctgaggtttcaaagtaaaacttgaaaattaattattttcccctccttatttgtttttgttttgctgctggctgtgaaacttgtgctaggaagagacctgggaaattaagtttcttgcggaggtaagtctggaacttttttattgttttcaaacaatggaagggaatggaaatagcatgggagttattttgaggttgggtccattaatgaggaggagaatgccagggaaaatgagttatcattcatccatctgagtgcatgagatctgttgtaatcactgtctttagttaattggagataggaggtgaaagagaaggagatttagatgtcttgggacaatcccccagctttggtttgttattgtctagtcttcttggtcagctctgaaacattttttttttttaacatatggaaggctgtattctagtacattgtctactaaatgttgcccttggagggttgctgggacaccttccttccgtgggaaacttttcctctaactttctctttcagctgttggggggttcctggc

SEQ ID NO: 56611 - DNA, 1048 bp, Homo sapiens
acaggtaggactgaataggagatggcaaagagtcaaagaaagccttaaggaagaacttcgtggcgggagggagagcatcaggaagaatagctaatggatgcttggcttgatgtctgggtgatgggatgatctatgtgtaaatcaccatggcacgtttacctatgtaacaaacctatacatcctgcatgtgtacctctgaacttaaaagatgtaaggaaaaaaaaaaaaaggaagaactttggaggcagagattttcccagggtctgctggcctagtggggtgccaggccctcctttgctgagcctaagcaaagtacttagctgaacttgttctcaattctgatcactagtagtcttcctatgcccccaagaggctgctgtgctttatggtaaactttgcatgtcaacaccttcttcatgtccctctcataggggtggcaaaatatgcctgacggatcatttcaaacctttgtgggccaggaatgtgcccaaatttggactagctcatctcatggctctgggggtaagttttgtgtatttggcataaaaggagaaagagggacttaggccctgagcagtacaagaaaagcagctaagaataaaaggaataacagtgatgtcccttaagcatgttcccccagaatctgtctccaggaaggagcttctaatggaacaagaagcattgactggtagtaatctcacaggattttccttgtattgcagctgggtccatggctggcagtggaaatccctgatctgattcagaagggcgtcatccaacacaaagagaaatgcaaccaatgaagaatcaagccactgaggcagggcagagggacctttgataggctacgatactattttcctgtgcatcacacttaactcatctaactgcttccccggacaccctccacctctagttgttactaagtagctgcagtaggcattgctggggaagaaacaaacacacaccaaacagtactgctacttagtttctaaggctgcacagggaagggaaagactgggctttggacaatctagaggtaatttat

SEQ ID NO: 56612 - DNA, 1038 bp, Homo sapiens
tgggaaagagtcggaaataggggatgctctggtcaggagtgggaatgaaatgttgactgttccccctgctgctcagatctacctttgtcctttagtggtgagccatgctttgccctaccgtgttagcctgcaagaagtggttttgccggaccagcacttcccgccctccagggatcttcccagccctctgtgaagtgctagatgcttctccactggtctgcgggctggacccaggcctgcagtttgccatacttgcgcccctgctgtttgggaaggatctgtgctgtaagcctcgcggccatactacgactgtcagatctccatccctatgggctataggatggggcgacggcaccctatacctcagggacttgctttggagtcatggattaaagacctctctgggcagcgttgagaaccagcgaccctaaacttggctgcgtttccatggtgtcgatcgcggagccgtgggggcgggctcacgcaagcgccaagggaccggtgggaggagttcgggtgtggatgcgcaggcgctttgagagacggtgaagccggtggccggtggccgggcgggaccaacaaagatggcggcggcccctgcggcgggagcgatctgggcaacggctgcggctaaagctgcagccgggcccacgggggggctgcacgggggtagtagggggtggccctgaactggggcctggccctggctggcctctcccgccgcctcactgggggacaggtacgggccggggcgttatggcatggcggggtgtgggggggcgcagagggaagactgctccagacccgagaggacactctccacaaaggcgcgtggggcccggcggggcctgggagaactgggctggagggacagcatccctggaccgcggggaatacgccgccggattccgtagccaatcagcggtctcggcctttctgccctcgaggggggcggacccggctaaagccctgctgtggtgggagaagtgcagagattaagggtcaaggagttgttcgtcctccatccccgactactgc

SEQ ID NO: 56613 - DNA, 1732 bp, Homo sapiens
ttttctgtcccccatttccctgaagttcctttctcagcccttcattacagcagtttggacatgcctctcccttgcttaaatacccttgagcctcctagacccttttttgggttgttggtgactcttcagcatggtgtgccatttcggtccccaggggattaccccaactatttagaattcttctttgggtccccaggcccttcctttcccttgcttgcaccttctctactgggactctgcctaggcctaattaatctctggagctaaagagaggcaggcacagaacatcttagcaaacgtggttgcacattttctgagctaagtaagctaggctgattgcaattggagccagcaggagaagggcaagaaggggccacgggggcaggagggggttttgggggcagaaaggtgggagtggtgagcagctgggcaaccatgccggtgctgggggagttgccccaggagctgcaacgtcagctagctgagcagaggagtaagtgggcaacaggtgggacagccatggctgagtccgtggtacattcagctgtgatgggcttactgctcatgaccagtgaggtagggagactagaatacctagtgaggggaatagggtagagtttggggatgaaacatgcatgggatgggggaggcagtgggcagcatgctgttgaaaggttaaagtgccaggtaggatatataggaacttgccgattgtactctgaccttccaggctcatcacacactccttctgggctctggtcatgttggccttcgaaacctgggaaacacggtgagagctattctcctatctttcctctctaaaaggaatgtgaaatggtgctgggggtggggaaaacccacgagcttggggaaggcatgtggaaggagagctctgaagctcttctaaggcttcctgggcagtggtctggagagataacagcagtgtccctactgctccccagtgcttcctgaatgctgtgctgcagtgtctgagcagcactcgacctcttcgggacttctgtctgagaagggacttccggcaagaggtgcctggaggaggccgagcccaagagctcactgaaggtggggcaacaactcctgctccctctgttcaagtccctttttccccaaccacttgcaggtccatctgccactggtggtggcccccaacccttaaatctggcagttgtatctacttttcccagtgcctactttcctaaaggttattttctaccctctgagccaccttttgcttgcctcttccagacattaacctttgtttgccttccccactcccatcccaacagcctttgcagatgtgattggtgccctctggcaccctgactcctgcgaagctgtgaatcctactcgattccgagctgtcttccagaaatatgttccctccttctctggatacaggtgggagagctggaggctatgggatttctctctggccatgtctgggggtagggccaagcaagggccctggcagcattgttctgagccttgagatgttcttcatccaggaagtggggaccaatatctgggcagggaatagtgtctgtggactaggagaggagtcagttgcccatactctttgtctggctgtagccagcaggatgcccaagagttcctgaagctcctcatggagcggctacaccttgaaatcaaccgccgaggccgccgggctccaccgatacttgccaatggtccagttccctctccaccccgc

SEQ ID NO: 56614 - DNA, 2096 bp, Homo sapiens
ggggagtagggctctgtaggttgtttcagtgggtgttgggggtgcccagtgttcctgctgtctcatgggtgctccccacttcctttgatctgtggtagtgatgatgaccgagccaacctaatgtggaaacgttacctggagcgagaggacagcaagattgtgggtatggaatggggcaaagcaatgagggaaaattagtgtgtgaggggggtacaggcttggggggaaaaatcgatactatcaaggggtatgggaacaagactggatgatgcaaatgtgaagctgtgtgaagagttgattaggagtgttggtagtgggaaaggaagggtcaagcaaaggggcaggaagagatggaaatccaagaaatcatctcataacatccaacaatgaccttttctcctgtccctgtgcttctgtctagacctgtttgtgggccagttgaaaagttgtctcaagtgccaggcctgtgggtatcgctccacgaccttcgaggttttttgtgacctgtccctgcccatccccaaggtgggattccagaggattccggggtggacaggacaggggctctgtgacccaagcctacccacccccagagtgtgggcgggaaccctgtgggtttctggagcagaactgaagcctggattgattgagaagagttggaaaaggaaattcagaacatgttgacctttcttccccttttcccccagaaaggatttgctgggggcaaggtgtctctgcgggattgtttcaaccttttcactaaggaagaagagctagagtcggagaatgccccagtatgtggaggttcacaagggatacagtaagggtgggagacctggggggactccatgtggataaaagggattgcatgatgtcttcatatggggaataatatttatgtatctgggtttgtgttggagtctcagatctgttctagtactcctagagcaaaggggagaagccaagaggatccagctgtaatgaagagcatactaaatttgtatgtggatcggggtgtcagaaaagccaattgaggttaggagcatattaacctaacactgtttgccatttattcaggtgtgtgaccgatgtcggcagaaaactcgaagtaccaaaaagttgacagtacaaagattccctcgaatcctcgtgctccatatcctaatcttcagattcttacttctcttaggatacctcccatacattctctttcctccatgtttccagagaattgaattttccttaggaaaagtctgccacccacttttccacaagatgctcccagtgtgtcgggagtggggagaggacagctttcaggatagaagaagttcccctcagaggcccactgcctcccaaatgctccttaaccagggcttagatctgaatcgattttctgcctcccgaggctccatcaaaaaaagttcagtaggtgtagactttccactgcagcgactgagcctaggggactttgccagtgacaaagccggtgagtctggtggggaaagtcctaaggagccaaaggagtgggggcacagctctgattatagaacttgatcatctccaaccccgcaggaagtcctgtataccagctgtatgccctttgcaaccactcaggcagcgtccactatggccactacacagccctgtgccggtgccagactggttggcatgtctacaatgactctcggtgagaatagcctcctatttacatcctgccccattcccactcagccctgacaccctccccttctatgaagctccaggagagcagagtgccaggtgaaaggagaggtggaggtcttgcctgatcatttcctggatgctctgaggttcggtcttgtagggagaagggagtaaacaggaatgaccacaaccctttcccgatctccttttttcctagtgtctcccctgtcagtgaaaaccaggtggcatccagcgagggctacgtgctgttctaccaactgatgcaggagccaccccggtgcctgtgacacctctaagctctggcacctgtgaagccctttaaacacccttaagccccaggctccccgtttacctcagagacgtctatttttgtgtctttttaatcggggagg

SEQ ID NO: 56615 - DNA, 1042 bp, Homo sapiens
tccggggccttccaagtcccgccaatccagatgtaggagaggtagggttaggcgcgtgccgcgagaacagagtggacggagcgtaggagagaccgaaaaggctgggggtgggagtagcggatttgaagcacttgttggcctacagaggtgtggcaagcagagcacctcagaactcaggcgtactgcccgccgcccgagccctgcgagggccgatagcgagggtgtggcccttatctgcacccagcagagcgccggcggggtacggtcttaggacctcgatctccttctccctcattttctctcatccctacctattgtgggtgagtcctggcccctggacggggacctcgctgttccaccagcccatccgtgcacacttagtttcccctaaagcagtgagtggccgggatagaactcaaaaccggcggggcttctggagcgcaggttgtccccggtctgcctgtccatatcgccccctttcccccaggtttccgcatgggccggaccgtggtcgtgctgggcggaggcatcagcggcttggccgccagttaccacctgagccgggccccctgcccccctaaggtgagtgctccacttgtgccagagggagcttcatttaatgctcttcccatttccatcaaaagctagatggatcctggccctctgaatatgcctcttcccctcccctcctgacctctcgccggcggctacaggcggtgctgcagtgtctctccctcttgtcgccaggtggtcctagtggagagcagtgagcgtctgggaggctggattcgctccgttcgaggccctaatggtgctatctttgagcttggacctcggggaattaggccagcgggagccctaggggcccggaccttgctcctggtgagaggcttgtgggatgtctaggagaggttgtggagggggcttccattggggaatagagtttaggggaggaagtatgtttggtgggtcagatcttcccttagtttctcctcttctgagggcatgtggagagcaggtttctgagcttggcttggattca

SEQ ID NO: 56616 - DNA, 1010 bp, Homo sapiens
acaggtgtgagccactgcatccagcctcaatgattcttctttgcttcctctgcagggcggaccccacagccagactcagcactcattcgccaggccttggctgagcgctggagccagtggtcacttcgtggaggtctagagatgttgcctcaggcccttgaaacccacctgactagtaggggggtcagtgttctcagaggccagccggtctgtgggctcagcctccaggcagaagggcgctggaaggtaggggaacccctggagtgtaatgaacctgtcagtgtttccatctttatccaagtggcttaactaggccagggccgataggactggagttcctcattgtttttgtgccttagaagctacttagacatgggctaccccagaatcctaggccctatttgtgaaccttcctcaaagagcctatgcaagtctgtggatagaagtagtacttataagtggcttagagataggggaaagaacccagcttcactgaacatttcagaacagccacactggcctgtctggtccacttcctggagtacacagaggaatgattttttgtgaagtctacatagtcacccaatctcttcatcctgggtcagtacacagtctccccggccacatgggtgcctgggaaactgagagtgaggcaccagaagtctcttttcactcatcaaattctcattttctgggtctctcaaatgttttcatgctctcaggtatctctaagggacagcagtctggaggctgaccacgttattagtgccattccagcttcaggtaatggaatagccaccttccccttccccaacccctaccagtgagaagcaaaagctataccttcctgggtcagcaggaccacaccatgcccctgaactggtcatctctatgggagtctaatcccaaagaggactgacaactgtaatgggaatgccttctgagtcaggcctctgcctgatctctagtgctcagtgagctgctccctgctgaggctgcccctctggctc

SEQ ID NO: 56617 - DNA, 1478 bp, Homo sapiens
actgggccctgaggatttggatacatccagcttttatattctcttcagccatttccttctttctgtttgacttctgtcctgggctttttttttcttttgcctactaagtaatagttgtttttttgtgtgtacagaaacatttaatcccttccttgcttttctctactctggatcccccatgataccctcacttttcccatagggtgcgcctggctgggatgaagatctctcggccccccacatctgtaggacactataagatggtgaagcaccgaggagataagggcaatgaggaaaatccccacaggtaggaagaaggaaggactgcctgggaattgttactggatcctcagggttctgtacccctagccaggaaaatcctaaaggtccctagatttctggctgttcctttctgggtcttagtctccaacctctaaccctcagatttgacctcctggtccgtacccagaattcctggacgcaagatgggatgaactcactgacataccagttgctggctcgagagctggggcctctttataccaacatcacagcagacattgggactgaccctcggggtcctcgggctccttctgggccacgttacccacctggttcctcccaagccttccgtcaagagatgctgcaacgccggcccccagccaggcctgggcctctatctactgccaaccacacagccctccgaggttcacactgactcctccttcctgtctaccttaatcatgaaaccgaattcatggggttgtattctccccaccctcagctcctcactgttctcagagggatgtgagggaactgaactctggtgccgtgctagggggtaggggcctctccctcactgctggactggagctgggctcctgtagacctgaggggtccctctctctagggtctcctgtagggcttatgactgtgaatccttgatgtcatgattttatgtgacgattcctaggagtccctgcccctagagtaggagcagggctggaccccaagcccctccctcttccatggagagaagagtgatctggcttctcctcggacctctgtgaatatttattctatttatggttcccgggaagttgtttggtgaaggaagcccctccctgggcattttctgcctatgctggaatagctccctcttctggtcctggctcagggggctgggattttgatatattttctaataaaggactttgtctcgcatctgctcctgctttctgcatcccaggcacactttgcctctttgctgccccgcattcttatgcctataggtgatagaacagccagaccaagccaagctccagcaatttttattttcatgaatgagagttggggatcagctgttaggttctgtgcccaggacactgactgctgcctggcgcccactctctatacagtcattaacagcaactccctcataggaggctccagccagagtcaggggcaacctgtgagca

SEQ ID NO: 56618 - DNA, 1108 bp, Homo sapiens
ccgggaaccataaatagaataaatattcacagaggtccgaggagaagccagatcactcttctctccatggaagagggaggggcttggggtccagccctgctcctactctaggggcagggactcctaggaatcgtcacataaaatcatgacatcaaggattcacagtcataagccctacaggagaccctagagagagggacccctcaggtctacaggagcccagctccagtccagcagtgagggagaggcccctaccccctagcacggcaccagagttcagttccctcacatccctctgagaacagtgaggagctgagggtggggagaatacaaccccatgaattcggtttcatgattaaggtagacaggaaggaggagtcagtgtgaacctcggagggctgtgtggttggcagtagatagaggcccaggcctggctgggggccggcgttgcagcatctcttgacggaaggcttgggaggaaccaggtgggtaacgtggcccagaaggagcccgaggaccccgagggtcagtcccaatgtctgctgtgatgttggtataaagaggccccagctctcgagccagcaactggtatgtcagtgagttcatcccatcttgcgtccaggaattctgggtacggaccaggaggtcaaatctgagggttagaggttggagactaagacccagaaaggaacagccagaaatctagggacctttaggattttcctggctaggggtacagaaccctgaggatccagtaacaattcccaggcagtccttccttcttcctacctgtggggattttcctcattgcccttatctcctcggtgcttcaccatcttatagtgtcctacagatgtggggggccgagagatcttcatcccagccaggcgcaccctatgggaaaagtgagggtatcatgggggatccagagtagagaaaagcaaggaagggattaaatgtttctgtacacacaaaaaaacaactattacttagtaggcaaaagaaaaaaaaagcccaggacagaagtcaaacagaaagaaggaaatggctgaagagaatataaaagctggatgtatccaaatcctcagggcccagtgccagtcaccct

SEQ ID NO: 56619 - DNA, 2164 bp, Homo sapiens
ccacttcaactggttcttggtctgggggaaaacaatgtttccattagctgtcctgtccccactccccaatctgtcctgttggggtgggggtacgggggtggttaagtatgaacctgacacttatcattccagggtagcacgggagataggcgagggacctaccatctcctgctcctcctcttcctttccaaccactttccttcacttcgcctgctgggaaaccagcttcaccctgatcctgatctctggcggtgcaggtagctagttatcctttaccacttctgttccagctggtcccagattcgctgctggagtgctggatggagcctttctctgccctctgtgacatttccaattttagataatgcctcacatctctgtccccccgggaccccctggagcccccatgatccctaagaagacagcttgaacctaggtgagtctatctcttcccttctaaaattggaagagggggttctctagagactttctgaaatgaacatgagatttgaatgatgtaaacatttttgggggtgaggactgacagtagatggtgggagtggtttggggggaggtagaggagagcgaaacttgggctgaagtgacaggtggtagggttactggtggttacattctgtttccttgcgtgactgtgcacctgtgtgctcccttctgtgactttgttttctgctttttcctctttacccctggcatcaccttcaaccctacctactgacctctctgctggcttgctctcttcctgcctacccccagaattcccctctccctccctagatctcacccccaggatgttgcggaggctgctggagcggccttgcacgctggccctgcttgtgggctcccagctggctgtcatgatgtacctgtcactggggggcttccgaagtctcagtgccctatttggccgagatcagggaccgacatttgactattctcaccctcgtgatgtctacagtaacctcagtcacctgcctggggccccagggggtcctccagctcctcaaggtctgccctactgtccagaacgatctcctctcttaggtaagtgcaggaggaaggaggtggtgaaaggaaggacaaggtgcggagacagggaggcttggggatagggaggcatggagtggcagaagtggaacttagaagaggataggtaggctgaggctgcaggtaggctgaggttgagatagagggctgaggttgagatagagtagactctgaattgggagtttagattagactattgggtttccactttctactgcttgtccctttatgggctcttcctgccccaggctaggaattgttttccttgtagatgagccctggtttaattagttgcaagtctctccagccttcaactatagcttccaaccctgtaagacaggagaaagttaggcaaccctaaaataagaagagaaggctaggtaaggatcctgcaccttccagcctttgtagagctgtcccagtgataggtaatccaaggcatgcgagatttctgagtgagccctgagaactaagccccagaaccagactgccagtgtcagaggtattcccaaaccctagtttgattcttttctctttgcccctctgatccctctacttgccattccttcccaacagtgggtcctgtgtcggtgtcctttagcccagtgccatcactggcagagattgtggagcggaatccccgggtagaaccagggggccggtaccgccctgcaggttgtgagccccgctcccgaacagccatcattgtgcctcatcgtgcccgggagcaccacctgcgcctgctgctctaccacctgcaccccttcttgcagcgccagcagcttgcttatggcatctatgtcatccaccaggtacccccaatctccacctcattttgactgactttcttctaaggaagcctcaagcacatgccacttcactttcatctaaatgggtccctagaataattttaagaaggccagactgttagagtgtggagaagcacccggcactgctcttccaactttgttagtcccatacttttccttaatctgcttaggttattcccactgtcctacactctcctgtgattttttctttattgaatggcttgtgcagagttggaattggacacaatagggctaaaattctagttccg

SEQ ID NO: 56620 - DNA, 1095 bp, Homo sapiens
ctggagcagagaggagtaatagccctatacctaggcctgggggaagaataccttgggacccccattaacactgtggtgaacttgctaccccctcccccaccttctcctccctaatacctttctcatccacccctactttacccagttcatgagcagcagtgaaggctgactggagcccatcatcctccacaatggcacagctccgagccgggtcacagacggtgcccacatcagccatacccagcgtgtcgcaagtggagactccacacaggtcctgtggagagggatcatagaaggtgcatagacagccaagacacctgggtccattgggttgagatccagattcccggggacctgggcactgaggacccagcactgtcagggcctaggtagccacacatggcagtgtggctggggcaaggcaccatgtcacacaactccaggaacatcatttgcatcatagtctatgtagtggcgcttcttagaattgtgcagtgcatggcctgcggtgctgactggggcctcacctgacgggtaaacagaatggctgtgtcaaagtggtcagggtccgagtcctcaggggtgttgaggccccgctgccaggcacagaagctgcgcagggtctgggcagcactgggccccacttggggcccctcctcgcctgaccccaggatcactagccgagtcaccaccaagctgacaggattgcggatgcttgggtgcttgaaggccttggctgctgctgccatcactgttagcaggtagcgctttagccccgcaccgtggaatgcggccatcttgtcatctgccaccaccagtgtctccacaaatctactcagtgaagcaaagcgctgtagagaaaaagggagaggaagatcctgaaatagcctctcagacccatgggtcggtcgattctccaatccctcacttcctgggtctggaactcagcatagtcagctgggccccacacaccccacgggattcctgactcctggcgggtcttggttgggcccttcccccaacgccaaatctcagggcttttgtggtaactctgaggagtcagcagctggttctaagaaggggaggagaagggga

SEQ ID NO: 56621 - DNA, 1043 bp, Homo sapiens
aggagagaggccagcagtagcagaagcagccacaccagccaggagagcggcacaatggggagcaggaggcagggttgggctccccacagccagcgccctgccaagcccctcccgggatgcgagcctgtctgggacatggcactggtactgcagctgggagggactgaggccgtctagggcaccaagtcctccacaccctagctttggaaagctcctctctgtagcctgggggcttggactcctgccaaggtcagaggcaaagttttcagaagggctgaggaccgttaaaggaaatggagaaaacttagtccttgggcttgggagaggtgcccaggggtctggcttctccaaactctcctcctgagccctcctttcctggatctttgtctctccctgcctgtgtcttctgcagcttctctggcctctccctctgtaggactctgtctgggccgcttctgtgcctgccctgtctctgccttcttccgctgtgcctttgtctctgtctctttcctcctctgtctctctcgtgcatatgtgtctgtgggtctccctgtgggttctccccagcctctctccgcgccagctcttttaagcatggtgagcctctgcgattgattggctgatctctaagccactcagctgagctctgtcggtgggactcagatgggtgtatcatcgcttcccaaaaaaatgggacttgcccaggggaggggaatctctagcagccgaatggataataggcactgggccagctgatgacatagccttttcccaaaccccacaatcagccctcagctgtctctttccctttttggtgggacagagccccaggagaggcagagagtgagggaaagggcctggccggcatgcacagataggatcacggtcctgggagaattcctgctcttatagtctaacctaccatggcttctcttttctcaaggctccctcatgctgccctttggccctagtggctggtttccagggctgaggggactgagtgagctgcctgagaaaagagggtagggaacaggtaaggaggc

SEQ ID NO: 56622 - DNA, 1035 bp, Homo sapiens
tgttagggaaaggaagcaaattattcctttggctttggataggagggaactcggaaaagaggtcttgggtatgaactctcaaggcaaggaagggttcagaagtaggggcaatttctgctcaccccatcctctggctgcttgtttccccaggaaatccccaggaaggagagtgcagtcagcagtctctttcctttcccagaagtggaccacctcctcttgcctctattcccctattcactctgctttgtcacctcctgtcccccgcatatcatatccgtcagaatacttcctttccccctcccttcctgctcaggtcggtaatacctgccctggtgcctatcacttcctggatcacccacccccttgtgactgccagacccacctcttgacccaccacttgcctgaccctggttctaagccaacggggctgggactagaggagtcggacaaagggtgggagaccagaaggggcaggggcaagaggagctatcaccagagaactctactgcccctttccactcccctatttgagatgaggacaaagggggtgactaagcaatgaaagacaaagggctttagagtggctgcagcagtgtgtgtgggggtgttggcagcagggagaaggcacaaaagctgcagtgtcctaggcagcccctcaggagccccccaccccagtcccagctcaagctgcctccagggccaagcagcccaaagtctatcctgacttctcccaggctggatcaaggcaaataaatgcagtccttcccatcccccaccaccatggccacatttgctgtgtttcaacaatagaaagaaggcccagggaaagagcaaggaatgaggacaacagagggaccaaacctctgccctggctctgtggcagctgccttgtctagcccaggtcctggtcagttcccacagctaaggatctggccccaccctttggtacagttcccattaggtcaattcccaggccagaagtctggctttcccctctttctctgcagtgaagaattccaccatctctgcttcctg

SEQ ID NO: 56623 - DNA, 1050 bp, Homo sapiens
ttggatcctggagctaaacaggctgggttaaaatcctggttctgccacttactagttttatgatcctggaaaagtcatttaagctccatggcctcagtttatccaatgaaatggggataacgatagtacctattactcataacagttgttgtaagaattaaatcaattaaagtgcctaaggtagtgcctggcacataataaagctatataagtgttatgtattattaaaaagatattctatgcacactgactatgaaccatgaaaaaaaaaaaggtattctaggagacatagagtgagattcatgatgtctgtcatcagaaagtttagatcttccttttccccatctaagagtcctcttcctggttatagtggagattaggaaattaacaaagtatggaatggtgagttagaaaatctatagggagaggctaactccttgctatcttttgggggatcccaagggaataaccatgtggctctgaactatttcttacttctcagatgtggaccctccaaaggacacaattgtgaagaacattaccctgaactttgggccccaacacccagcagcgcatggtgtcctgcgactagtgatggaattgagtggggagatggtgcggaagtgtgatcctcacatcgggctcctgcaccgaggcactgagaagctcattgaatacaagacctatcttcaggtgtggggggtgaacaggagccttttggcgggatctggggttgctttagcctggggctttgccagtttgctgcccttaaaacgtgaggggaggaaggtgttgagaggagtaacccgttgagattactcttggttgggtggatggagggaagtggcaggggatgcttgagtcattaggatttggtttatttagcagcagtgctttgaagctggagctatactcagcttttctctggctgactttttggcaggcccctttgccattacttgagtgcctcagtttccctgctcttacgttagactagtgcgtcaaagccagtgtccctaggggcagggaaagagaaaagacattagctcg

SEQ ID NO: 56624 - DNA, 1003 bp, Homo sapiens
tactactggtttttgggatatttttacctgccttgttggggctcctgagactagaaaggcttatacagcaccaacttctggtgccgactgagagcaaggcttcaggcagccagactgtgggctcctgagcctgttagatgtgacccacattcctccctcttcccaggcccttccatactttgaccggctagactatgtgtccatgatgtgtaacgaacaggcctattctctagctgtggagaagttgctaaacatccggcctcctcctcgggcacagtggatccgaggtatgtccccccaactttttctgtggcccactgtgagcatagcatagtgccttttccaccacttccccgttgaacccaagcttagtgttcagaccccaggctctgcccagacctctctgtccgcctcagtgcttggctcctatatcctgtcttctccttgtcttcacagtgctgtttggagaaatcacacgtttgttgaaccacatcatggctgtgaccacacatgccctggaccttggggccatgacccctttcttctggctgtttgaagaaagggagaaggtaagagtgggaggaaaggataggaatagggaaggaagtgcaggaagtagagaaggtataaaggagacaggagattaaaagaagagagagaacatgggagaacatttagagggggaaggtatgtttaacttgggttatatttgtagaaactatatcatgaggggttggttgggcacaagaaggcagaaagtgggggagtaggccatcataggacctgggggcctgggactttgacactaattcccagcacgttctatgaagatgtttgagttctacgagcgagtgtctggagcccgaatgcatgctgcttatatccggccaggaggagtgcaccaggtgagcaggtccccggcttccccaaatgtccagcccaggcctattttccctgtggccactggagggcagtgctggatgatggaaactccaaacctgta

SEQ ID NO: 56625 - DNA, 1063 bp, Homo sapiens
tctaagaacttctctcttcggcttgatgagttggaggaggtaagctaggagtcaatgggaaaaatctctcccccacaagaagggctagagaaatacagagatatttgaagagtgtgaggaagagtattaacacaccagttttcttgatcaatagttgctgaccaacaataggatctggcgaaatcggacaattgacattggggttgtaacagcagaagaagcacttaactatggttttaggtgaggggaatacaacttctctccgtaggagtgggggtgggagtgggggagttccagcctaatatcttgtctttgaagacttgttggcatcctcctagtcataccctgaatgtgaaggatcaacaagggaggctaaggaagaaggagcctccttacttagtttgtggagagtggcccttattcccattatgctctccacagtggagtgatgcttcggggctcaggcatccagtgggacctgcggaagacccagccctatgatgtttacgaccaggttgagtttgatgttcctgttggttctcgaggggactgctatgataggtaaggccccaatcctttcttggctgatattccagctagtttcccctgcctcactcttctctttgccacttccttctttaccctacttctcagtgtctgtgggagctcttgtgtgtgttagacgaggttgctctcaaaacactttcacatatatggaatcttacttatttttttcttttttgagacggagttttgctcttgttgcccaggttggaatgcaatggtgcaatctcggctcactgcaacctccgcctcctgggttcaagtgattctcctgcctcagcctcctgagtagctgggattacaggcatgagccaccacgctcagctaatttatgtatttttagtagagacgggatttctccatgttggtcaggctggtctcaagctcctgacctcaggtgatctacccgcctcggcctccaaaattgttgggattataggcgtgagccaccacacccggcctatggcattctttttatctttacattatccttgtctta

SEQ ID NO: 56626 - DNA, 1042 bp, Homo sapiens
caacaaagcaagagtccgtctcaaaaaaaaaaaaaaaaaaaaaaatctgaaccaggtggagtggaaaatggcagatgtagacagcctttcctgagcgtgaaagtctcctcattctgtgggttaggagttggtcattgaagggctgacgcttaagagcccagatctcccaactcccttagttggcccttccgggagccgcccggtctcttgtgcaggaaggggaaggggccaaagcatgggggaaggcgtggcaggaagagggggactctgtggtcagggaactgctcgctgagcacagctgcacagtgctgtcagaacggccgatctccagcccaagatgattccagcagtggtcttgctcttactccttttggttgaacaagcaggtaagagggtttggtgagggatagcgtgagctggctccagggtggaagtccagagcttgggtctgagggccaagtcaaacacaggtgaaggaaggctgacagtgggtaggtgggcatagggagaccctgaggctagtcctctccagccccgacccagggcactagactcatagttccctcctttcttgttgccttcttacttcattccagacttttctccgtattattattattattttggagatggagtcttgctctgtcacccaggctggagtgcagtggcgcaatctctactcactgcaacctctgcctcctgggttcaagcgattctcctgcctcaggctcccgagtagctgggactacaggtgcccgccaccacgcccggctaagttaagtatttttggtagaaaccgggtttcgtcatgttgaccagggtagtcttgaactcctgactcaagtgatccacccacctcgacctcccaaagtgctgggattactggtgtgagccactgcacccagctattattattattaaaaaaagacagggtcttactatgttggccacatcggtcttgaactcctggcctcaagcaattctcccacctcggcctcccaaagtgctactgtgcctggctgacttttctcttttcagggtt

SEQ ID NO: 56627 - DNA, 1040 bp, Homo sapiens
aaggagcttcagtggcccaagctacaagatgctccctctagtgtcttgtacgctcacaagtttttttccgaccttggagaggcctagtgatctaaagccttccacttaagtctaaggggccaccaatcaagtcctgcccgcctctgcagctccagggttgaagctcttgggccgtcagacctgccactcattttcttcctcccttcccattggcccatggtaaatagcgaggcttttttttttttttttttttttcattgattgggcggggcccaatcagggttgggttgggtctttgacagctttctttgccagattcaaagatggcgcttacggccacgctaagaatgcagcgtgaagctgcagttctgccatcactcaagatggctgcccccatcaagatgaccggggtgtgccggggggaaaggggcagcatgatggtctgagatggtaagggatactgcaccattgcgggcctggtcttggggcctgggaatgaagaatagagaggctagggagctaggtgaagtctgtggtgggggctaggatcagagaaagggagagaggacaagggtgacaagtgggggtgagagatcaaagatggggcgggagtgtgcctagggttgtctctccatgagtgctctccttccctactcttcctgttccaggtgtagcgtcggaccatgtggaagtttctgaggctggggagccggataatggggggtggggcccgttggggggtaaaggggcaatagcgtcctttcacaggctaacctcggctcttcccagtcctctggactaaaatggggaacacattgggcctggcaccaatggggactttgccccgccggagcccccgccgagaggaacccctgcccaaccctgggagcttcgatgagctgcaccgtctatgcaaaggtgagaacttggcacttgggtgtctcaggatgaaggggcagaggagtggagggtcttgaatgccggatgtccggcgatgggagcaggaaaggggagatcatagctgggtcatgcagcctcag

SEQ ID NO: 56628 - DNA, 1045 bp, Homo sapiens
gggagtgaagctcgttgtcaacaaggttctgagcagccatttccaggtgctcccacttctctggcccctccttactattccccctttcctgtccctggatcatcttctcctttcctttgtactccagccctagccagtctatgtgggacaaatgagggaggatgtggggttctctttacctccgtgcctgtgggacttgttgcttttaatccgatgaccttctctgtatatgttggaatatttaggattcttgagaggccctctggatggggaaaagactaagggtgggatgagggattgaagtggagcaggaatgcgcttttctccactgaatcctcttttcctcaggtggcgcacactatacacatgagtgccctgggcttgccgggatatcacctccatgcggcctatgcaggggattggcagctcagtcccactgaggtgagggctccacacacctgggtcatctccctaaaaaccaatctgggacccaggtctggaggaagaggaattgtgtgtgttatggggaggaatgggccgtaacctgattctctgtgtcttttctgaatgagagagggtagagaaacattttctgtgaagagcccagagtgtgtctttgtgactccaccagggggcgctgtgcactcttaatgaagttctatatttgggtttaggctgagtggtgccatccggctcagccttactactgtgtacacccttccacaggtgttccccactgtggtaggggatatggacagcagtggcagcctgaacgcccaggtcttgctcctcttggcagagcggctccgagctaaggctgtcttccaggtgaccacagttcctgcctccatcccctgaggcacttcctctttctcctccacgggtttcctgctctgagggcttggaaggaggagcagagtctataatgatcataaagagggagggagattttacttcttgctcttgccacccagacgcagcaggccaagttcctgacatggcagtttgatggcgagtatcggggagatgactacacagccactct

SEQ ID NO: 56629 - DNA, 1009 bp, Homo sapiens
ctgagtcaaggtacttaggctgggaattagctatagttacttaggggagctctgctactcttggaccaaacaacaaatgtcttctttcatcacttattcataaatcctacagttcaagttccaatgcacactcactttcctcagctttctctcagtttctgatggagataatgctgggacttttgatgagtttcttcttatcttgtacctctctccccccaacactccagacccagtttctaaaatcaaggaggaaatactgatcgtttactttctaggaaaaatagaaggaagcctatagatatagtactgtagttccaaactggtactttgtttcacttatccacattcttattcctttcatgtctgactttaggaaattccagactcaccctacttgtctttatgtctctacagtcacctgctctacaaactgcctagcccaaccccactcacctttttcctcttggccagctgcctggttggttgctggggatgttttggtattaagctggaaaaaatattaggatatcagaatattagatattcatggaagtaatttgaaggcatcatcaccttagacctcttatatactctcaaaccctattaccaggtgcattcccttagtcttttgaagaagcaagtcttgagatcagagaccagaggaaaagttatcaaaattcatccagcaaagatttactgatgctagaaagtgtagaggacaaaacagacaaagaaattctgccctcatggagcttacattccagtgtatatagagacaaataaagcacataaaatgactactatgatgataagtgctatggagaaaaggtagcgaaaggaaatagtaagtactggggtggaaatggaggaatacagttttacatagagtagtcaggaacagcctctctgaaaagcagcatttgaccaaatagctgaaggagatgaggaagtaaggctcatagatatctggcaggagttttcaagggctctgggttggaagtgtgac

SEQ ID NO: 56630 - DNA, 1050 bp, Homo sapiens
catgagtttaaatcttctccttttcaaggccgggtgcagtggctcacacctgtaatctcagcactttgggaggcaaaggtgggcagatcacttgaggtcaggagttcgagaccagcctggccaacttggtgaaaccctgtctctactaaaaatacaaaaattagctgggcgttgtggtgggcacctgtcatccccactactcaggaggctgaagcaggagactcgcttgaacttgggaggtggaggttgcagtgagccaagattgcaccactatactccagcctgggtgacagaatgagactctgtctcaagaaaaaaagaaaacaaaaatcttctccatttcaaaatggtttagaattgtatgaggtgccaggggtcccagttttatgtatcatattagttgtaacttatgagcagctgtgacaagctacttggttttctcctcaggggtctctctttttggcatgtcggccctgttactccctgggaactttgagtcttatttggaacttgtgaagtccctgtgtctggggccagcactgatccacacagctaagtttgcacttgtcttccctctcatgtatcatacctggaatgggatccgacacttggtaagttaattcgggatttgcacattttctctgtgaagggagtggggagactgggaggattctttccttcattactgggtttagtgctgttcttttttttttttcccaagagtggagtctcgctctattgcccaggctggagtgcagtggtgcgatctcagctcactgcaacttctgcctcctgggttcaagagattcctgtgcctcagcctcttaagtagttggcgttatagacgcatgccaccactcctggtttttgtatttttagtagagatggggtttcaccatgttggccaggctggtctcaaactcctggccttaagtgatccgcctgcctaagcttcccaaagtgctaggattataggcgtgagccaccgcgcccagctagtgctgttcttaaggttagttgtgactcagagtcctcttggggaaagccaga

SEQ ID NO: 56631 - DNA, 1079 bp, Homo sapiens
gtctcaaaaaaaaaaaaaaaaaaaaaactgtttagaaagtcttgcagttaaatgtttatgaactttgtatgaccacagaacttttttttttttggcccatacaatggctttcaacattctgagagcaagtgtttggaagaatacaccttgagaaacattaatctagatgtgtggtcctgaggaaaagttgtatctattcattctggaagcttttgtataccgtatggggcctgtggcattctagagaacattcctcctaccatcaccacacaatagaacctgattttctgtcattggaataagtggataataggttccatactgtgggttttgagaagggtaaaggtggggcataagggtagaagcgcttttctctagaatcatgctgagaggagatatctattcctttaggtagaattactttctgagacaggaactgttaatgtcctatttactgaaattccttttttttttttttgctttgtccacagatgtgggacctaggaaaaggcctgaagattccccagctataccagtctggagtggttgtcctggttcttactgtgttgtcctctatggggctggcagccatgtgaagaaaggaggctcccagcatcatcttcctacacattattacattcacccatctttctgtttgtcattcttatctccagcctgggaaaagttctccttatttgtttagatccttttgtattttcagatctccttggagcagtagagtacctggtagaccataatagtggaaaagggtctagttttccccttgtttctaaagatgaggtggctgcaaaaactccccttttttgcccacagcttgcctactctcggcctagaagcagttattctctctccatattgggctttgatttgtgctgagggtcagcttttggctccttcttcctgagacagtggaaacaatgccagctctgtggcttctgccctggggatgggccgggttggggggtgggttggtgaggctttgggtgccactgcctgtgggttgctggcttaaaggacaattctcttcattggtgagagcccaggccattaacacctac

SEQ ID NO: 56632 - DNA, 1120 bp, Homo sapiens
gagccactgtgcctgggtgatcctgggtttaaatgtggaaagtaaaactataaaacttaaaaaaacaaaacaaaactggagaacatattctttgggacgtaggactagccaaagaattcttagacttgacacccaaagcatgatctattaaatgacatagattctcggctttccttctccctcaatccctcgcgctcttcctttccaacttggacccggcagaatggctcccgcaaagaagggtggcaagaataaaagggccgttctgccatcaacgaggtggtgacccgagaatacaccatcaacattcacaagcacatccatggagtgggcttcaagaagtgtgcccctcgggcactcaaagagcttcggaaatttggcatgaaggagatgggaactccagatgcgcgcattgatatcaggctcaacaaagctgtctgggccaaaggaataagaatgtcccataccgaatccgtgtgcggctgtcccgaaaacgtaatgaggatgaagattcaccaaataagctctatactttggttacctatgtacctgttgccacttttgaaaatctacagtcaatgtggatgagaactaatcgctgatcgtcaaatacatcaaataaagttataaaattgccttcaaaaaaaaaaagacataggttctcgttggatatgtagaaatcgcagattgaagagtttaattatttggctaacaacagttacagaaatgtatgctacaatgtgtttgacaagtcttaagtaatcttgttgagataacaatttgtataatttaaattatctgttgaaattgtggttttcagcaaaaatagaaaaattaaggaacatttcattccagtgggcacaggagtacagtaaacagagagactagtgtggtagggaaaatatatacttttttttgtattattcaagactaagaatgttacaaaatagaagagattacaatgtacaagattgcaaacagaaggaagatgtgatcaaacaatcaaaaactaattctgtgaaaagaccaataaaaaagacttctgacaagcctaattaagataaacagagatataaagatgtctcttttatttaaccatttaacattatttttgtctaat

SEQ ID NO: 56633 - DNA, 1082 bp, Homo sapiens
actcctgtgcccactggaatgaaatgttccttaatttttctatttttgctgaaaaccacaatttcaacagataatttaaattatacaaattgttatctcaacaagattacttaagacttgtcaaacacattgtagcatacatttctgtaactgttgttagccaaataattaaactcttcaatctgcgatttctacatatccaacgagaacctatgtctttttttttttgaaggcaattttataactttatttgatgtatttgacgatcagcgattagttctcatccacattgactgtagattttcaaaagtggcaacaggtacataggtaaccaaagtatagagcttatttggtgaatcttcatcctcattacgttttcgggacagccgcacacggattcggtatgggacattcttattcctttggcccagacagctttgttgagcctgatatcaatgcgcgcatctggagttcccatctccttcatgccaaatttccgaagctctttgagtgcccgaggggcacacttcttgaagcccactccatggatgtgcttgtgaatgttgatggtgtattctcgggtcaccacctcgttgatggcagaacggcccttttattcttgccacccttctttgcgggagccattctgccgggtccaagttggaaaggaagagcgcgagggattgagggagaaggaaagccgagaatctatgtcatttaatagatcatgctttgggtgtcaagtctaagaattctttggctagtcctacgtcccaaagaatatgttctccagttttgttttgtttttttaagttttatagttttactttccacatttaaacccaggatcacccaggcacagtggctcacacctgtaatcccagcactttgggaggccaaggcaggaggattgcttaaatccaggagtttgagaccagcctgggcagcatagtgaggcttggcctctaaaaaaaaaaaagttacctgtgaagtctcagctacttggaaggctgaggtcggagggtcggagggttgcttgagtacaggaggtcaaggctacagtgagctatgattgcaccact

SEQ ID NO: 56634 - DNA, 1048 bp, Homo sapiens
ccttgaagctgggctcctccgagtccactgttagcacggccgtgatgcccgcttccctcaggtgatctggctccgcgacggccgcggccccaccgaaatacaatcctggctgcacttccagcatctgcccggcacagctgactctgctggcgctggggttgctgagctcgcagccatcactcgggcccggagcctccaacatggccgcgcccagagacaaggcggcttcctgccctaccatcgagtagactccggctagaacatccttcccctgggactcgccagcctcggcggctctgctgctccctcggaggaccacgtcggccgcaggaatctggacttatcgctgaggggcggagcttcggccccattcagcgcggcctttccacccttgttccctctgacccctacccccaaagttgatggtgaaggataagcttccccaaatacagggtttctcgagctcttagtattgaaattttcaggaaagagacatcaggagcagctgaactcaaatgtgaaataaatgtcgcaccagctgaatcagaagcatcattttatgcatttgaagtaaaatttttttcaatattatggagccatctttactgtgcatttcatgattatttttcctttttctgcccaatttcattattggggtgtgaatccttgttgatgtttactgtctatttattttgaagatactaatcctatatttttgtaagtcaatgtcctccggccaggactacaagaaaccaactttaattaagcaagttggttttattactcagtcatgagttatggagaatttcagggcatctcagcacgaggatgttaggaagatcctctacagattttgggcttttatttggggattttggaaagggttgaaggaagcaggctttgctccagactgaatgctgcaggaagatactcagtacagtgagtatattttatatatcttttgtatagggaggacaggtgagagagatactaaagctgtaattggtcaagaagtagcagctatagtactggtataaagatagataca

SEQ ID NO: 56635 - DNA, 3197 bp, Homo sapiens
gggtggcgggtggttgatgaagagatgaattggtttggatctaaaggatccctgggctttgcctagggaggagatggttgcagcaaagacaaaaagaaaatgggaatcccgcagggcgcggtggctcacgcctgtaatcccagcactttgggaggcaggaggatcacaaggtgaggagttcgagatcaggctggctaatatggtgaaaccaaaaatacaaaaattagccgggcgtggtggctctcgcctgtagtcccagctactcgggaggctgaggcaggagaatcacttgaacctgggaggcggaggttgcagtgagccgaggtcatgccacagcactccagcctgggcaacagagcgagactccatccctccccccaaaaaaagaaaatgggaatccctaagcagttcttggttggattggagtataataatcgtttaaatttattgagcacataaaagaagatagtgatgaaatcaaaagaagtctgggaccagattttgaggtccctgaatgctaagatgaaaggagattggatttgtttttgttttgttttatttatttttattttgatatagggtcttgctctgtcacccaggctacagtgtagtagcgtaattacggctcactgcagtctcaacctcccaggctcaagtgaacctcctgcctcggcctccagagtagctgggactacagaccccaccacatccggctaattttttgtagaggtggggtctcactttgttgcccaggctggtctccaactcttggactcaaccaatcctctcacctcgcctcccaaagtgctgggatttcaggcgtaggtaagccactgtgtctagccaggagtttggatttgttctgagccattataaaaattttaaaaattactgttattatttttgaataggtaatagattcacgtggttcagaattcaaaaggaaaaaggaataattattttgtaccttgataatatttcagaggcaatgggcttatttgagaagcaaaaatgaagtgggcctaaactttactattaatagggggctgggctttgtgtgtttttttttttaattgttgctatttgctgttttattttaaaggtctctttttcagtcatgcaggagtcagtcgaagtgtggccataataactgcttttctcatgaagactgaccaacttccctttgaaaaagcctatgaaaagctccagattctcaaaccagaggctaagtgggttctttttttatagtaataattatgcttttgtgatataattttaagaaaatgaaactttatatttctttatcattacaggatgaatgaggggtttgagtggcaactgaaattataccaggcaatgggatacgaagtggatacctctagtgcaatttataagcaatatcgtttacaaaaggttacagagaagtatccaggtaagtaataattgctagtgtgtaatgggctttctagatgacatttactttagcattgtatgctttaccttacttccagcaatccctgagaaactattgtttctttttgaaactgatttagccagaaataacctattcaaaatcacatggtttataaatggcagggtcaggatttgaattcaggcagcccgtgcccagaacctaagcacttaaatcactgtcctctcctaccttagcctgatttctcaacactggaatttgatttttttttttttttaatttttgaggttagcacttgttgcctcaatttgacattaactgaatttatctgaaaatgcagagttgattttgacaaataaatacattttaattatgtcatatagaattgcagaatttacctcaagaactctttgctgttgacccaactaccgtttcacaaggattgaaagatgaggttctctacaagtgtagaaagtgcaggtaaactattttatatcctttggatattttatcttgtctcagtagctgaaaagtacttaatgttttattttcttaaatttctgtaggaagattttgtttaattgaaatttttagttcagatctgttttcagaaagaatataaattcttaaaaagagaaataatcagattgtaagggttattgaaaatttaagtagtgtaatcaatgttacattattttgttctctaagcaatattgcacattttgctgggcgcagtggctcacgcctgtaaccccagcactttgggaggccgaggcaggcagatcacctgagattgggaatttgagaccagcctggccaacatggtgaaaccccgtctctattaaaaatacaaaaattagttgggcatggtggctggtgcctgtaatcccagctactcaggaggctgaggcaggagaattggttgaacccaggaggcggaggttgcagtgagccatgatcacgccactgcactctagcatgggcgacagagtgagactctgtctcaaaaaaaaaagaaataccgcacatttcatccatgttttcatccttttggaagtcattaatgcttttgtttgtttgggggttgcaggcgatcattatttcgaagttctagtattctggatcaccgtgaaggaagtggacctatagcctttgcccacaagagaatgacaccatcttccatgcttaccacagggaggcaagctcaatgtacatcttatttcattgaacctgtacagtggatggaatctgctttgttgggagtgatggatggacaggtgagaacacattttattttctacaattttattttatgatctatattttattccttcttgcattttaagctctattttaactagtgttttgctccatttcttaatttctttatttctgaagattatatctttctagtgtagataagactatcaaaaataaaatatttttcaaaaaccagctgatccaacatagtgaactacttctggttgagagccctggtctaagttaataaatttcctttaaggctatttatatttttttcaaatataagactaacatttatttttaaactaattagaatatattggctgggcactcttgcctcattagctcatgcctgtaatctgagcactttgggaggctgaggcgggaggatcacttgagcccagggtttcgagaccagcttgggcaatatagtgagacctcatctctataaaagaaagtaaaaaatttttaataagaaaaaaagaaaagaaaaaatgtatta

SEQ ID NO: 56636 - DNA, 1061 bp, Homo sapiens
tatcagtttgtctttaaatagctaagaatctgacttatatgctgtcaatacacacagttagtaatacagcatgaaaatcctaacatgcttttctatactttagccgtgatcattttcatttgaagtcctaaattacaaactgatttaaaagctatatatatatatatatatatatatatatatatatatgccacatccatgaaaccttccttaatcaaatctcaagcttcacttttctcccttcaagctccctgaatacaacattcttcctatgagataattgtagtctactatctattacagtaaatttccaatgcattttatctcactgattagattataaactcaacgtggggatcgtgtcttgtttttatatcctatattgattgccaaagataatgatttgttttgtataaaagtgaatgaataaagtaacacatttgctttatttcagcttctttgcccaaaatgcagtgccaagttgggttccttcaactggtatggtgaacagtgctcttgtggtaggtggataacacctgcttttcaaatacataagaatagagtggatgaaatgaaaatattgcctgttttgggatcacaaacaggaaaaatatgaacatgatattttatagcttgggaagaaacttgcagatgatatgtgctgcctttgcttcttatcattcatggcagattgtttgtgctttcaacatttcatttgaaatgggagaagataaaatcacttgatgtaacctggaaactatgctttacatggcaatcaaagccttttgatcatgtacattttatttgatattaaaatcttttataaccagatactgtctgtgtttcatatatttttaaaagttttgattgttggaatgttatatgatcttaaggtctgtatagacaaaattatgtacaaaaatttgaaactattatatttaaatgggtattcttttatttccagacacataaagcagatttgtttggacatattttggaattatttcactttctttcttttaagggacattagtaaacccatacatgtctggatttttttc

SEQ ID NO: 56637 - DNA, 1062 bp, Homo sapiens
gtttgtctttactaggccaccgtctcgtcagcgttacggagtattttgtccgcctgccgccgccgtcccagatattaatcacggagttccagggagaaggaacttgtgaaatgggggagccggctggggttgccggcaccatggagtcaccttttagcccgggactctttcacaggctggatgaagattggggtgagtgggatctgagaatgtaccagggtggctcgggttcgcgtctaaaggtttcttcctccctacttccgcccactcgtggtgacaggtgtggaccaaccctgcctggggagtgaggcccctcgtcactcctgttcgtgcccctggaagagtctgggagtatcgttcggcttctgtcctggccacagggagagtagaatattgtctaactggagttaactgtcgtttttcactattcccactggggaagtaccgggtgatctttttgtgtggctaacactggacgtctttaggaggtttagagcaaaatggctgggaccgccaaaaaggctacaagctatttcctgagtgtgaaatgtgggcggtgagcacaatggagtgggtttttgtgtgtttggtgtatatgagagaatgtggttatatacaagaaattctaatcttacagcttttactattggtttaagcctgatgtccgtcttggcagaaaagcaaaacacccaagcacctgacctcgggtccctgcttagctacacctaatacttatggtgtaatcctgactgctctccagatacagctcttaattttcttgttaatggatattttgtttggttttggtggtcaggaagggtggaatgggatgaagtggaaatgagaatgaagaaactttgttatctaagtatttagaggagacttttattctcctcttgattgcaagatataatagtaatattgttcttaggttccaatatgaatttgggattgtgtaggttcccaaatgggcccgctagtgagcctacaccactcatcagccttggaactggggggaacccagtttatctttctcccttggatcagcattctcaatagcag

SEQ ID NO: 56638 - DNA, 1027 bp, Homo sapiens
tctccatggttttgccttttgcagaatgtcatatagttggaatcatacagtatgtagcatttttgaattggcttctttcacttagcaatatgcacttaaggtccctccatgtcttttcatggcttgatagctcatttcttcttagcactaaatagtattacaaaaatactatttacagtgttacaaaaaatagtatgtatgttctatagcctattagtctgcctaggctgccataagacaacaccacagactgcgtggtttaaacaatggaaatttattttctcccagttctggaggttagagttcaagatcaagatggccgcaccttcaggttctggttagggctctcttcctggcttgcatgcacatggctgccttcttcttgtgtcctcacatggcactgagagagagaatcttcttcttcttataaggccacagtcctatcagattagtgccccactttaatgacctcatttaactttaattacctcctaaagactgtatctctcgatatagtaatatttggggttagggcttcaacatacgaattttggaggacacagtttaggccataaattcacagtttgcttatccacttacctattgaagcacatcttggttgcttccaacttttggcaattatatataaaactgctgaaaacatttgtgtgcaggtttttgtgtggacatgcattttccaattgtttgggtaaatatcaaggagcacaattgctggattgtgtggtaagaacatgttttttgtttgttttgtaagaaattgccaaactgtcttccaaagtggctataccattttgcattcccgctagcaatgaatgagcatttttgatgctccacatccttgctaacatttggtgttgccagtactttggattttagtcattctaataggtgtgtagtggtatgttttaatttgcagtttcctgatgacatatgatgttgagcatcttttcatatgcttatttgccgtctgtatgttttaccctcctctctccttctctcttctctt

SEQ ID NO: 56639 - DNA, 1037 bp, Homo sapiens
tttaccaactgttaacatcgtgccacattcactttatatcttaatattacccacactttcctcctttttcacatctgaaagtgggctgcagataatatgaaactcctaaacacttcaccatgtatttcctaagaatgaggaaatgtttatttttaaaaagcatcaattcattttaatatgctttatacttcaaagctaacatcacagggttctttttcaccttcttgcaccatatgcttgtatttctcttctgccgctatgagaatcctgattcccaataacatcctttgtttttataggctcacttcagcagctctgttggaaataaactgaaagaggggcaagggcagaagcagggagacgttttggaggctgttatagcaatccccatgagttacaatagtagcagtggagtaatgagaagtagttggattatggatatgtacacacacacacacacacacacacacacacatacacacatatatatacatacattttaaaattttgaaatagtttgaaatctatagaaaagttttaagaacagtgcaaagaactcttgcatgccttttacacagactcctcagttgttaaattttactgcatttactcaatttctctctttctccctttcaagagagagagatgtgttgacccatcacctttaaatactgtagtgtatactctctatcctcctgcctcccaaaagaaggccactttcctctattactaccctatatttcttccagtcaggagataaacattgatacaacagtgtcatccaattcaaagacaccattcaaagtttgccatctgtttcaataatgatttgcttttctagtctaggattttacttgcaaacactcattgcttttacttatcatgtctcatcagtgtcctttaatctggaacagttctttagtcttttcctgtctctaatgtccttgacagtcttaaagagtagaagtcttttattcgacaagatgatcctaaaccactaaggggttccttggaaaaatgaccaattccagggctgg

SEQ ID NO: 56640 - DNA, 1045 bp, Homo sapiens
cagcaaaaaccatcattattcagacagtaccaacgcttatgccattggcaaagcagcaaccaattatcagtttacaacctgcacccactaaaggtacctgagcagaatttaaggctgtgtaaatttatttggagggcagtaagggttgtgtcatatgatttgttttaattcaggttataatttctgagcacgtgctgtttgtcaggaatgtctttggttatgaggacgttgcagagatgactaatgtgtggttcctgtcataacaagggatatagctctccagaccagttacatctgatggttattttgaaaatctgggacactttcttggtgccattttattctggtggataaaatacaggaacacaaattttaagctagttgaaggcagagttcaggtcagccagatttttgtggctgtgaactttttttgttttgaaggaatatttaaaataatagggtccatttcaggtgtgttatagcaatagaatcacacccttaatctctgaggaggctgcatggtttagtaaacagtatattgacctggtcatgaggagacctgaactctgctttcaactagctaagaatttgtgtgtttcgtattttatccaccagatggcctcatacacttgtgattctatgagaggtttatgtcattattgaaagaagttcaagtctgaggatttggtactattcagatatgggagtcatttccgtatggagatctcttaggtagattagtcatcattgtactcatactgatatctgtatacactgggtacaagaaaacttttgcagcattcttatctctggatttagtttgttggcaccagatatgactaggcgataatggggtatgggttgtaaataaacaccaatgttacatttgtactgtatctccaattgtgaataggtagctcgttttttggagcatagttttaatgagggtaaatttgataaatttaatttccagatactcttttagctttgttctattacatggtcatagacaatatgacattgataaaaagaagacctagatgag

SEQ ID NO: 56641 - DNA, 1101 bp, Homo sapiens
ttggctggtctcaaactgctggcctcccaaagcactgggattacaggtgtaagccacagtgcatggcctgtagctccttcttcttctaatattgagttactaagtttatgttcagatatttttggtattgtatgcatttgtaaatcctattaatttagaatacatgactctccatattcagtgtaaaagatttgttatttataataagacaaatccttttagcactaataaatttcagaggttaattcttagaaatctagggattacagcaaatttgatagctgtttagttgagaaagataaataagaaagtatattaaagtatattgttaatgataactcaaagagatgaatttagttggtcacattaaaaacataacaaagtcaccataagcgtgtgctgctattgatccaatgttttaattgatggtgtccaatcccttggtgttgatcttacccattacgtctgcagaaaagacctaattataagctgcttcccctgccacagtagttgtgtaccctttgattccttttcttttttctaacgcaggccagacggttttgctgtctcagcctactgtggtacaacttcaagcacctggagttctgccctctgctcagccagtccttgctgttgctgggggagtcacacagctccctaatcacgtggtgaatgtggtaccagccccttcagcgaatagcccagtgaatggaaaactttccgtgactaaacctgtcctacaaagtaccatgagaaatgtcggttcagatgtaagttttgaaacttagtgcttctcttaatgcctgatttaaaaaccaacaaaaaaacaccttttgcttttgttgccttgtttttgttttttttagagtttcttatattgcatcaaataaaagagtgtgctgaattgcacatctagtctttggaggaaaattagggtaaggcttactacgttagaatctaagtgaaaaggtttttgaaagtgaagtggtttgatgaaaagcaaagtatgcatacctccctcttctttactccttctttagaaccaaccctcttattattctcttcaagcccttacaccctcaacccagtcatccactaata

SEQ ID NO: 56642 - DNA, 1051 bp, Homo sapiens
agcaaatactcttagtggaaatcagtaggtgggaataatggaaagaaaagtatccagaactgatatagaactataaataacctcagatgtgaggttgatgaagggatacaaactactgttaggagtctccttccttccggctcagtcaccccactgaatatcttccaaactctgtatcaccttttaccctgtttctaaatcctatagttaggaaacttgatcccttccatcccaaaatgacttccctttgggagtccctgtcttgggttcctagagtcatcatgagaaggtaggtgctggggggaatcctttgctactggtttgcaggtattagaaatggtgcgaaggggattctcctgtcataccaaattagaactttgtatttcctttctctagaattggtgtacagttaatttagggatttcaggtatttttagtattgttctatgggagtgatgtgacatgggcctagatggatgccctgcacacagtgttcctctcttgcagtggaggaacatgagcttggagaatctaccatgtgtatagcaagcagaaagcaagcctcctcattgtctagagggagattttatctcatccttcaaggttgcttgttggaaactgaaccttgagaatggcctgggaaaagagtggtccggaccttgcattctttgcatacccaataagacgtgtaggagcaaaactcataagagactccctggaggtgtgtttctcaagaaaaatatgtctataataatctatttgcaatgcatagcaactcagaaaaacagagactgcctatgttctatttcagaaaaaaagcaaaacttcaatagacgttgaagttgcttatctgtaacatccaagaataggacgctggttaggtcaaaatgtgagctgaatctccttaaattatgtggctagcttagatctcagaagataaataatgaataggcacttcttaataacttctaacaacaaacaagttgagatcatgatatttctttaggctgcaaagtagaggaatctatcagaacaaatccaataggaagga

SEQ ID NO: 56643 - DNA, 1006 bp, Homo sapiens
cacacaaaacttaatagaaagagtaaaataaaattttgactgtcatgagattgagaagagtagagatagtgaaagtctaaattttctctttttttctgctttaaacaatttaatgagaaaaataagtgtacgtaagattcttaacaaaaatcaaattaagttttttaatgtatttgaatatttaaagtaggattgccacaaattaaatttgccaatgattttaactatgtgtgttttttaagaatgtatctataaatatgtttactgcaatacatatgcaataatgtatgttatgtaatttttatttaattgaaagattgtatttttatttttggtcagttacagtgaagaggttaatcagtaatggcttccactttatctatcagtttagagggcaagattcagccaaatgagaataagaactgttagaaagatgtgcagcaagtcaatgattaccatgtgattcatccataggttatcaatacttgatctgacttgagtttacatgagatattcgaatgtatttcttagcataaaaatcccattttaatttttttttttttttttttttttttgagataggctcttactctgtcacccaggctggagaacagtgatgcgatcatggctcactgcagcctcaacctcctgagctcaagtgatcctcctgcctcagcctctagggtagctaggactacaattgtgcaccacgatgcccagctaattttttaattttagcagagacgaggtcttcctatgtttcccaggctgttctcaaactcctggcctcaagcgttcctcctgcctcgacctaccaaagtgttgggattacaggtgtgagccaccactactggctcctatctagtattatatctaatttaatttatggtcattgagctcatttcttagcaacatcacagaaacaaggctttagtcaattttattaataaaaagagactataataacttacagtgtttatcaatcaataaggtttttagttttaaa

SEQ ID NO: 56644 - DNA, 1008 bp, Homo sapiens
ttggaattaggttagtggaggagatagcattccaaatggaaataaacaatgcgaataaggaaacatgttagacatgtatggagattatgaagtagccttaaatgataagattggaggagtgtggcttgaatagctgtagatttagggcagaaggtctggttaggccgtgggaggtcacaatatggaagaccttaaaagaaaagatgggtagcagggatacatgactagcttgtttttgcaattgagtagtaagataaaaatattttcttaggagaagttatcttagaaatggtggacaggatgagatggaacacaattgaaataggagtctgttgcagtagtatagggatgagttaatgagtgcctgtattaggagagtggaagagggaatagagagaaagtaattactgagacacattttcactggaataaatttggtcattagtatatacttttaacatattcaatgagtgaatgagggattgagaaggactgaatatagtgaataaagtaaaataatagttactattgatagaaaatggatagatttttaaacaatctagttagagggagatagttcagtttgcacataatgaatttgaagtggtaataactgtaagaagtggccttataattaattgaatatatggttctggggcatagccatttaagggccagagatacagatttaagatgtatgtatatatgcatatatatttaaagatactttctgagggagtttctaaggggaaaattggaagattaataaacgagccttagaaaacataagaagaaattatttaacatttgggttttagaaggccttatttaatcatttgattttaacttatttagtttgagcagtgtgttttcaaacctcttttgaaacaactagtaacctatgctttgaaaaaattgttggttaaaataattgtaaaaatgagtatattctgatctattttgatctgattttaaaaccagggtattctgattcattataactttttc

SEQ ID NO: 56645 - DNA, 1143 bp, Homo sapiens
atattgaattctttcctcttgggtgaagaggcaactgcaatggagtggctgctgtgtttttttctcttctgcttctctccttttctctccctgctggaaaagggaacctggaagtctctgctctagtcttgaaaagtgttatttcctcacctttgattttttttttttttttaaataagacaaggtatttgtaagacaagagatttacgtaaccggtaaagaggaaaattctaatcttaagcgttgctttttctgaaatcgatgttagtttaattgtatttaatgtggtcatttcctttagaaccagaggcttaaagtccctagtccaaagcgaagagttgtctgtgtgatgatagtattggcatttataatactgaactatggacctatgaggtaagtgaatagatatttattttggacactaatgctaaaaacttaaattctcattattctttagcttttgtcataaactagagaaaaaatgatttgtttttcaagatgtgtaaagagtaatgagacaggagccatgccttcaaagatctcatgatccagctgggaggagagacaagtagaaggatgactatggtataatgtgatgaacataataataacagtgtgaatgagtcctaacataatatagagtacgagttccttgaggtgaaggttcttgtcgtattgatgggtactcgatacattttttgttgagtgactgagttataagggagatacctacgaaggaagctgaacattgaactgtaatatcagtttgccatgtgcaaagtatgagaaaggcatgccaggcaaagggaacagcatgtttaaaggcacagttatgaaatggcatgacatgttcataaaaaagtgaaaagttcagtgtatcttgtatatgtggggagtgtgcctgaggctagatatatggttagaagtataggtgctgctgtgtacaatgaggcatccctagcttttaggtggagggtaacataatcagctttgcatattaggaagaggactttgtgtgttgtattgagtatagactgcagtgaggagaaactattggcagagaaagcattagaagactattgaggtgtttcaggtaataaatgagagtctgaacttacactatggttataaaaaggatgagca

SEQ ID NO: 56646 - DNA, 1038 bp, Homo sapiens
tttacattcccactagcaggagagaggagtatccattttctcgcatttcctaacactggatattgtatttttaaaattcttgcctatcttgtggatcaaaaatgttattgttagcctgtcacattggcctgtgtgctcttcctcaaacactctaagcctgctagcacttcatggtcttcactttcattcccactgccggcagtgcccttccctcagagattctttctgtcaggtgttaagctcaaataccatgtacccctgagcttcaaataaaagttttaaaaaagtgattaaaaaacatcaagtttttttggtcaaaattaaaaaaaaaaaaaaaagctcaaatgccacccctgtgaggctttcctggactaccttttctaaatgtctatcccagctcctgccattgcattccctatcgcctttctttcttcatttttctacatagcacctctccccttcaagtatgctatgtaacttatttattttctttctctccctggaggtatttttatctcttttgttttccagtgcttagaacagtggctggcacatagtagttactcaataaatacttgtagtatgaatgaatgtctccctcacccaattagtaggaattatatatgttcataaactatttctcaaaaaactgtgtgttcttttagttcctcatttcttatctggtatacgtggtacttatttatttagtcagacatacagcaaatatttatagagcacttaatgtttgccaggtactgagcaaggaatcaaggatgcaaatatgaataaaagtacagtctagtaagagaatcagatatgtaaacaactgttgtatgagaaagaattatatggatgtcatataaacatataggcattaaaaaaatgaaaaactttttgtttacacacttctgacaccagatatgtggattttctacactgagcaattctccaattctctggacaccaactggatgtcctacaatttgactcaattcttttttaaattttaattgtaaaatattttttattgagacaggg

SEQ ID NO: 56647 - DNA, 1014 bp, Homo sapiens
ccttccgaagtgctgggattacaggtgtgagccattatatctggccaatttaagtcatttctgacactacctggagctagcacaggctcccacaggttaagggctgagtatccaaagactgcccctgacttcagtcaccagttgcaagtcccaggttgtgacctgtaacttctgactaagtggctataagttgagggttcccacaattccctcttgaggtttgataattttctagaatggctcacagaactcaggaaaacactctatttactattactggttttattataaaggatatgtggggcaagctaaatgggagagacgcatagggtaaggtataggggaagagtgcagagctttcatgccctctccaggtgcaccaccctcctagtacctccttgtgtttgctaacctggaagctctccaaattccattgttaggggtttttatggagcttcattaggtaggtgtgattgattaaaccattggccattggtgattgcacttaaactccagccccctctcccctacttggaggttgagggatgggactgaaaatcccaacccactaattatgtggttggtttctctggcaatcagcctccatcatccaagagtcacctcattagcataaactcaggtccagctggaaggggcttattacggataacaaaagatgctcttcttaccccctatcactcaggaaattccaagggttttaggagctctgtgacaggaaccagaataaaaaccaaatatattatttcttattatatcgcaaattcacaggcatattcttgagggaacatagaagtaaccagtaacgctgctagtggcaatcatgggaggctttatgcagtagtactcgatgaaggaataaagaggattagattatgctacaggaagtgacagtggggttaggggggacatctcattgtggaagccctcatgaatcaatagaattttaggaaagaaaagactggaacaaaaaaaattttttgagtgcccccaccc

SEQ ID NO: 56648 - DNA, 1030 bp, Homo sapiens
tatttgtcagtagtatttgtcagtagtaaagaagttcctggttagaggaaggagaagaattattctgcttttatgctgttgtcaatgccaaagcatatcaagattttaaaaaaattctgtttcttggtgtaaagagcctgtaactgctctcctttttcttttctcatttcaacctttttttcttccggttacctctttcagttgctaagagtatcccaaactcttataaaatattctgtaattttagtgaactgacatttctttgaaatatctgttgtatttaagcattatgtcttataaaatattctgtaattttagtgaactgatttctttgaaatatctgttgtatctaagcattatgtctttgatttgacttgtcctgtttcatagttctaccctcttcctagactttgagtttttagagaaggtaaaggggaaaattaatgaaatatctttcaaaatgaaggcaaaataaggacattttcacatagagaaaaccaagggaatttgtctccagaagacctgtgctataagaaatgctaaagatattttttaaaagacttgggtaaatgataccagatagaaccccagattagcaggaaggaagagcatcagaatgggcaaatatttgggtaaaaagaacaggactttttaaaaagaaactatatttatcttatgtgtgtgtatttaaatgtctttaaaagactattgtctttttaaagcaataataatggcaatttattatggggtttacagcttatatagaagtaaaatataagacaataagaacacaagggggggagggataaatggaataatactcttaataaaatttttatgttgttcgaataatatttcaagattgactgcagtaactgatatcaaagtataatctctagagcaactactaaaagctaacataaagaagtacagctagagccaggcacggtggcttgtgcctataatctcagctactagggaggctgtggcaggaagattgcttgagtccaggagtttgagaagctgcggt

SEQ ID NO: 56649 - DNA, 1006 bp, Homo sapiens
aattgtttccttttcttttctcccttaaacttctgtacatgcttctgttttagcgcttatcgcattgtattgttttcctatatctgtcttcccagttaaactgcgagcttcttaaaggcagaagtcaaatatttaattttgtagcttgggcacatgtaggtgctttgattactgaaagatggatatatggacacagtaatgaacaaatgattaaaaaattatttaaaccattgtttgacagggtaagattactttctaatgaaatagaacttggtaatatgcccttgaagtctgataccctgacaaaccgcttctgaaaatcagcttacataactaccagggagaataaaaaggcatagtgcaaagcaaatgctgtgtgaaagacaggtttccagtgtagcatatgtgggccactaatgggtgtagattgaactgttctcttgccaagagtcatcaataagaactctttaatgatggcttagttcatagatgtattttggcatgaagatctctgtgtttaactcagtaaacaataggatctagtttcattatggacttttcatacttcttaggaacttgtcattgggaagataattattttagacaagcagacattgttatatgttcagtaacacttatatagcttggtcataaaatttgtggtgcttggactagcttttgggctctttctttaaacttaatggaaagtgccttaaatgccttaatctccataagacacttctcccagactagaatggacctaaagagttctaatatctgtcagtgtttaattatttgaactgaatatgtcagaaatcttagcaatggaagtttaacaaatttaagtatagaatgaaccagtataggaagatttcatataattttgtgatacagtattaaactttttttttttttaatattccagggtgctctggaacagggctcaaattctcagctgatggctgttcaatacacagaaaccactagtagtatcaggtaagacagt

SEQ ID NO: 56650 - DNA, 1038 bp, Homo sapiens
tttatgtttactggtttattatgattaacaaaggatacagatgaatagcccgatggaagagatgcatagggcaagctatgtggaaggggtatggagcttccataccctctccaagtaggctaccttccaggcacctcctcatgttcagcaatctggaagctttgcgagttctttatgtattctatatacaagtcctttatcaaatacatgacttgtaaatattttctcccagttttttgcttgtatttaaatttcctttttagtgtttttcaaagggcagaaattcttaattttgatgaagtccaatatgtcagctttttattttatggactgtgtttttatggttttaagaaatatttgcctaactaaaggtcacaaatattttctcatattttttttcttaaagtcttacaattttaggttttacatttaggtgtatgatccattttgaattaatttctgtatatgtgcaaggtgtatatcaaagttcattttgtgtgtgtggatatccagtattgtatgatattcaatgctgtgttttcacctaatagcttttaaaggaagaattaaagcaaagccaagttaaataggttataccagactgttagttttctttgtgttatccttgactttgttaggttgcacattttgctggaacttcttaaaacagtatcctatgattgaacttcttcaacctcaaatttccagtctttatacttaaccaatgaaatgttatttatatactctttggaaacataacatatactgtagataattataacaaaagtgtaatgggtagcagaagatattgccaaaccaaaattctggagaccagatgagacaaacacataatatgtgcctgtatgggtcacagtgctaggaaatacactgaaaagtgaacaaagaactaaaaataagcctcttataagaaaagctgctacttctgggctaatctattagtagtttgttttccttaatttgaaaaagagcttcagaatcagactctagagtgaatcttttaaaactatatatattatg

SEQ ID NO: 56651 - DNA, 1036 bp, Homo sapiens
gtgatgtctatagaactacagacttagattacagtcagaaaactgagtaacagcagacaccaggttttcagctgtttttagggtttattcagattgactacatcacattcatttggatggatttagtgacatcaattgataattgtaaagaaactagcctttaatctgacattttcatattgatattagataggagccacatgactatgtcatgggttcattcacaagatataataaacattattttcacttgtagcataaaagcagtctttagtgttatcttagaagcattaaaacacacacatatataaaatcatatagattaaaaaattctatcagcataggttctgtaattgttaatagatgtaattgcataaggtcgctatgcattatttctcattttcagatgaagcctgtcaccttgacatttttatatataataggaatccacaggttgttaaaaacataaggaaattaagataatttgaattcagattataaaatagttcaggtctattctgatgaagcaatgtcacttaggtctgaggcttttgggtcagcttttaaaagtttatcttatttttcattaaaatatgtatgtataatactctatcatgcaaagagaaatggtcaacagaatttctgtgcatatatggttgctggttatttgaaagccattctcctcctaggattatttgaccaattttgtattcagcttagattagggagaatatagtgtctccttaggtaaaatacttactagaaccaaaaagtccagattaaattgtttttatttttattttactgcagttttgtgcagttgacctgattttaaaatataaaactaggaaggcatatttttcatctaccaaaatgtgaatcttactttcattttgaaacaaacacctctgctttaagaagatgaacggtagtgataaatacaaaaacgttaaaattttttaaatgaatagcgtttgttgatctttaaagaaaacataaatgtgaaataactttagagcttaaaagttttcttcct

SEQ ID NO: 56652 - DNA, 1047 bp, Homo sapiens
atttaaagtaattaggaactcatcgtaaatattttgtacactactctaaaaatctaattccaactagtgaatttagcatttataaatggaggtgtctatagaggaataaaatctttggttaaccactactttacttttagcagtaaagtctgcagctcatgaaatttgtaattctggagtggtttcagtttgcaccatcccctggggagcctgttgatacagcactgagctacagattattattcagctgtagaagttttatgcttaggcattttcttacatcttcttctctcagtcagttgaaatcttgtatttttgccaaataaaacaaatcctatattaataagaagctataaataaacagtaggagcatgagtcagagccagcatcaccccattccttgtgtgtacctctctagtactccccagtatgttccttttgcacaaacatgtagtactgcgtaactactgttctacagatgaactccagttatttaagtgaggcctgttttttagaactaagtaatactgtaactagtagaattctggcatgttaccacagtcaaaagcagaatgtgaagctgtatgctattgatgggaggaaaaaagaaatatatttcctacctttcctgtataaagcccagaagattcctgttagatttccaaaatgggtttttatataatataatataattcaacatttttttcagaggaaaaaagaaaaagataagttgcttgaaagtcccatctcttttgctagtcggcttctgtctgataaaattttattctgttttgcttcattgtttattcattcagtagatgttcattgaacacttactgttaccaggcactgtgctaccatagacggtataaagacaaataagctaaaatccttgttctcaaggaatttattattgtagagaaaagtgacttgtaaatccaaaatttcatactgggataggaactataaaagagacatcctgcagaatactgagattataaataaaactagtatgtttgaagcatttagtgtcctagctgttttata

SEQ ID NO: 56653 - DNA, 1048 bp, Homo sapiens
cttaaaattaatgacattgttttgagtgacagtgccgaaatatatttctttctatggcaacattcttattctactatcctttttatttttaagtagtttcatttttgtcactgttgggttattttaaacaatttaattggagggaaagaaatacaaattcatcaaattttacctccagaattgaatttccttcactagttccttaataagtatttaagtaaaagggggtgcaatatcaagaagactaaattataaatatggtttctatgctgttaaaaaataacagtcctgtccttaattaaccattatggagattcctcttgaccaaatacctttagaactgtttcacagatttataatttaactagtaatttggtttaggtttaggtttaagtgacagaaaatccaaaataatagtggcttagataaattataagtttatttctgtctcatgtataagtttcagagatctaatgatagctacttaatcatcgggatccctgtctccttctgtcttcttgctccataatcctcaacttgcagcttctgtctcatggaacaaagacggctactccagctctggcagtcatatctgccttctagctagcaagaaggagaaagggaaggaggagggaagccttccaccattaccaccttgaagaagttgccatttcttcttacagtccgttgaccagaccgtgtagccttatttggttgcaaaggaggctaggaaatatagtctttattctgggtggccttgtgcccaactaaatatcacaagtcctgttgctattttaatgttacagaggaaggagagcatatattgggtaagaaaaaaaaaaaggctgtttctgccacaattcagtttccccaacaaaataaaaacttggatttatattctttaaaagaaaatatcctctgtagcacagtgctgaatacatgacaggacactgtgctcagtaaattttttttaagtgaacagtaagggccggtcacagaggctcacacctgtaatcccagcactttgggaggccgaggcgggcagatc

SEQ ID NO: 56654 - DNA, 1058 bp, Homo sapiens
gactgtttaggggagatactctcagtatcttgtgacattatctagtctagcccccatcattttacaggactggaaactgaaacacagaaaggatacgtagtcttgtccagattatacagctatttagtggcagaattagaattaaaatcccttgtcttgactgcttgaccagtattctttatagtggtgctacagcatatgtgttgtaaaaacctaggagttttccaagatcactgcatagtgcctgacaacggtagacactctgtaaatgtgtattacattaatgaatgaatgattctaagctggtttgtagttaattaagccaacttcaaataaaaactataatttttcatcatcccaacgaaatattgacctcttagaagccctgaatttggcctgttctaggactaagccaattgttatatataacagattgttctttgttaattttaggatcacctgctgttaccagctaccacccataacaagaccacaagaccaaaaatgtcaattgtgttaccagcaataaacataaatggtaagttgaaattctgatgtatgaacaatatgagatttctttgtttaaccaggattctcttcattagttcaaagacatttaaaatgttcagttaaatgagtatatatccgtacattatttctgaaacatttttccactgttttattatttttaagatccattattcttttaaaaaaaattactacatccctaaaagaaaaagtagctttcttttacttacaaaattggaaaagctagcatcttgactgctctacagacttgcatctgcgacccttctagtcataaatgtagtgtaagaagcccctgctgtgttctgacagtgaatttgtaaattagatttttggaactcaaagcagtttcctgtgttacctaaatgttgatatcatcctagaccatgccacagaagcctgtttatgtttaattgataatactgatgagtttgacactgatagtattactattgcattttgttatattactagccctggacattaaacaaaatacaaataataatataatg

SEQ ID NO: 56655 - DNA, 1618 bp, Homo sapiens
tgagaccaggtggaggtaattcgatcatgggggctgtttcccccatgcggttctcatgatagtgagtctcacgagatctgatggttttataagcatctggcatttcccctgcttgtactaactcagtcctgcccccttgtgaaaagggtgcctgcttccactttgccttctgccatgattgtaagtttcctgaggcctccccagcaatgtggaactgtgagtcaattaaacctctttcctttataaattacccagtctcaggtatttcttcatagcagtgtgagaacggactaatacaacctgtaaggagagtggtccgctggtttcctctccagcctcatcgcctcctactcttcccttgattctctctgcttcagtcacactggtcaccttactattcctcagatactcagggcacgctcctgcctcagggcctctatacctgctcttccctctatatgtaatgccctctccccagacacctgcttgactagctcccccagttctgccaggtctcgaacaaaaaatcaccttttcacacgcacacaaaaagccatcttgctggtcaggacttgccagaccactctttgcaaaattccagtctagcccctaacatgtcatatccaccttccatgctttagttttatccttagtctttatcattttcaaacatactgtgtatttacttacttctctcgcttaccatctgctcactagaatgtgaatgctgtgagggtagggctttcatctgttttgttgttcacttctccactccagcacctgtaacatactgggcacatagcaggcactcaataaatatttgatgaatgaaaacagattagaaaatagaaagtcaaagaagctaagtgagtttccccaaaatgatatggtatagcagcatcaaagctaaaaccaagactggtcttctgatccacatgcagtttggtgctcagttaggccagaatccgaaaaagttgtaagttaagttctgaaataaaactcagccaaataaagtagtttggtgtaatttgcacttttaaaataatttttcatcagttactatatcatagaggatgaagagcagtccttcccttggactgtctccaagcagcaggaataatgagaataagttacagaacttaaaataaacccaggtgtttctgggcctgagattcttaatgtccacaatgaagggaccatgtcagttcagagctcttcacagctctaatcttgaatccatctcatggatgaatgaaatgcctggttttctttgtaatttgttcagttctatgcatacaaggtatgcagtttgttctgtagataaactacacatgggtatttctgtaactctccttttatcatcattaccgtctgtttgattctttcccctacatttgtgcaaaatgtaggcttgtcatctcactgtgttgtattgcaggatcagcaagcatgtcaaggatctcatgtgtcttctaatctcatgcagcctctgctgcaaggaagctctcaccactgcctcctcagagttatccaatgggcaaagaaaccagaaggcaggacgacttaaggccagggaactaaatatgcaataatggtgtctgggggtcaggaaagcaag

SEQ ID NO: 56656 - DNA, 1067 bp, Homo sapiens
tttataaatccagacacctttatgaggatgtttccttggtttcacttatgtaagccgacaaaacgatcagttgtaaggaactgaaggaagtaaacacttgaatgtactcaaatgtctaggctttgctgaacattatatgattaaaaagcagccaagttcagcgtggactgagaactgctgacaatggagaacatgagacccagaatggcaaataatgtttcagacattgacttctcagactggtctccaccctgtacttaaccccattctcacccttttttggaggggaaaggaattatctagttaaaaactgaatctataggacaacctgtctctcctgaggcagctgacttatgctaattcttgcttagctcagtttcttgagtttagcagaggagatcactgtcacccacaccctctttaaatcagcctcctgtggggccatgtctacacaaccaaggcctcattcattcgtttattccaaaatatatttattgagtgccttctgtgtgccaaggactggggattcagtggtgaataaacagataaaaacacctgtccatagggaactgatattctagtgtgattactgctaggagtgtgtctgagttgaattgaggctcagaagtagatgtgtctgagaggcctcaggagtttggaaatgggggtgtccaacctgtttctttgtcctccaacaggctttattacctgtgcaggtatggtagtaagtctgttttgcatttctttaaggaatacctgaggctgggtaatatataaagaaaagaggtttatttagctcacggttctgcaggctgtacaagaagcatagtgccagcatctgcttctggtgagggcctcaggctgcctctactcacagcagaaggtgaaggggagcctgtgtgtgcagaaatcacatgatgagagaagcagcaagagaaagagggaagatgccagactctttttaacaaccagctcccatgggaactaataaatcaagaactcgctcacccctgagggagaacattaatctcttcatgagagatctgccccatgacccaaatacctcc

SEQ ID NO: 56657 - DNA, 1665 bp, Homo sapiens
atattactgatgaataggagctaagcgtacttggccagggtctccttaccattcacatggaatgctggtccttttgacagttgtttcttcccattgttgaaggcagggaggaggacttagggattcttctctgtattccccactaaaaagcccttctgttccagttgctccaatcagagtaatacactgcacagaaagcatacaagatatacgatgtctgtggacagatgctctgtggcattattaaccctggcagttgctttagccgttgtttagtcaatggaggttgtttgggagctagaattgggagagaacaggtgatcctggcacccagcccacttgtagctctgcttactgactgagagtccctctgcaccccttgaaagtttactgacagttcacacccttaaagcacatttctgtatttctggggctgaagcttatggcagagatgcacattctgttgaatatttattctttgtgtatattcctgtctgcagagaatgtgatcaatgggcaggactacgaagtgatgatgcagattgactgtcaggtgatggacaccaggatcctccatatcaaaagttcgtcagttcctccttacctccgagatcagcagaggaatcaaaccaacaccttctttggctcccctcccgcagccacagaggcaacccacgttgtcagcaccatccctgagtcattacaatagcaccctgcagctatgctggaaaactgagcgtgggaccctgccagactgaagagcaggtgagcaaaatgctgctttctgccttggtggcaggcagagaactgtctcgtactagaattcaaggaggaaagaagaagaaataaaagaagctgctccatttttcatcatctacccatctatttggaaagcactggaattcagatgcaagagaacaatgtttcttcagtggcaaatgtagccctgcatcctccagtgttacctggtgtagatttttttttctgtacctttctaaacctctcttccctctgtgatggttttgtgtttaaacagtcatcttcttttaaataatatccacctctcctttttgccatttcacttattgattcataaagtgaattttatttaaagctatgccacacatgcatgttcaaatggtttccactgattcgatttttcattcatttaatgcaaacccattctggatattgtgcttatttgagaaaacacatttcaaaaccagaaaagccaaaaacactccaaaaacaagcaaaacaatttggagctttagataaaaggaaaaactcccagttggtaaagtttatctttacttaggatttgtggctcacacctaaacaaagggggtcagggagtgggtacaaatttgagaaaatagaagggtaagggaagggccagtggtggggtttggagagaggagatagctccattaatacacatgtttaaaagatggaaagttcacgcctgtaatcccagcactttgggaggccgaggcgggtggatcacgaggtcaggagatcaagaccatcccggctaaaacggtgaaaccccgtctctactaaaaatacaaaaaattagccgggcgtagtgacgggcgcctgtagtcccagctacttgggaggctgaggcaggagaatggcgtgaacccgggaggcggagcttgc

SEQ ID NO: 56658 - DNA, 1139 bp, Homo sapiens
cttcttccttacaagaaagggaacgagaaattgtagcaacctctcaaggattatatgcagctagttagttttctgcctgtgaaattaggtctggctcctaaataattttaaagaaccatcagcacttctaactctctggacaggtgcctctttgtccaagctagttaaatgctttccaaggaaatcagttcaacttttgtgagcggggaaaagcagggctttattgttgtgttacctgggagtctggagtttgaaaagtgctaattaaccttcctctttttccacattacaaacctttttaagcagcgcagcactccccttagatttggctatcctgggtgattttcagacaagaaccattttctctggggaccattcttctgctgggtgccaaggaatataaggcaaatgcccagaagaccttcaggtgactgggcagtcttatcatgggatatttcttctggccctgccccttcccattctgtaatgtgaattagccacaccagaggctgtgaccatggctagtagacagtggcaacatagtcatccccaagatgctaatcttctgctggaactgtcatacgttatcatggtcaatgtaaacctggtttgtgtggggtgattataaatagagtttccctcctctctgtgacagaatcacaggagaaggacccatctcgtggccttcttgttcttagcgcttcacttttacttcatccctcgattcccagctttttctatcatcattttgccaactcctcagatgcaagactttggttatgtcatactcaccaacgttagtccctctcttccaggtgaaaaggtgggtagcggttgggagggagtctccactgaagagcaggaaggtggtagcagggccggcagctctgccacagagctaggggtgcctgtaaggtgccgcctagagcagcctgggagctttgccttcttttgtctctcactagcccttctactctttgtcattgcctgttcttgagtggatctttgaaatgaggggacaggattctcctaagggtagagtttcaggaaatgagtgaaaggcaattgacaaatgcaaagaagtagtcactttttaaattgctggcaaagctataattaatccctaggcacaattgtag

SEQ ID NO: 56659 - DNA, 2109 bp, Homo sapiens
tcttgggaagtgatggtagagactgatgggaatagtctttctgcctggttgcaagtcccaaatttttaagggttaatggaagtaagtggatgtttcctcatgttaactactgaatcagatgttaggagcttgtccctttggggttgacttatgcccagcagtacagggacacagcttcattagagtgttagtgtaaactaactccaaagttaggagttaatgtgaaaggatcatccttgaaacaaatctgctgtttgccatgcttgtagtacagaaacttcacatggagttttgggtgggatttgtgttttcacaagtaaaaaatccctcacgattataaaactcagagcatcatctaatttttttttttaatgactacaagttccagcacaaaactggcatttctttgccatttcttgccagtaagaagttgacacggaggtatttgaaagcaatgttatgtgagtcattcttaagtgttccaagtaagtttagaaacagaaaaggaacttgggattcaaattgatttttcaaatcatttttaaagagacatcatcctgactaaatcttagcctgaaccttcctcccctgtgtgtattccccggtagtcaccgcagcgagatgctggtgagactgccgtggtggcatttagcatcgttaaaactggaaaactctcaagctctttgccactttcctactattttttgattcttgccattttaccaagcttaggttgtgaaacttgacagaaatgtattacaggaaaaacttataattgtatttgactttctaacacattgcaaagtttcaaagtgactttcactttcaacaacatattagaagtaaccacttttgctttcacagcctgaagagttagagcctgatctgatgccccctttcactctgaagtcatgggaaattttccagccatgaaagccctctttccactgcatactgatgggctgactcagcttccttcagccgactgagatcttttcatactattggctatttcataccaattaacctcttaaataagattgtgaattgccaaaattgatagacacttattaccacctgtggactccatattccttaccacaaatgttattttcatcagtcctgagtcattttaacttacagaaattaggattgttgctgctaatatgaataccaattataacttttagaaacaagaataaagcctaaaagagaatgaaatataagaaatgttcgttcccacccctaataacatttggaagtgaatattcccattttcttccacccacagggattgggattgatttttaatttcctaggaaacaatactagactacccaaaaagatgttgccagaatccaaaaggaactatgctcgtaaaagaaatgcagttttctcctacctaaaaaaaagaaagtaaagtgtgttctgttcttatctttttaatgactaagctttaaacagtttattttgggtaagactagaactttcggccatttgttctaatatgtgtgttattagatgcaatagaatttatgaaaagaagaatgacaaaggtatctgattagaaaatttgatcttacgcatgaatccatgtcatggccagccactgtcacatagtgggtgccattctcaacatattggtttgctaactttaagcattagggatttagcacactaaaatacttttaattatattaggtttggtaactaaggagtaaataaatcataatttatcatttgccaaggccaacaaacaacactattgtgctgtttgctctcaatgaagttgaataaaccaggaggcttggcatatcccctttatgttaatcccagctagagattagtaggttgactttcacagcaattgtatattgatccattttaactcatccttgccataatttccaggccagtcaccaggacagaggagatgatggggaaacagagctttagatgaaaactactatgcactactagccttagaggcactggtttcctgttaccactttggcaagtatggatggtctaagtccagtagggcttcatccatggagccattagaactgaggggggagtgttagagatgccatttcaccaggatctttt

SEQ ID NO: 56660 - DNA, 1226 bp, Homo sapiens
tcaggcttgactcactgtttactattgcctactcataatgcagctactcccaagactcaaactttcagaatgctttcgctggctataattacctgccttccctttatacctttgttgccttgaggatgctcttagctcctcagtgacctttttgctgcccttgtcctgctgtctaccctccccagcagcctgggaccatgcccatggccgttccttcctgcctttttgccctaccctgcaaacttgatctttgctacttttcttcttcctttctgtttttggaaaagaccatttatatattttctttggagaatgtctattctgatcctttgctcatttaaaagttggattggctttttactattgagttccctcctttctaatagttttattgagatgtagttcacataccatacaattcactaatttaaaatgtataatttagtgatttttaagatattacagatctgtactaccagcaccacagtcaattttagaacattttcatcacattaaaaagaaacactaggctgggcgcggtggctcactgctgtaatcccagcattttgggaggccaaggcgggtggatcacttgaggtcaggagttcaagactagcctggccatcatggtgaaaccccatctctactaaaaatacaaaattagctgggcatgatggcacacacctgtaatccttaccccctgcgtcttcccagacctgaacagccactaatctacttgctgtctctagatttgcctattcgggacatttcatatttatggaattatacaatatgtggtcttttgtgtctgacttctttgccttagtgttgtgtttcagggttcatctataatttatcagtacttaattcctttatatggctggataatatatcattgtatggatataccacatttggtttgttcattcatcagctgaggcacatttaggttgtttccatttttgcctcttaaaaataatgctataaacattcatgtacaagtttttgtgcaggcatgtttttatttttattttttaaaatttatcttgggtaaaagtaaaatggctgggtcccatggtaaccatgtgtgaccatttgtgggacttccaatgtggctgcatcgttttacctttccaccagcagtgtgttcatatcttcaccaatgcttgttgtctgactttttgattctagccatcctcctgggtgtgaagtgggatttcatcata

SEQ ID NO: 56661 - DNA, 1025 bp, Homo sapiens
gatttatgaggccagaatttctttttatggattgacaatgaggaacctaattgaaaagagttactggatatacttggggatacaaaaccagcacttatctccctgcaggtaggagggtggtggtgaggagggggacagatctccatcagaagggtatttgggaatgtttaatggcagcaggccaagacggtttgaggtgtgcccccaaacaatggtgatgatttcctctttgaggccagattactcagtctgtaggtcaaaggcctcctcatactactaagcatttggctggacactgctagctgtgtgtccagactgtgtgtgtgtgtccagggctgagcagcacctccttccccttcctgtggtaacgtctttatgaattatgaatttatgaatacatacaatctggagaccgatacctcttttggtatcagggattttctctccctctcgccattctccttccccttcatctctcttccactccttgtgtattttgtgtctcagacctggaatcaatcatttctccaggaagacctggtatcttttaatgcaaaattgtatttcaagaccattatcttggcaccagggatgctaatttttattgagttggccattgtctgtaggtcttttttggtgaacagagctgggaaactacacataaggaaagagcaaggatgaatgtgatagatgtaaacatacttgtgtgttcatactgatatttccaatatcttaactacttctgtatttcatctgatcttttgtccacactgagaattctggttttcaaatacatagggaataacagaatccaatattccataattactcacttgctttatcctacactacacaattaggaatctcagaatagtagtacaaacaccagcaccaattatgattactgaaaacagtccaaaaccttttaaaaaatatgtcatctgtatccttcaccatcttttaaaatggttatactgtattattgtgatactctgagtaatggtccctcaaaaagtattcatgtc

SEQ ID NO: 56662 - DNA, 1064 bp, Homo sapiens
cctcctgcattcaccaggccaagcccttattcttctttagtaccataaatgaggggatacgagaaaaatggctcctttaagcggcaagtgtttggctgcttcttttattctcatcttgtacctcctttactcctatcctctattttcttttgcagtttatctaacactttaattactgttttgatcttcagatcctttgtttgagatagtttttattatttccatttacaggtagggaagttaagtcttagtggctaaatgttgtaacatcccttaggtagtgaaaggcagttcccagtagacctaggcctctagaacccctggaatattgcatgctgcctctcagtgctggttctgataaaaatatctcccctatctgagcaggggataagtaggaatgtgttaaaataagaaggggattatgaaagagaattttattcatgcaatcagtatttactgagtactatggcaagccaggcactgtgctagatgttagggacataaacttgaacaagacagtgttggctgcaagggtcatgtgatgtagatatggtgttgcacaagcttggtataccctgtggactttttagaattattttggtaacaggtgtgaatagagtgcttttcatattcaggcagtatttttggtggcgaggacattaggtaggtatgtgttagatattttgtctctctctcaggctacatacagtttagtggaagagatactatggcgctttattttattttatttttttttgccgctatctcactttgttgcccaggctggagtggtgtggcatgatcatggctcactgcagctttgaactcctgggctcaagtgatcttcttgcctcagcctcctgaatagctgggaccacaggcatgcaccaccaccctggctaactttttatttttagtggaatcgaggtctcactatattgcccaggctggtcttgaactcttgggtccaggtgatcctcccactttggcctcccaaagtgttgggattacaggcatgagccactgtgcctggcctgtggacattactgaaaaaaattaagcaa

SEQ ID NO: 56663 - DNA, 1041 bp, Homo sapiens
gtgacttacagatggagtgctatggtctgaatgtttgtgtcctccccgaatttttgtgttgaggccctaatgcccagtgtgatgctatttggaggtggggcctttgggaggcaactaggtcatgatagcgtggtcctcatgagtgggatcagtgcccttataaggtgagacagagagatgatctctcttgctgccctgtgaggatatagcaggaaggtctgtctgcaaaccaggaagaaactaaatcacctggcaccttgatctcagacttctcagtcttcagaactgggaggaataaacttctattgtctaacccaccaagtctatggcattatttttgttatagcaaccccaactaaggcactgggtgtgtgtatactctgtggcattagaatatgaagttgggagacaaggaaagaatgtagtaattgatagagctaattcagaatgttaaattgtcttttctactacctgtgtattaagttctgtagggaccatattagactgccaacacgcctgtatgtggggttccctcatccggtgagtggggttacttgtgtcacagaagatggagtttggtgtctggagacctacgttttagtactagccttgataccaactggctgtaagatactgagcaagtcacttaatctttgtcagcttcagttttttaactgatagaatgaagtaaagctgttctttgcatgattattgtggagattaaataacgtgaataaactgtaaagcacccttcaaagactacttatcatgtggaatttactggatagtcttcaaatccaatgtagacagtttctctgagcttgcttttgctctcctccagtctcctgtcttctaattcatcctgtttaatccttgttggtgagtataagttaatattcttaattttgttactgttaggttatttttattcttttcaattttctaccactagcatttaaggagacttgcagtaaatgcttttcaaatttcaatattcaacaaatattaatcaagcatctcctaagtataggctctgcagtg

SEQ ID NO: 56664 - DNA, 1048 bp, Homo sapiens
tcttttcttttgtgatctcttttgacttggcgcctaatggaaacttctgcatcagtgaggtccagtgtgatagtaaatgatggaatattgcaatatcacgtgttggctgggatttctgggtccattgcttcatatcccatctgagttcattctgtagcagccatttacctaaaatattttccaggtgtgtgcttattatattagtacgcttaatttgtctatattcttgggtttaatctttgaaattttgaattaaactgtattaacaaagacaagtcattattttattagatgcactgtgttggtaatgctttcctaagttgcctcagaagatcttctaatcttaacaaatgttttgtcatattttatcctttatctgtcttatctattgattcttgcctaggaccaattattgtagatatcatacccgtcttggttaccattgtgcctaaacccagataccatttatagttttatctaaaagtctatgaatgaaatcatactctcttgctgtcttattattctaaaagtgtgatattttatgtgaactagattttataacaagctttcctttttataatctggcagcagtataaattgttgatgtttattcttctatcccttttacatgatagatgaatctgttcaattttggcttttgagtgactcatatgtggttagcattctgctgtggcattgggtggtctttagcattttattggactattttatgaaacatctccaaagaaatatgttggaactggtatttattaccttaatcttattgtctgccttgagaagctgctaactaaatgttttctccagcttttccttaattgcagtgtggttaattcctctcaactgcaggaagccaaggtatttatagattgttgttattattttttgtggcctgtagaagtaatcggcattcaacgaatgccaagaacatgcttggcatgaagtagtacatagaattagatccagttcctgccccatgaacttgatgtgagataagctaactggggaggagagaaggaagagaagactt

SEQ ID NO: 56665 - DNA, 1059 bp, Homo sapiens
ttgagtccatacacagtgtgaagcctttatacatatatatatacatatacatatacacatacatatatatatacacatacatatacacatatatacatatatatgtatatgtatgtgtatatatatatgtatgtgtatatgtatgtatgtgtgtatatatgtatgtgtatatatatatagagagagagcttatatatatagagagctcatatatatatatatagagcctatatacatacatatatacatatatatatatatatagagagagagagagaggtatcgaatataagatttacttggatttttaagagcaaatgtgagatttgaacaaaattttattggttggatgccgtaggctccgggagtgtaagcgcattttcttctgccattttgtctactttcggaaagttcactatacattctcgctggtatacatggttcagtctgtgaacttgttgctttctgactctgtggtacatgaagctgagactgagcaagaatcaaattctcttctgatacctgtgaaggaatttgtccatgtgctctgcactggaacagaataaattaccttgtacttgtgcatttcaaaggtaggtttgggattggtgaaatggattttaagtgtttttttaaagagataattggcattagagatggcatgattggtcatccctggatgcagcctggtttgttctttagaataattgttctgtagaataatctactcacctaaatggaaaaacatgtaggtgatgctgtagcttcattttgctttgttaattttactttcagccagtccttcctctggtcaacagaaacttgagttcaatgacagcaacgttgggaagaaaatttgcatgcttggggctgtttctctgagcagttcatcagcctaataaaatcttttcattgccttgatcttcgcagtatttcagcatttttttattgttaaattaaatttattgagactgctattaaatacaacagtactgtttttcatggacacagtaagaagtagcttcaaagcactttcacttgagttgtttcattcaacat

SEQ ID NO: 56666 - DNA, 1571 bp, Homo sapiens
aaatggggctaaaatcaaggagttggcagggctgcgttccttctggaggttctagaggagaatctgttccttggcttttccagcttccagaggctccctagattccttggctcatggcccctttccatccttagtgctggcaatttcgtccctgaattatggcccctgctttctgtcttcacatctctttctctgactctgactctcctgcacctccatcgcctttggttataaggtccctcgttattagattggtccctcctcattcttccttccccagtaatccaggataatctccccttctcaaggtccttaatttggtcacacctgcaaagtgccctttgtcatgtgaggtaacacattcataggttttggggattaggtcatggacctctttggggggctttgagtctgtctaccataatgggattagagtgttaggctcatagcagggattggagagattccaccccctactgaggtactccaatattgggatcaggaagaactaaattcaaatcctgtttcttctgtttactagctaaatgactgaacacatttcttaatctatcagttgttctttaatcatcaggaaaattgggataatgtcctcttggcacatgtattttacagttatacatgaatgcatgcagcatactgagtgaagtgcctagcatgtggattatgaaccataaataatagttctttgcctccttttttttttccctgagatgggctcttgctctgtcacccatgttggagtgtggcggcatgatcatggatcagtacagcctcaacctcccaggttcaggtggccctcctagtagctgggactacaggcatgtgccaccacacctggctaattttttaaattatttgtagagatggggtctccctatgttgcccaggctagttattcctttctaattactgtgcactggagcagggcattggggtcagaaaaccatatatgttggctgccaagcacgcataagcacctgctaaatgttagctattattattaaatacatgaattcagttgcctctagggcaattattatttttaaccagtcagtacatcagtgtttctcagaatggattctgtggctctcttggaatttaggaatgtatgttcaagtgtctgagagttctccataagaattttaagattttgtttttcatttgatcctaatgacaacaagataaaataagcctgttctggactgttggaagggccgttgtctgcctgagcactgtcatttgagtttatcattcacagctgtgtttgtctacttgtttctacgtgtgttgccatcaaatagttcttctgtaagggttatgccctgaagaaaaataacagaaaattttatatataatgaattctaataagatgaaggacacatgactgcactttgcacagtcatgagttatgaatcaagatttttgcggtcgttggaatagagagacgaaagtagcagaaaaatggagttagtgcatggtgcacggtactgaaggcggggctgatatgtagccatagttcctgaggcagcctctggagttgctgatggcta

SEQ ID NO: 56667 - DNA, 1101 bp, Homo sapiens
ccatgtggtgattccaggcttgagtctgaactcagagcaaggcacatggcattctgcctggcacctgaggccacagcagcatattataggtccgctgtgccttgtgccctgagtatgtcctgttgaggccacttctattcctcctcttccttctacctgggaagcactcccttcccattgcggctgaagcctgtctcttcaaacctcagcccaacttctgcttatcttccagagcctatttgagctttcatcccttctagaagctttccctgatgttggcagagtagttttctcttcttttgtgttaccattacactctagagagacctttgtttctgcatgcatcacagtgtatttgtctttttgaaggcagggactctgacactcatcttgacagcaaaggggtgaattactcaactgtcaattcttttgtaaaatggacaatgtcaaccctgttagaagtaaatgcaataatgggtgtcacgtccttagcaccgtgcctggcccatagtatatacccagtggacacctgtacctcctctccacatccctgttgcatggtgactgggcccagaaggcagctagaattggcaactcaagcccttttggtcaggatcctttgctgggtggaagctcctcgcctactaatgcgggtgccctgtggctgaatctggtgaatccatcaggtccaggttgaaaactactgagcagagccctgctgcctctgggtattctgttcaccacccagcccttttgcatttaatgaatgtaaaaaataatggggcagctgctgttccttactctctcttcctgctgcactaagtctctgcctccctggagaggcatttaaccgcacgaaggtttatggtggaaatgacaaattgcttcttcacaacgagctcaccctgctttctaaccagttggaatcacccttgttcatgtaatattagcaatttacctgtctccttaaccactaaccatcctgagaggatttggcattctttgcagctgttaatcctctcatcacctgagggcttattaaataggtggagtgtacatctagcctttctcctacagtgaacagtcattcatgatcttttc

SEQ ID NO: 56668 - DNA, 1041 bp, Homo sapiens
aacctgccctgagttacacagctaggaagccggctagctggctttcaaatgcaggctgtggggttttataatctgtgttcttatttgtcatgctgtgctagataaacaacaattctacagccattgccagtctgttctctggtactgctaaagacagaggaaggaaaaagctagttcttgcctgcagatgcatccagtctgttgggaagacggacctggaaaccagcatttggggtaaatgctgcagcgattatgcaaaaacaattcagtgagaatgtaaagaaacattatgtgaagcttcttgagaaagtccaagcaggcttcacagaggctgtgatccttgaactcagatccagaagggtggatgagtggggagggaaatcctggacctagaggtgagagagcacagggagggctggagagagatggacttgacagtggatttctcaggcaataagatcatgaaggcgctgacttgcctgctaaaaagctttgacctcatcctgctggtagtagtgacctattggtagatttttagcagagaataaatatggtgaggtttgcagattactaagctctctctagaggtgatgcagaggatggattgggaggagaaaaggccggacaccatttattagtgctggctgctggcaagaatgtaggggcctaaactggagccatgacagtgggaatggagagcctggatctgagaggtgaggaccagcattatgcaggtgttcattatctggatttctgaatgatatgttacctaggaaagcaacagtgatcataacatccaaatattcaccaatgaagccatcacttacagaaacaatccctgtggcaaatgcacccggtgacctccaatgtgccaggcccttgtgtagcctcctccatgatgtgttattttatttttatttatttattttatttatttattttttgagacagagtgtcgctctgtcgcccaggctggagtgcagtggcgctatctctgctgactgcaagctccgcctcccgggttcacgccgttcttctgcc

SEQ ID NO: 56669 - DNA, 1051 bp, Homo sapiens
cttctgctggttcaggcagtagcatttcattttccagctgtaactaaatgagaaattacgaggagtggttcgaatagagtttgtcggtggctctccttttcttcgcccattccattgtgaagatgagccagtaaggctctgcatggatattttctggcaagggcatcaaacacgtttctgagggcagagtccatgttgttgagtaataattaactgctaatggcattgtcttgggtgttgcatagtaaataatcaagaaatagtctcttttcaatgagagtttgaaggccaatgcaaagaccacacacgggcaagcctgaaaggtgctgttttgactaaccttaatgggaaacaaagggaaaatctggcttgttttgtgtggccatgcttaattgcatgatggtgtgtttttcccttgaatttcctcatgccccgtggagggcacacgcatgatggtgctctgccgagccaggattatagaacagaggttcttggcagccgggatgtactggctgctatgttgtctagcgtgctggatcttactgggagctttcagatcggagtctctgtgaaatggaacaagtgaactgagcctagtctgttcctaaaaataagtctctaagaagcaagtgaagtgcttttcagtgggaagcctgtggagaaagagcctggaacacagtctggaagtaaggcaattcagggttcctttacccaacccttttcaggctcaggagagaggaagtgacttgtctcgggtcacttaggggctaggcctcgcacctgatctgttgtatttctctgcctgggctcttttccaccaccaggggccaactgtccagaatgtcattttcctgagtgaggaagcagagatgcctggctctagggtgtgcggcagggctacaggactgagagtgtccaactctcttggccctgccgcactatcctcaggttaactggtgttccccgctggcctgctgttcagggctctgtgggagagagctttgcagcacatgcaaaggaggtatgaggagggcagatggctccaccagcc

SEQ ID NO: 56670 - DNA, 1061 bp, Homo sapiens
tggatgttgtgcctatacacacacaggatctagaagaacatgtcaaactataaactgcttgtgattgtgaatgactgtgttctttgcttcttgtgtttctcagtttcttataatgcacatattaacttttttaaaaataaagtttattttaaaagcctgaaaaaaatagtaattcctgatttaattttattgtctttttctaattatttcatattcatgaaatacataccctgcgctaggcactggggagtatctgtagatgggagatgaaggtatgtagactgtggtcaggcttggcttctgccagctggctatgatgcgggaggaccagcagtgagcatgcttcttgggtttctcacggtgagtctggggatgctattggagcccctcagctcagccctttcacctggcaggggcctcccagcctgcctattccaatcttacctgccctccaagaccaagctcaggacccatctgttttctaattaatgctggcctacagttgccacacttttctcagaatcttgaagcacttacacacccaatttaactctggatcacatcccaccttgtctttttataattgtttcatgtagccttgagagaagagacatgtcttattcatctttaattcttaagtgcctacaaagttcctgacacatacatatcctcaataaatattgaattggatgaattctagttcattttagccaccatgtatctactagtggatcacctactttagggtttcttaactttattaccaccaccattttggaccagataattgtttgttgtaaggggctgtcctgtgtactgtgggatgtttagcagtgtccctggcctctatccattatatggatatatgaaatgccagttgtgacattcagaaatgaccccagacattgccaaatgttccctgaaaggcaagatcatcccaggctgagaaccattgattaattgtgttttagacactgcctgtaccctgccttctgagttaggctataaatactttaggggaaattttgttttctcaacaatgcctttataccgaccgtaaa

SEQ ID NO: 56671 - DNA, 1040 bp, Homo sapiens
cattttgattcagctagaatctgggtgggtgtctgctgtgtgctatgcgtgggtctcggttgctgccacagagagcaaacattttagtgggagagggaggtagatgaacagtgtctggggaacacaggtgtccagagtgcgtattggacccatgcctccacatggcccagccaaactcatggaagtgctgttgctaaaaatgaattttctcatttataaattttctcttttataaaatacccaaattgcaatctggacttggagtctcccatgtgggatctgcagcattcctagggctgctgtttgtttgatccctgggttttgtcagatggatgctttatcaggtcttctatgttgccctggctgttgctttccattccggctttaaattctcatactttgctcccctcatcaagcaaacctttactttctccatggcctcatcccaagggctccctgacatttcacgcaccagcttttgtttttgtttttgcatacgctcttggaatctttgggccaaatgggaaaaagaagttcatatgatctaccatataaatatgttcattagatgatgagtcttactatccagaatttgttgactaatgattggagctgtattctgaaaaaaagaaatcctttacacattatttttattatttttttgagacagagtctcactctgtcacgaggctggagtgccgtggtgtgatcttggctcactgcaacctccacctctcgggttcaagtgattctcctgcctcagcctcctgagtagctgggactgcaggcatggaccaccatgcccattaatttttgtatttttagtagagacggggtttcaccatgttggccaggatggccttgatctcttggcctcccgatccacccaccttggcctcccaaagtgctgggattaaaggcgtgagccaccgcgcccagcccacacactatttttaaacacatttttgaagtggtggttaagctgactgcatggtgctaacctactcaggaattcgcattgaaggcttgctgattttctt

SEQ ID NO: 56672 - DNA, 1029 bp, Homo sapiens
atgggcagagtgctgaggaagcacattttgctcatggacaagggggcatggtatctggaccttgagaaatgggtatcattccagtacatgaagatgaggaaaagctataggcagtgagaagcagagctagtatcctagcaatgagttgggaacaagagggctttaaaggagcgagggtaggaagtcacattgggcttatatcatagagtgcattgaggaccaccatgctaaggagtgttcctattccatagatagtgggaaaatgaggagttttagatcagggaatggcagagctgtgctcttggatgtctcttttatagaaatttttctcttggatgtctcttttatagaaatttttgtcttgtgaagttggcaagatcattgtggcagctcttcttcccaagttgcccagggtctctaacttctgaattcctcccacgtggagccaatgtgtctcttcctctctatgtgtcctgtgccactttgtgtccccatccttcccaactcactccctccttaaaattcttgctgtcctgttctccatgatgtttctaatctaaggtttctatcacaggaggaatgggtgctgccataactcctgagtccattccagaaaccacagatgggttttcacagtgctctgttgcaggaccacagctccacacccaccctcactcccactcccatgtgcagtgccctttgtgtttaatcaaattgagtggggaattgtagccacatagaagaggctgttgcttctggagttctgcaaactataccctgcaatcggctgttgaggcagaaccctactctgattccaacccctcgctggttgttttatgccctgttctgacagttccctgggctgagtttgctcatcacattctcaacctgttcatttagatttgggctacctccttttattgttttaaacctgagcgttccttcagtaaatcctgaatatgtgaagaagaaatgtagtacagagagagagaaatttttcctattaaacattttaaaactttttttttt

SEQ ID NO: 56673 - DNA, 1032 bp, Homo sapiens
gtggcctccttaatgatttccttgcttcctccctgagttacattctcaactcagcaggcagagctatcttttagtattgtcagatcaagtccttaaaattggttgaaaaccccgtaatagatgctaaagaggataaagagctgaacctatatagcgcttgcctgcaaagaatttacagtgtggttgagaagatgagaaagaaccatgttccaagttaagagtgttgtgtaatattaggaaatgtattttatatataacattattataaaatcaatcccctgagtgctaattgccatagcagtatagaaactctttcaagctgtggtagtcagaggaggtttttataaagtgatatttgaagtaaaacttatggggatgttttggatagattaagggactgagcgagggatttgaaagtagtaattacataagtgcagacatgagaaaatccagtttctcttcaggatagacagtgaataagccactgtgcaattgaaatattgtagcgtagtattttatataggtcagtgattttcgaattcttctttttaaagcgatgaaccttttgtcaaaatatcacatggaactccaacttattaaacctgaggactgtagcttctgtgggtgaagcaggatgggcagaggttggttggcatatctgcctgcatgacctctcagccctagagtggcctttgaggctcgtccactgaacccagggctctgaagaatacagcttagaaactgtatgtatgtaactgtatgtacgtttcaagagcagcttggtgggagaagggaagctggctgctttgcgtcagttggtagaacatgttgaatatcagttttgatcttctggtttaggcaatggggtattatagaaagtttgtgatcagtacctgttatataatgtttcaggaaggcttaaatggtcgtggggggtgtgcgtgcagtttttgttcttcttccctcccccaacaccccagtatgatccttagaattctacccaggagtccagtgatggcacccccaaccccc

SEQ ID NO: 56674 - DNA, 1038 bp, Homo sapiens
tgaaaagtatacaatatggaaagcagagcttaaaaacaagtatgagtgcaaaggaacaacaattactgagagaactgaaaccctgaatgcattaggcttatggaaaaggctgaagatgagagaaaaaggggtgtgaaggaagagagagttggcacatggcaaggggaaaatctcaatcccatttttctaactgtcttggtttttttcttctcaagtagagaactgatcttcaaattagaaacactagaacatatgtaattttaaaaaaccgaagttcaaaaccaagaggaaaaaggaaggtattcctcactaccatgtgtccaggcctgaatcactggcttctgggttcctgaaaaatatgattgcaaaatagtgattggtcatcttttgcaaaatcatgagggatggagaagaaacaaaaagattgcaaaaataaaatattgcagtttttagaaagggggcaaacctgcatcaggaattaccaactagtgaatttgtcattgctcctgggcagaattctagaagagatcattaagcagatggtctgtgagaacttggaaaaggaaatcatgaacactgagagctagtcctaaaaaaccagttacccaagtatgttcaggaaatctgccttacagctgttgcgcaaattagctttgagcatttgagtagactacagtgtgaaccagcaatgagatgttataacagaagaaaaaaaacatgatcagagatgctttgctaaaaattcagttctagggcatagaaaatatttatccaaatatactctgtgctgttcagatccctcacaaatgagttcagttctgtgagctgcattttaagatagtcactggcaagttggaatatgtacggaaaaagttaagagaagatggaactcatatttattgagcaagcaacttaacatgtgttgggcattgtgtaaaatgtggtatgtgtgttttaatgcttaaaacaataccatgaagaagtcattaatatgcctattttagatgaggaaatgaaggattatgtaactgagttttt

SEQ ID NO: 56675 - DNA, 1035 bp, Homo sapiens
agttagcccagtccatgagagggcagggtaatgaggaggagtaaaggacctatcttctctgtccacataaggaagttgggaccacaaggtcttttatctccttgttactccccaaccccaccataacctcctactcagcacacagctgtatcctggtagattataaggtgagcttccagaacctggcaggaggctggtgtatccccctgcacagagggaagtgtatctgaatgttgtgtatgtggctgatatggaagacatacatgtatgcaatccatcagcgtttaaagaagaagattggctccagttcggaggaggaggaggaagattacagatctattctgagtattttttagagagttaatatttatatttttagtaattttctggtagaaggaaattgcacaataaaatgatttggtttggtttgctggctttgtctgtttttcctcctgactgatggggagcagttggtttcctcaaggctgacttgttggctgaagtatgttggcattttcctttgtaagcctggaaaagtgagaaatgagggaggtagaatgtgaggaagatgggcattaccgacacctccagcctgaacccttggcggggaaatgacttctgaggatgtgccatcattggctcccctggctggctggctgtgagggggtacctctgccaacccgacctatcactgtttcaggatgtgccatcatgatgtgcacaggcacgaccctccttgggaggaagtggggataagcggacatggcctttggatcatcctctaggacactcattctttacctgggtccaaagccctcttccaccaagaaagggatgaagcttcacattcatgtatgcacgttcttccatagaggaaccagagcttctatcagcctctcaaagagagtcatcaatatatgtcagtgatttggacttaggtacttcctgggagattgcccccaagggccccccatggacagggacattcttattgctcacctgcggagagaaggtggctcagagaagagctggcct

SEQ ID NO: 56676 - DNA, 1752 bp, Homo sapiens
tggtttttgcgcattgtgacattccttttaaaagagttacttaatatttgggtttttacttttaaaaatttctttttttttaaaggacctcatgatgcaacagtaagttttatttatttatatttaggttttttacttttaatcatttttgcttggcactccaagttcgtgttcatcaccaatgagtacttggtgaaacacaaattgaataattgtaccatatttagtatctgtgaatggtaatcagctgttgtaggctgtctcatcttatttttattaaaataacccaattgccaaaagatcttattcatgggaaaaataaattacagtggaagcttgctcatcaaagttatccttatctagactatctcaaatttgtactgcagttacctactttagtagtgacttactctgagtctgatttttaaagtattataatttctttttctagtgactttgtatggagtgtttacaatccacttttctccaaatgtgccatcacgctgtctgttgcttgaactcctggatgtcagtgtttcggaattgctcttatattccagtcaccagggttgttccatgtggatgatacagcattgtgcccgagatgttttggaggcccttgcttttcttcatcatgagggctatgtccatgcggacctcaaaccacgtaacatattgtggagtgcagagaatgaatgttttaaactcattgactttggacttagcttcaaagaaggcaatcaggtaagaaataaccttttcttttctctcgcagtttaaaatgtagtggttgaagccaaatatttttaaatgacaagggtagtttagtaggggcttacaagtcattttaacctaaattactgaaatgccaggggatgcagtaaatcaaaagaatttcagtgccaccgtgtaaaaaaaggacataatgtttgggtcaggtaggaggagccagtgaagcatgagagctctggaattattaaaagtacttaacctacatagaatggttttttaaattttatgcgtgtttggctaattgctgagttactattcctggtctcttcagtgttggggctgtatctcgtggcagaatgcatatgatagttctgccaaatcctcttttctccatggtttatcatttctttgcagtgtccttattatcagcagtgcctaataggtaagagacaatccaaagaagacttctttatgagcgctatatggaaatgtacagcttgcctctgagaactgcccagttaatgaaccaaagaattatggtaatcaaggactaaaaatttttagcatttagcttggcagtgggtttactgcactcttagggaagtaaattcactgtagagatggatagaaagggagcagcttttttattggttgtaatatttactcatcttttttaggatgtaaagtatattcagacagacgggtatcgggctccagaagcagaattgcaaaattgcttggcccaggctggcctgcagagtgatacagaatgtacctcagctgttgatctgtggagcctaggaatcattttactggaaatgttctcaggaatgaaactgaaacatacagtcagatctcaggaatggaaggtaaacttcaccagtgctttgctttggggtccttactttcaacttaagagtattcaatttatgatgatttttttttttcttttgagatggagtttcactctttcacccaggctggagtgcagtggcgcaatctcagctcactgcaacctcc

SEQ ID NO: 56677 - DNA, 1544 bp, Homo sapiens
ctcttactaagttatttatttaggttcactaagccatagtttgctttctttaaaatgaggataataatggcatctatctcataagactactgaggttaataaagaaatgatacttttagcaaacagctcatggtaagtatttaataaattttactgataatgatagtatctgttcttttaactcatgtacacagttctaaattgtgagttagcatagtattcaaggagaaaatatattctgtaaagatttagagaatgagtaatatgacaaataagatgttttaatactgcatcatattcgctttgatagtttatttctgcctgaaaaccaattgaagactcgttacggagataccctgagtcacctattatacattcatttttgcattaaactacattcttatgtggttacttcggtatttattttttattctttcatctagtagatgttcatagagtgctaggcgctgaaaatgaagaaaaaaatgttcttctccagaagtgtgtaattatgtatattatttcctctgttaagattgtaggctcttgctgggcacgatggctcacagttatagtcccagcactttgggaggccacggtgggcagatcacttgagcccaagagtttgagaccagcctgggtaacatagtgaaaccccatagctataaaaaatacaaaaaattagctggatgtgatggcacacacctatatttccagctacgcaggaggctgaggcaggaggatcacttaaacctgggaggcagaggttgcagtgagctgagattgcgtcactgcactacagcctgggtggcagagcaagaccctgtctccaaaaaaaaaaaaaaaaaaaagattgtaggctctcagaagatagtgttttctgttgcattttactctcaaatagtgctatatgcctagtattcaataaatacagactgaataaccaaaggaaaacttttctccgttttttaaggcaaacagttctgctattattgatcacatatttgccagtaaagcagtggtgaatgccgcaattccagcctatcacctaagagaccttatcaaaaggtatgttacacgtaccataaacttgctttgcattcatgtactatgtgaaatggtacgtcttttttttctctgaacagatttatattattatttctatgtaaggaacataagtaatgaaatagttttaccaaatttgttttcaaaggaatgctcttttgctcatagtatcagatgttaagcttttcctggcagctgccttttcactggaagatagattcactgtacctttggccactcatagccctggcagttctggatacttgatggaaagcaggtttttaaagagagtcttttttaactaaagattgagtttgcttttggactactcccctccccccaaaaaaagacccaaaaaccatttcgaataagatagttttttattatactttaaataattactcttgacaacggtctggggacagatacagtttttctgatatctgaatagatccgaaaacaatagatattttgaaaat

SEQ ID NO: 56678 - DNA, 1108 bp, Homo sapiens
gtgctggatgatgattatcttgagaatgaagaggaatatgaaggttagtgttttctaaattatattttaatgtgtctttcttaaataagtctagaataaacatatccgtaacattttcatatttctcaatttatctaatgagaatattgaacaatatgatctctaatatactctcacttttatctttttgaggcggagtttcactcttgttgcccaggctggagtgcagtggcacgatctcagctcactgcaacctctgcctcctgggttcaagcctcagccccccaagtagctgagattacaggcatgtgccaccagacctggctaattttgtatttttagtagggacggggtttcaccatattggtcagctggtctcgaactcctgtcctcaggtgatccaccaacctcagcctctcaaagtgctgagattacaggtgtgagccactgtgcccagccctctcactttttaattcataatgtccttttgactcttttacgtttcatctttacccagttaatgaagaagattaattttcccaacaacttctatctctctggtctgtctcttctagcctttccctatgcttgcatttctccattttagctctcttttttgcttttaacattcattcatttaagacatattaactgagtatttactatgtgctgttgtgggattacttcccgtctttagtatagtaggggatacggctacataaacaattatagttgtgataatctgaagatagggtactatacaatggcagaaaggacaagtacttaacccaatcttagtaactggtgaatgcttctctacagacgttatatctgagctcagtaatttggagttgcttgactaaaagttgaggggttaggaagtaagtagcacaaacacatagatatgaaagtgtcagaaaacagcaaattggtatgactgtatcttaagatatttgttggggagcaatcagttaaagctaacgaggtagccagagtacagacgagtttgctatgtttaagaatttggattttatccgagagatagtaacaccaaaatacagatatgtgaagaactttgcgtcaggtatagaataatatctagtttatg

SEQ ID NO: 56679 - DNA, 1050 bp, Homo sapiens
tattgccaaactagtgataatagttttacatttagtatcacgtactgaatactaatatgtataattgtatccttgctgtttagtcatttaactgatatttattgagcatttattatgttctaggtacccattgtaaaagtggtcaaatcagatttttaaaagtgtggtgataagtgctagggagaaaaacagattaaggaagaaacttaaggagtgctggggtaggtagggtgggttgcacttttaaatgggttagtagggaaggacatctgagaaggtcatatgaatcaagatttgagggaagcgaggaagagaatgttaggcaaaaggaacagcaagatccaaggccctgagtattcctggcagatttgaggaggccaatgtggctgtagcagagtgagaaagaagaatagtaggagattagatcagagagattagggagtggtagggggcttattaagtagagtgagctgggtagagtattgagattacattggcttttattctgaactagggcgaggtattggaagatttcgaatgaaggactgacatgatctgactcaatattagccccagtggtcaaaatgaagtggaagatacagaatagagagacaggagaagtcttttccagagagaagtatccaggtttaagatgatatgaaaaaagtatcagtgagaggaaagttgctattttgagaagttttcactgacatttaaaggagagtgaaagcagcttttgataaactcttggaatcacagatttaatctatctaggcttttgaaaatgtccattacctagttgtcgaagccattcttcatttgaatttttaattcaagcaaacatgattttataaggaatgttacaaaaaacactgaaaaataatgaatgcatctgataatgcaattataaaaataatcagaattaaaatgatacagccctattaatttcataatttataaaaataagatgcctttcttagtgtgggatggtgtagtatagaaaagtatagcctatctgaagcaaggagtatgatagaaaacatgatattc

SEQ ID NO: 56680 - DNA, 1671 bp, Homo sapiens
atacatttggcactgagtaggacaagacctctcagctatacattgaggggttttagagcatccatgtgggcaacccttttttgtgcgggagagcaggtgttgctcttcagtatgtagcctaaaaaaatcttaattatttcatggatcatgaagcaaggatgaataatatcatgtcttggtaaatactaacaaatttgttaggtttggtgacatcatttacagattatttctttatgttgtccagtggttcttccttattgttgatatccataagctggcactggatgctctcagtaatgttaagtaattgtcaagcagcagttacctactgtgttcttaacactgagttgtgaattttttcttaaagcagtactgtagtactgaatattcctttaaaggaactgcagtgagcctatctaagtttttttaaattaaggcttttaaaatagaaagctgatgcttgatcttgcacaatttttatgtctagtatgtatgcttgagtgaatgtgcgagtatgaatgattagagaaaatttgagtcagtgtactttatagtgtgaatcctgtgagctaatacagtctatacttatttcttccctacctgtttcacatccgtaagatttaagatatacattttttgagaggtagtctgtctgatacaatgtaaatgacaaaacataattcctgagaggcccagaacaaactggagtctagcctggagttaaattgagacttctaaaatgattggaacaaagactaagttgtgccagatgtaaatcaacccctcttttagtttactttagactttgtattagctcatcttttttgtagtaaatctatagttttaaggtttctcaagatgtggctctacctactatgatgaaaattgaagtgggtcaaaagaattagatgtacagtgaagggaaaagaaaaaaaatgggcgaagagagggtggaaaataaaaggattcttttttcttcctttctgtttctcgtatccctgctccctttttcctccccttccctcattctttgcctctatccttagctgaagacaaactagaggagcagcatcccaggtagtttggcttttgactgcaaggtagttaagaaaggtgtagatataatgaggtagaagtagaaaggaagaaaaactcaaagaattcttaaaaggattcatagcaacataatgtgtccctgagtagaggatgctgctatgcgtgagttcatggacacaagttgattacatggtttttagaattataattatggattcttcttatttcatggtaggttgtctttaaagatataaaaattaggatgcctttatgaagcactgattataccaaaaaaaaaagacaagttatatacaggttattaatttttttatttatttattttttcctaaggaaaaagtcttctatctttccctgctggaagcctcctcatatttccttatgtttgccatgcaggttgctgagagtccagttagaatttgcattttacagaatgaaatactttaccccattcaaacaattattgtttgacattttagttatttataattgtcaaattcaggactctcctttaatgtttattatgaaaccaaatttggcataaggaggctgatttatgaattaccaaagggtcttgtggcatgttccccaatacat

SEQ ID NO: 56681 - DNA, 1537 bp, Homo sapiens
aagtttcatgattaggatgaaatatatacatagggattttggtttattgaagttattgaaagacctagaaattttctttttgagagaaagggtaaagaggtgagggttcatgtcacttaacccctacccttttgggcaaattttgtctcaggtagtgtttcattccctaaattaatacctgtgcttccttgcctctcaccttcccagttacttctttggggtattactgtggcacattgtacacccagaaaaggcacatacagtgattattttgtgggaaatacttgattcttttgaaatatatttggagggggtagctagctagccactgtcaaaactaatgctgtatttacaggacaaaaacaagtagagttggacacctcagtaagagacagcattaactaaaagtactgactgccttttaaaggaatttttaaaactattctcttgcaataagagatccgcatttattaccactggatgtcttccttttttgtggccaccaatatagcagctctctttagagggattccctttctgctatgccttgagccaaactggctgcttttagaacaaaaaccataagtatggttttactcgaacttctctttgtttttattgagagaaatattgccttctttttggtactccagctgctaaagagtgctgagatatgttaaattattttttaaaagaaaatctccaaatacttatttaacttgtcttctagattcatgttgcttatattttaactattgagcaagtttattataaggaatgctgccatatagagaaagctgaagagaaaccatgggcagaaggcttttttctgtcttattacactggaccttcactctggtaagggcatcagttacttttctggaataaaaggcggagttagagcacttatcagatgctgtttcatggcttgttttagttaatttatcatgcagataactaacatttgggtatctttttgttttaggtcttattttctgactgttaggcctatcttacacataagttctactatcagtatacttggcagcatgacttttttttttttttacagttaatttaatgaaaatcagcaccattgtaaatgatagtaattgtaacaacatagttactgggtgaaggagtaggggagacactcagtaaccatctatttacctagacacttatgcaggggtacatgctaggtggctttattcagattcgggtacattggaatcacatcatgactttgagtctgatggctgtgtagataaagatttaagcaagtgccttgtgtttgctggaaaatattaaaactcatttgggtgaaagcttcccagatgatgataattaatagcacttctgcctttttcctggagtaacttttagattgagtcacatatgatagtataaaagtccaaaattttctgggtttacctttgttttatttttcatatatatattcactgtctgcctggaaatagccttggtttaccttatttttttgtatatgtaaaactattcatatttgattttattc

SEQ ID NO: 56682 - DNA, 1029 bp, Homo sapiens
atgtatgttttgttacctaggttcatagtattttaatttaaaggcaaagagaagcattctacttatttgtcttataaaccattaatcgttttttgtgcagaagagagcttattttgttatactgctttgtataatggaaataagtcacattctgggggaaaaaaactggaattgtttgtattttgtttttttggggggggatctttatgtgaaaaatcagagctacttgttaccataagcccttactatcaacaagataattatttgtaatcacttttttatcccaggttggaattgctttccccttctaagttatcttcccttaataatatttatgataccaggacagtgagggtataagagcaaatgtagtgaggtattcaaaaatcctgcatatatggactcaaaagttctttagttatttgaattatatatagctatattattttattagcttgggttgtcagaagattgccaattttaagagtaaagaggagagagataagtaataaaaatagaggaggggaagaaaatggctcccttactggtcttagtaatcttctatatagttaatgagctaaaaaatgatacttaaagttccaggtttggtaccgctagcatagaaacattgcctttcctacacattcctcatcattgtttcctcagaaaattattttaagagtttgtgaaaccagattaaatatctatattcagtttggcctaatttttaaaaataaatatttatactccagcttttgtgtatttggtgtacatcaccacttatgcaaatcaaggatcagaaaactggaggttagccatctccattatttccttttgcacattgggtacagtgggtggcattagtatgcactagctgcaaagtcacagcaccttatggaaataagtatgtttattataataaaaaaaagttaagctgcatctctgtagattatttactttgcagactgtaaagctgccctatcttttccagcagaatttactcttccattcttaattcttttttgaaat

SEQ ID NO: 56683 - DNA, 1037 bp, Homo sapiens
cagacacacaccccagcccgtgcgccccgcagtcgcaccccatcctccgccaccccgcgagagggtgtgtgggctgggcagccgggtggatggcggggccagggatggaatgagcgcgccccagatggactgggggcgttgtgggaggaggtctgggccagtgtctgagtccgagggggtcgtgtaggcgtgtggggttgggagtggggcctctcccgggtgggcagtagagacctcgaggctctcaggctagggccttgtggacagttataccaagtgtgggggcctgtagtgggacaggagatcgttggcactgtcaggtggaagcgagttggtgtgtcttgaatatatgaggaaaagatttgagaggtctgacaaagacaggggatacatttggaggacaggacagtgggacaaaacctgtttgcttgccacttttttctttcttttttttggtttggtttgccatgatactggtagtgagagagaattgaaatttctgggtttcccctctcttggccaagcagaaggatggtattggagggctgagcacacgtatgctgaacatatggctgcttgaactttggcctgtcgctgtgctacacttacttctacatggtttatgaaatctgaaatcaggtaataggattatgatcatatgtgtgtgtcatttggtattgcaaaagtttaaggacttttaggtgaaattcactgggtgtggatccaagagttcgccggaaactcaaggcagttgtctattccttcacggttagtcagttggctcacttagctggagcaaagaaagacttcataggctgtgctgccaagcatttataggattcagttggtggttatgtctcaactctgatactgtttttcaaaagctttaagaggtttacttattcatttcgagggcatacgtataccagcagagataggggctgggtgggggaagccagaaaaggagggagaaatactggatttctttaatactggtatttaaattctaataaaaatatatttgataatggtagatt

SEQ ID NO: 56684 - DNA, 1077 bp, Homo sapiens
ccgaattcaggtgttcctcccacctcagccttccaagtagctgggactacaggcatatgttaccacatctggctaatttttgtgttttttgtaggggtggggttttgccatgttgcccaggttggtcttgaactcctgagcccaggcctgtgctgggattacaggtgtgagctaccatgcctggcctctaatcttatctatgtagtctgcccaacccttaacacatggctagattgtgcctgtttgtgaactttctagacagcacctatctcctgttgcatttgtctgtattgggcaagtagattaaatatttccccattttcttattttttagcactatgaagtttaacattttactatattatcacagaatatagctctttagaaaacatttgtcttattcactgattgttatatgtgtattgcttgtctctttaaggaggatccaagtttttaatgagtagagaaaatagatgtgttattgcttctttgcagaagttgctaatgaaatgaaatgtatttttccttattataggttgttctgtcttcctgaatatttcattatactgactacaacaacacatgatagtatttctatcattagagatacaaggaaaacatttaaatattaagcagtcaggtgttctttcagtggtagcttagtggtcagaggactaatacagagacaactaagtgtggtagagagtgtgaaccatgtcatcaggctgcctgggttcctgtcccagctccactcactggttaggttacttagcctctctgcctgtcttctcagctgtaaaagagtggtaataatagtgcctatgccatagtgttgttgaaaattaaacaagaccatgaaggtaaagtacttagaagtgcctggtacatattattgtcttacaggtttgatctcttacaaatattgagtgatggaaaagcagaagttaatttttttaacatcgttttgaaatattcttatttttagaggggaaaaaagccctcaattttggaggttggattttgacatgccattaattacttttctcttttaggtttacaggtacatacattacaccc

SEQ ID NO: 56685 - DNA, 1039 bp, Homo sapiens
ctttgaccttgttggggaacataagccacaattaaggtatcctataatttgagtcttctttatgtcctttttgttggactatgtggagctagtctacatttatgacttttcatgtaaactaaaatccggaactattagaaccaagtatagcataacacggtgcaaacttccttttggcttagtgtcaaaggaaagatatttatctgtagcttaaacagtaagggtggagaaggagactttatgttgacattatatccttttcacttagccagaaactaccgtgtgtctgcaaattcataacaaaatgaagtttctgcagtaagttatcaaagcgaagagaagccattgtgaagatcatggcattgtatttcaggtagtaggaagatcctggtaattgtatcagggacagtttttacttccccacacccccacctcctcagaatgggggaatgaaagcattgtccagtaattgcaaagtatctggtggttattcagatgataatggacatttttacaactggagtggaaaattatttatttctgaaggtcgaatataagtgaccactgtactccttgttgaagagagatcttgctttatttcttgaagttttctgggcagttgtagaaaatggaatgtaaaggagcaactagaaaatctttattttacaaagctgagatcttgaaagagaagtaattataagctttgagaatgctgtattagtaaagatacactgggaaaacctgtttgcttgataaaaattcccattctttattaaaacaaatgcatgcttatttgaacacagatctaccaattttatattacaatatctaattagtattcagtcttagctttttttgcctatgagacattttcctattaatcataatggtgcttctctaccatatagcactatagtaaagtaagtggattatttagaagaaatgcattcttaacattatctcctctacattttttgaaatctagggtactgatgtttttaatagatttgttttattttaaaagtaatacagccgggca

SEQ ID NO: 56686 - DNA, 1044 bp, Homo sapiens
cagcccagagccattgataaattatcacatcactggttttcagaattatttttttgaagtatagaatcacttatttcaaacaaaattgagtatacaaaacagataaatatgggtgggttttctaattaaagttggagtgggaggctagtgacctgcctgctctaaacccctttacctcctactcaggtccctgaaacacaaggaaaatgccaaaattaaagaaatgcttttttcaaatgaaatatcgggcaatagaaaatgagagacaaaatgcctaacttaggtcttttgtcttgtgaatcccagagaaatttcattttatttattatgaaagtaattgaggtggttaaggataaattaaataaaaagtacaagatacatgggggatgttgactcctgatgtaattattcccactccaatgtgatttactctgtgctagatatatgtatatgatggaatttctagcccaaggtttagttaggtgataaataggaaggaaataatatacctcatttccagttggaaagtgcctgtcaaggtatataaagatggatagttgattgtctaaagttaaagattcttcttggctttataccttttagtgtaagcaaagttgtaaatgtcatctttgacaatggcaaatctccaaagaaacatttaattcaatttcctcctctactgtttttctctggtggacaggtggtagagaaaacgaaccctacagaaccagttggagtggtttgccgagtggatggagtttaccaggtggtagaatatagtgagatttccctggcaacagctcaaaaacgaagctcagacggacgactgctgttcaatgcggggaacattgccaaccatttcttcactgtaccatttctgagagatgttgtcaagtatgggcaagatgggggccttttaaaattatatttattgttaatcagaaactaagacacttgagagggatgcagacaccccaagtccatatcccacagaattcatctttcctgaggatcacttatcaaatggacatttatctcatgttg

SEQ ID NO: 56687 - DNA, 1038 bp, Homo sapiens
tttctcattttgcattgaaaaagaaaatttcagctttctttagtccaagggtgagcaatattttattcatcattcagattggaataggaaagcctattgttgagaccaaagccttagctatgttaaagggttagaagctgtgtatgcagtttcataataaagaggtctttatatggtttcgctctaggaagtttgtggtatatgaagtattgcgagaagatgagttttccccactaaagaatgctgatagtcagaatgggaaagacaaccctactactgcaaggcatgctttgatgtcccttcatcattgctgggtcctcaatgcagggggccatttcatagatgaaaatggctctcgccttccagcaattccccggtaagtcagtatcttttctcttttgtatgaatcctttcttggacttttcctcttggacttctctctctctctctctctctgtattcctagatcttttttaaaaagcaaagttttgatgtgtgaacagttcctgatgtgaaataacagtagctttgcctattataaagagaatgattgttttactttcttgtgaagaggagtctttcagatctctctttttttaatttttattttttggaaacattgccaccatgacagcaaaaagacttctactaaataatgatcagaagatttttttttttttggtgtgccatatggttaaagcccatcagtaacacactataccacagggcaagtccttcagccacagaggattgtttgttgttgcccatatatctgtggcctcaccactattttttttttttttttttgagacagagtcttgctttgtcaccaggttggagtgcagtggcacagtctcagctcactgcagcctccacctcccgtgttcaaatcgattctcctacctcagcctcccaagtagcagggactatacaggcacatgccaccacacccagctaatttttatatttttagtagagatgggctttcactatgttgaccagagtgctctcgatctcctgaccttgtgatccacccgc

SEQ ID NO: 56688 - DNA, 1047 bp, Homo sapiens
gaattgcttgaaactgggaggtgggggttgcagtgagcataggggtgagactactccgtctcaaaaaaaaaaagttaactctgtgagagatgattataggaaaaatgtttatcttattaactgtagaaatgatcagagtaattttctttttatatttttgttttatgcttttacaagtcagtcattaagtctactctaaaatgtctattaaatagattttgacttttatattctgcatctcaaccttttttggcatttgtgctttaaatcatcattatagcaagtccagcactgcatgacaagtgcaaattttctaattgtgtttcatttcaatcctctttttagggattagaaagttatgtggcagataaagaattccatgcacctctaatcatcgatgagaatggagttcatgagctggtgaaaaatggtatttgaaccagataccaagttttgtttgccacgataggaatagcttttatttttgatagaccaactgtgaacctacaagacgtcttggacaactgaagtttaaatatccacagggttttattttgcttgttgaactcttagagctattgcaaacttcccaagatccagatgactgaatttcagatagcatttttatgattcccaactcattgaaggtcttatttatataattttttccaagccaaggagaccattggccatccaggaaatttcgtacagctgaaatataggcaggatgttcaacatcagtttacttgcagctggaagcatttgtttttgaagttgtacatagtaataatatgtcattgtacatgttgaaaggtttctatggtactaaaagtttgttttattttatcaaacattaagcttttttaagaaaataattgggcagtgaaataaatgtatcttcttgtctctggagtgtcatttgtacttgaagaaattatttcattgagaaaatatgaaacttgggagaaactttaagataatgcataaaaacaaattgatgcttcagtgaggttgcagagtcatagaacttctttcagtgaatatcta

SEQ ID NO: 56689 - DNA, 1058 bp, Homo sapiens
tctgtcataattttgttttgctgtatttatttatttactcctcagtaagtagttattggatgcctagtctctgctggacactgttctatgttttatgatgaacaaaccccatgaagttacaagcatttataagcattcattgctttaggttctagggagtataatatgaatttgactgtgtgaaacttgatttagaaaattggtatccacattgggttaataaaatttagtttttaaagtttactgaactgtaatttaaaaataatacagaaatagttattaaatggtgattttcagtggagcaggtgttatgccataaataggaccccaaattttatattttttataatttttaaaaattatagagcaactttagctttacagaaaaactgagaacaaaatgcagagttctcatgaattccttctaccctttgcacaatttctctattattacaaccttgtattagtattatgttttatttgctatcagttactcaatgtgtatttattaaacataacaaaataataaataaatttattatttatgccctatttgttattatgaaaagaatacatcatattgctgcctctcaagctgtttataatgttatgtagctacagtttgaggtttctcatttattagaaaaattttttttctgtgcacttagtgcatgccttattcagtgctagggcttaacacattatctggacatagtagacatttaataaaatatctgctgagtatacagacaaatgaaatgaaggatccagaagtaaaagacgcaattcttgtccttaggaacttaggaaacaacagacacacatagcagtgactggagaaaatttcagaaatacataaaatatgattaaatctctgataaaggagacattggtataggcaaatgaggcataaagccattaacaagagccccatcctctttttcctcctttttgggactgtacttttttttaattttttttatttgtttgagacggagtctcactctgtcacccaggctggagtgcaatggtgcgatcttggctcactgcaccctctg

SEQ ID NO: 56690 - DNA, 1025 bp, Homo sapiens
ggaaagatgtgggtcattatccttggagctgacctaggcagtgaggacccagagtgatctggcgaacacagactgtgctgggcatgtggagtggaggggaggtaggaaacggctgtctacttggggcagaggattgggttgaggagtggtggaagataatactggaaaagaggacacttgccagaatgtggaaagccctgactgttggctgggctaagacatctggacagtctggacaccattttagggattcagcacgtgcgttttacgtgctctagcagggaaggatgactttactgttagagatgctcatttctgatgtccctctcgctgagtgtgagtgcagtcctgaataagattaaaggtgtcataactataaaccatttggaaaatgtaaaaatatatatgcatgagacacttggagcaaggattttctaaggtctcaatttcttgtttttgctttgattgttatagcttataagagtagatttaagggttagccacaaactctattactgtcagagcagatttgggctgctaggtagaatcttattttcactgtttcaattctcatttctttgtaattttttgtattatactacatattttagccccaaattgtgggctgcaggaacaacgttaagtatttcttgctggctgtgttcactgaattgcttcctgagcctgaacttgctcaaacttcctgttttttgggcacagaactcctggtttctccatttatgatggatgagaggggtttggagtctctcttctagactttcatagcatgtttcaggatttctcactgatatctaattgtcttataagagacattaaatttttttcacactcaaaaatccatgatcccctctaggtaaggtctgagtctctgtcaaacattttcgcttttgtgtaacatttagcacagtatttatcaggcattattttgtttgggggtagaggaggtaggcggcggtgggcagttgggaccccccgtacttatgttctgctccaatattgtcttg

SEQ ID NO: 56691 - DNA, 1041 bp, Homo sapiens
taaggccagtagtagggtgaggcagtgaagcactcccctggagtacaaactttaaggggatgccaaaaactcagctatcaagataaataaaattttaattcaatattgaaaaaaatcaagttggcaaatgacagcctgtgggccagcagcctgtttgtaaatacaattttattggaaagccactggaagtaaaggtactgtggcaggggagatccaggctaattctttgatgtgaaaaccctggttaggcttgtgaatgttagacacattagaccttagcttgtgattgatgggaaaaatatttctgaagaaaaggaataatggatctgactgcttttatgggtttcctggggttactgtaacaagtgatcacaaactgggtggcttaggacaacagatattgattgtctcacagttctggaggctagaagtccaagatcaaggtgtcagcagggccatattccctctgaaggttctagagaagcatctttctttgacatctaatttttgatggctcttgcaatcactccaatctctgccttgatgtttacatactcttcattgtgtatgtctctctgtctttgtgtccgtctctctgtctttgtgtccacatctttttctcctttcccttagatcctagtcattgggtgacatcccaatccagataacctcattttaacttggtaacatctgcaaagaccctagtttcaaataagattacattcctaagattacctatgaatataaccttaactctttggttccttatttggaaatagggtctttcttggacacgattcaacccaccacactgttaaagatatctttctaggacacaattcaacccaccatgctattaaataggtagggatgtggagagatttgacttaggcgcagcagaaacattatccattcacagaaatctggcagcggagtcaggggcagactcctgacatgatttaaatacctaagaaaatatttaaggaaaagtactttagttcctttggggcgcaaatattataacctttgctcatgtcacat

SEQ ID NO: 56692 - DNA, 1034 bp, Homo sapiens
tcccctcatgatgttctgcgggaaaattgtgcacacttttgttgtgtgacttaggttctttaactcaggctggttgacatggagcttggttccagtgatcagtgctggctttagatatgatttgcgcatctctgcaggctagtgtcacgctgcactgtggatctggactgtggctcgggtgccagttgcaacatagtcttcaaggatagccaatggcgagacaacagcactctgtcatgcagctgaagttatggaaacacatgatgtcacatgaatgtctattgtgtgaggtgatggttaatacctgtgtttccaagaaagtgccaggtactggctagtcctcaccacaaccctatatgtggtaagggcagttattaagcttattttataactgaagaagcattagcaccaacagagaagataacttgcccaaggtcatacatgaaaaccaatggagaaattaaggtttcaacctaggcagttaaggcctaaagtctgtgctcgtgaccaccaagctatctcaccggtcccctgtcaggctttttaggggataaagtacagagtaaagtagaactttcctcaaagactgtcttattggtctcacttattttttttttttgttagtctttgggtttactttaaattgatgggctgctggaaaaaatgtaaattgtcatttaaaaagaaggcatcaaggttttgtcttaggttaatttttcaaagggcttaccaagaacacagaagacagaatgccagctgggtgccgtggctcacgcctgtaatcccagcactttgggaggccaaggcaggcagatcacttgaggccaggagtttgagaccagcctggccaacatggtgaaaccccatctctacttaaaaaaaaaaaaaaaaaaaaaaaaatagccaggtgtggtggtgcatgcctgtaaccctagctgcttgggaggctgagttgggaggatcccttgaacctgggaggcagagattgcagtaagctgagatcatgacactgcactatagcctgggtgacaagg

SEQ ID NO: 56693 - DNA, 1075 bp, Homo sapiens
gataatggaaataaatgggctttggaaaattacatgcaaatatcaaagactgtgatttgttacttttggaagaaaagaaaatgaaaataaacactatgaaacaacagtttctatcaagcagatgatgcaggaggaagaaagagaaaaaaactccattagtgatcattaaggtcccttgtggtccccaagaccgactcaagttgcttttggggaatggggcttctaacagtcctgaactctggccaccctaactctaaagggatgcaggaccctgtgctcaagccaagcatatccatttatatatatatatatatatattttttttttttttttttttccttgggagaatagtgtgattgttgacttagctcttggtcctggcctgtgggtctctgaagagtatggatgtggcaagataaccctcacagaatttttcagtggtttggacacatacacagtaaagtagaagttaagacactaaaatcagtgaggtttttttatgagcctaagtgggaggtgatgagttgttaaaaaaatttatgcaactttttttttcttcctgcttcagaggtttttatgactttggtctttgtctctggtgtagtgataatctgttgtgtcgtcatgaccagcacctattacagtgcttggcttatataggcaatcaacaaatgtttgatgaataagaagagggagggggaaaaaggaagtcaaggaaactcccaggcttttctgtatttatttatttatttttatttatatttatttatttatttttaaatggagtttcactcttattacccaggctggagtgcaatggcgcaatctcggctcactgcaacctccgcctcccaggttctagagattttcctgcctcagcctctcgagtagctgggattacaggcatgcaccaccacgcctggctaattttgtatttttagtagggacgaggtttctccatgttggtcaggctggtctcgaactcccgacctcaggtgatccacccaccttggcctcccaaagtgctgggattacggcgtaagccaccatgcctggcttttttttttttttttgc

SEQ ID NO: 56694 - DNA, 1031 bp, Homo sapiens
ccatgtgtgtgttttcctggaagctgcatataggacactcattgacggggagcccgtggtctggagctagtagtgagatggtaaacattatggaacaagcagccctttcaggctctcagccttggcaggatagtatgaaaaataattcttgggaagctggggactggtggcagctgcttctcctcagcctgcctgccaggccctaccagagcttggagggctggagctccctgctgggcctgccacagcctgtgctggtagttttccactctgggaaactggaaaagtgaattggcttctctgtccgggagattggtgggtagcggaagcatcagaaaaccgctaagacaactcagcaggaaaaaccaggagacacttctttgctgcagggtctcttgcttcccttgccattcccagctttttcatgcttctttacagttcatgatagaacaaagacagactggtgggatttgatgaacgaggaagtggaactgggggaaagcaaggagacctgacatttagggcttgggccaacttggcagttctgagtcttgactattggctgagatcccttccacagaaggagtttacccaaaataggcacattcaatgggaaaaccacactggtacagctcagaagtgccacgttggttgccctgggcttttcctggttccaaagattcagtaggatgagaaaggtcatccaagatcatcttgtccattttcctgtgccttttctctaaggcccttgggcatactgagtcactgagaaactttgcctattttcttaatgtgactattgctgatttactaagttcttatctctgaattgtctatcctcatccttatattactttgtcacaatttctagacctccatcctaactttcgttgtctggagattgtgtgcaatacttgtagccctctctgccttttcatctacttatttatttgccaaacgtgtgttaagcatctcatgggtgctgtgtgttggcaggtactgagggggaaaaggaagaatctgacatgatt

SEQ ID NO: 56695 - DNA, 1050 bp, Homo sapiens
attattttaggaaattgccttacgttttacatgatccagtgactaatgaatcgaagttcaagcatttgtaataaaagacattttatattgggctatgctgtaatataatattgttattgattcattcattcacttagtgttccaagcaatgtgtatttctaaggcaggagagtggcacattagctgggtactttaccattgttttaaatcttatcaattatttgaatcatagatatgttacacatatcttcttattggtcttttgatcattttgcctgagttgtaagagttagtttatctccaggaaatgcccagcaagagtactgagacatcttcaggagaaatgatgatgctgagactagatgacttttgtctaggttcatctctgtgaagtggagggaatggaaaaattcaaagacaaagattttgccctagatgtcagtgccaaccagcctgtcctggtggctgtgaaaatgctccgagcagatgccaacaagaatgccaggtctgtggtctacattttgaattttcctttaggtatttcatctttaggaccaggaatactcctggatacttctgagcaattttttcttttgagatgggaaggtcagtgagctgcctcccatttccactgttatcctttttcttattccgatggggtcggcagtcctcatctttttctccacctctctcaaacacaaaggtacattttccattgtacttgccacatatttacttcctaaccccctgtgcacaagcactgtacttgttcccaacatatacaactgtctaaatgtgtacttctttggtctttatacacagacatactcctgcatgtcattacctcctcttgacaaagtcttcagaatcacacatgactttcttgctaagcctcttccagtctccttttttcacatttctatttattttctcatcccttttttctcttttatgctccttttcttctatttgagcaaccctcaaaatgagaagctacctctatttggaaaattatctatgaacctcaaagcaaaaggatccacagttctc

SEQ ID NO: 56696 - DNA, 1239 bp, Homo sapiens
gcctcactaacaaaatcttgctactttatgacccaagggtgtctgtcaccatgtactcaaacaattattagtcttggtcaaatgaatacttcttttgacatgattaccaccacagcctttaaagagctctgttttcgacaggctactaaatacatgttgcaactgactgatggttcgtactgcattaagaaaagtcagtatgagaaaataaagagtaatcagataagccaaagatggttgttcacatcatacaaagtttcttcactagtaatagagtgactccatggctttaaaaaaaaaaaggtaaatatcctcgtgcacttaagatatgattttcagtgaaacattttactctgtagagtggtttttagcagcctatttttgattcagcaaatattaatcactttctgtgtggcagggattttgttagatgtgagggatagaaatgtgaataagtcatggatcttgttctcaaaaacattacaattgaataagggcccatgatatttcaggaggaatagaatgagacagatccaggtgtcaatttctctgtcctctcaaaagttatccaaagggaaacaagatttggcataatgtccaggaataggccttggtgtgcattcttctctctcttgattctgactctggcaacttctgagtttatctatgtctgtatcctcccaaggaatgattttcttaaggagataaagatcatgtctcggctcaaggacccaaacatcatccatctattagctgtgtgtatcactgatgaccctctctgtatgatcactgaatacatggagaatggagatctcaatcagtttctttcccgccacgagccccctaattcttcctccagcgatgtacgcactgtcaggtaaacaagccaggtcttccttctcctccctgtggtcatgagagtaacctgggatctgaaaatagggagcagtgagccttaaagtgtatcaatgttctgggatggtgggggaagtcagtgtgcagggaataatggagcagctgccctttggggaaacgcaagggattcatcaagagtagagaaagaatgttgagctttcaaccctagtttgttgataccattttagaatgtgtacctttcacatcttcctgtttccataggctaccttctgtcttcttgtctatttcctcagttacaccaatctgaagtttatggctacccaaattgcctctggcatgaagtacctttcctctcttaatttt

SEQ ID NO: 56697 - DNA, 1068 bp, Homo sapiens
tggtcacccctaggagcagtggaccaccaggttgcctaaagagggatgagccagcccaggtcagaaacagaggaggtcaaaactcccgtgttgatcagtaatgagatcaaacgtgtgactggccattgcactccaggctgggcaacataatgagaccccatttctcaaaggaaaaaatatttaataataaataatatcatccacttcacagtgtggttgtctgtattgagtagaaaatgtgagtagtcaatgcatgctatttacacctgaatctcattgctgtcacttgttaaagtctatctttcaacactgtgattatcactgaactggtaaatgagagtcctggattcactgcaggcacttaaactagattcctctatctctaacataaaaaccattgacttcccattcagattttgcctttctcaggagcattttcccaaggctaccctagagttgaaaggttgacctaacactcagttgcagagtcaaatagcttatggctgcgtttttttcagctcttggatctcatccccagagaaacagaaccaagctgagatcatgagaatgaaagaatgggctgtttctaaatactccatgcacatcttggcattttcagaattccttgcctgtggtgggggaaggggtatagctgcagattatgaaatttaacagggtgttgttgtgcacaggttattctgatttcccattcttttctttacttaaatagggcaagttcactacagcaagtgatgtgtgggcctttggggttactttgtgggagactttcaccttttgtcaagaacagccctattcccagctgtcagatgaacaggttattgagaatactggagagttcttccgagaccaagggaggcaggtaagaactgttggggatgaatggatgtggacctgtgtaccttgaaggatggagaatggcaagtcctgccttagcaggagtgggccgagatggaagacagactatccaggtgttagtctttgtcactaactatccagatgatgtgaaagaccagtatcctccccaggcatccatacactttgctttat

SEQ ID NO: 56698 - DNA, 1007 bp, Homo sapiens
ctactgctgagtatacacactcttgcctctgagatggcgtgaccagcagaaaagaaagctcagggctgtggcttcagaattcatggaaacagagccactgtcaagaaggaatctgctcagagcagattctgagttttcacactccacaaatcctcagatttagtgggaagctggaaaaaggaactcttaattccaattgaggagaaacaagaaaacattacaaatcagtttcccaagctgagaaggattagccttgaccccttgggtctgcctctgttgccctcaccagtttaccttctacaacagtttctcaggaacatgtgtatttccccattcagctttcagcattgctccacgccacagcataagcatagatcccaagtccacaggctccattttgcaggtcatcttctgatcctagcaaatgtcctttccccatagttgtcctatgcctttgggctttagtctatcccaggactaactgtggagaaatcattggtttgagagtcaagagagcattggtttgggagctttaatcctctttctgcttcacactaagtgtgtcatcttggctaaatcacttggtctttctgcattttgttttcttatttataggatgaggaaattagattaaatggttttgaggtcctttcttgttctgatatgtccagtactcactggaaaattggatctataactgatgggtttagtaatctggtcatttcttgctctgaaaattgtagtcagcaaaagagatcatggaagaaatcactgtaatggtagtaatagtaacacatgccatttgtattgtgccttaggtttaccaggtgtttccaaatacattagcatatttgatatgtgcaggactagataccttgggacctgccacactccactttcaagatatgtattagcttcattagaattaaagggacttgaactcaggacctgcagcctattcttctttatccacatgtctctggtagggctacatccagatcacacca

SEQ ID NO: 56699 - DNA, 1049 bp, Homo sapiens
aatatgtattatcatgtaatacatatctgtgtccttttctgggatgaggaaggcttcaacttctggcactgagaactttgtattacagacacaggtttagtttctagcttagtcatgcctttagagtttagtagcacaaatccatgcaacccaacagaatacatggtgagggcctagtatgtagaatttgaaagtagttcaaatttgaattagaagaatgaagctaggacttatttggaaaaggagatagaaaaaaaatgatcagaaactgtggggccttattacctttgcagtaagttatcttcttcatgatatatgtgaattattttatgtgcagattgtgttttgggattgtcagatctaaacttatattcttgctggctaatgtgctgatagccaggtctgaaacttgatgtgctatccagacacatatgatcagaaaagatctagagtgcaaagaggtgcctgaggagcaaaatgtggttttaatgttgtggaaagatcacttgcaagtatataagactgtataaagaagaggactgtgtgcaagtggggtgaaaaaaaaggatacgtgaatgtgcatatgactgaatagggaggaaggtcagggctagaaaggaggctacataaaaaggggcaatggagaatgcacaggaaagacacaggggaaggtcaagtcgagcaaggtagaaacaggagtagctagagccattgggaatccattttgaaacaagaaggagttttgaaagggaataggaaagtaagtgtcttgaagtaaaagataaatatggatggagaaagaagaaattctggatgatagagatgataaaaatatttattaagaaatgaagtcaggttcagtgtatgaaatggaaaggaatttttcagaattttaagaaaggggaagttcctcttggaaaagatatagcaaccatcggggaatgaccttttcatttcagaagtggatgaggaaggtggtgtgagcatcaggtatattctggaccatttcaagtgctggtgagaagaaaggaactctttgcctgaactgg

SEQ ID NO: 56700 - DNA, 1026 bp, Homo sapiens
atttcgccagtttttccacacatattcatttagttgctggatacttttaattcttgctgatttgtaaactggccttgcttggatacaacaggaaagatactatctggataaagttctacagttttagagagactattaacacattaatgtgttcctttgtcatgagcaataccctgcctacactgcttctaaattttctgatttgtttggctgtttggcatctgaaacaatccaagacaaacttagaaagattaggcaacacaaaacacagtaagacctgttcatagcttgttgtctagaaaaccaggtagcaggatattctagatgcttcctgctgcttctacgtgagtaggattagcactggggacaaaataaggagtttagagtaaaccagtatttcagtcaagagttagttggcacttagttaatggcactggaaatagcttgtggagagaatagaatacaatggtatagactcctaatgtttgataaaatactattttcagagtggtagagaggttttatttgcctaaatagccgttattaaatggaataacaaccacattagaccaaattaattgcaaacacagcggcaacctggggagaagttgaaactccagttttgtggattacagttttgagttttatgattgacatttttaagtcccctatttaaggggtcaagattataacaatgtgtgtcttactaagtttctaggtcattgtgagcacttgataaatatttgctgaatgttgtttttttgaatgaacataagatagaaacaaaaacttctcatccagttaactagagtgaatgtagggagaattgttttgcttgtaacatggagagtttattttcaagtgaggaaagagaaaaaaattactcagacttgttcctggtgaagtgcattctctgtttgtatactttttgatggagaaattgatctatagaactgcttaattttttgaggcatttagacagcaatgaaaggtagttctccacaggacaccgaatcaaaaggagag

SEQ ID NO: 56701 - DNA, 1004 bp, Homo sapiens
cgaggagagtgggtttaagagatagagggttgctgcaattccttattgagaggacagagctggaaggaattattgatcagaggttttacttaaagcccacgatgactccacagattctgtttgaagccactaccaaagaaagaattctcaaatgtttactgtagctaaagaaaaactgttgagaaagaaatgctgtaactctaatgtgctataaattcttctgaacttgctgtggctaatatattaatttaaaaagtattttttgtctttcttaggcctccttgattctagtcactctagagatagaatacacaatcttgtcctgatgtttttacttgcaactcacaatcttgtttggtggtttacttgcaggtttcagagattagactgtatatatctaaatgctgggatcatgcctaatccacaactaaatatcaaagcacttttctttggcctcttttcaaggtaattttcgttttatggatgaactgattggaaggaatgtgttcatttttctgcctagttttgatggcatgttaagttggggggatgaaaggtaaggggttgttgaaaaggttgaagacagaaaaaggagatgtcgcaaccatatcatgaaagaaaagcaatcctcttttgtggggagtgctgaaagtcccgttttttatggtattctaagtctccaggacattctaaatggtttagaaggtcattttttggtctgcctggatatgcctattagcaagaacattttgaaattaggcagagttctcagagagtctccaatttccaggaaagttactttgaactgtttcccagctgtatgtcaggtgctctgaccagtaggttggggaaatgcagacaactaatgtttcctgggagattctcgttactcattagtgtagtggctttcaaaaatgttgaaacacaaccaggagaattcttatttataggaatagatcttactttgtgacccaatacacttattcataaataggcattcttac

SEQ ID NO: 56702 - DNA, 1028 bp, Homo sapiens
ttataagcatctaacaaaacccggcacataatcaatgttcaacaagttattattactctggaattctataaattacctctgtacttcctcccttgtcaccctgaacttagtgaagtttccttcacttggttttgctcttcaactcggaccccgaaaacgctctaaacgctggcggaagtcacgcagagatgggctagacgctcaaccccggtctcttccccgaaaccgcggtgctcccacttcctgcagtccgaggttccgactcgacgccagctccgcgagcaatggttccgccctgcgccctgccccttccatgacaactccagtcccacctgcctggcgtctcttgagcccaaccggcatccgtcgcggttggacgtgggcttggcggaatggggcgggacttccagtaggaggcggcaagtttgaaaagtgatgacggttgacgtttgctgatttttgactttgcttgtagctgctccccgaactcgccgtcttcctgtcggcggccggcactgtaggtgagcgcgagaggacggaggaaggaagcctgcagacagacgccttctccatcccaaggcgcgggcaggtgccgggacgctgggcctggcggtgttttcgtcgtgctcagcggtgggaggaggcggaagaaaccagagcctgggaggtgaggggcgggcccgtcgttactttttatttgatgttagtcccagaaacaaccagagctcagttcctactaaactaacgggtgttttctggtgcagcatagaccgaagaagacgagcttgagctgaaattgttcaagttaggcatacatttatgtgtgatttttggaaaggcggtggtaatgtggtttatttggctgcagatgcttgtcagctttttacacatctccgttgccaaacgtttcttaaccaaatccaaaaccatgaatgaaaaggtaaaaatatcacacctaatccaaaattcaaaggaaaagagcagcgcatatatagcactacgcatgcataacgccatcattgttcctt

SEQ ID NO: 56703 - DNA, 3106 bp, Homo sapiens
ttgtaacaagtattataacaggggtaaatgcaaggctctaggacaaggtttcttttcttttctttcttttttttttttttttttgacacagggtctctgtcacccaggctggagtgcagtggtgcgatctcagttcattgcaacttctgcttcccaggctcaagtgatcctcccacctcagcctcccaagtggctgggactacaggcataggccaccatgcctggctaatttttatgtgttttgtagagatagggtttcatcatgttgcccaggctggtcttaaactcctgggctcaagcgatccacatgctttggcctcccaaagtgctgagattacaggtacagggttttttaacatcagcatttattgaccttttgaactggataattctttgctgttgggggccaccctatacatcgtaagatgtttggcagcatccctggtctttatccactagattctagttgcacccacactcctgtgctgacaatcaaaaatgtcttcagccattgccagatgtgcccttggtgataaagttagagaactactacgctagggggacacaggtaggaataactcactacgtgaagacattaggagaaatggttttttgttttcttaaaattctcactctggtgataggatttcctatcaattatatcatctattcttactcagttttttttctctcttctatttgcatctacaaccttattagccatctcactatatatgtaatgaataggatgtcaaaactgaatacaattttttatgccctatattactgttgtttatatatagcttctgctgatgatgttgcctatatgccttgctttgagaattaattattaggattggtcttgttaagctccgtggccctcaaatgtaaaagagaagcacgtggtttctcatctatctattcaaccaaagtcctccttcccaaatgtgttgttctcttcctacaaaagagaacgacactagaaaattagcagaaaataactgtgtcaccttagaataaaagtaattttaggatacatatataaatacttgtatttatcttactaagatatttgatgatagttaacactactatgaatagttcaactttggctcattttgtcattatgtttattagtttccagataatgagaactactgatcatgtggtatttctcattgttttttcttccttcagattaacaggaaacttccaagatggaaactttgtctttccccagatataatgtagctgagattgtgattcatattcgcaataagatcttaacaggagctgatggtaaaaacctcaccaagaatgatctttatccaaatccaaaggtaaaaggtggttacgtttgcatgtggataatggtatttagggaaaaagtaagctactaggtctattgtgtggcaagaaagggatatggcctcctatttgatggagaccagtcattttcattgagagagaatctctcacctagcataatttaaaaataacactaagtttatatgtgtggtgacttctacattcccattaggattcaattctttaatatagtcgttttcttaaaaaaaaaaaagcttctaaaccatattaaagtatattaaattttttattattattattggaatggtggtctgagagtatcatttattgatagggcttcaaggaacttattccaagtggttttcaaccacaaaaaatgcttagaaataatcctctttggaagcctacagattaattttcatgcattatgccccagggggaattgacttgttttgacaggtattgttttttatatctttagttattaaatacaaaatgaactatttatgtgtcacagaaaatcccaaagtctccttccagtttcttgtgttggacttgaagtgataacgtagtaaaacctggtgtaatggtgtagaactcaaactttctgatgtcactaccctctttgattctcgaaaatggaagaaataccttagaataactgatgtcttcaaactgagtaaattcagctttcttaaaagattaccacgttttccctatatttcccgtcttaatgctcacccaataaacttgtattaatatatggatcagaacagattcacaggtcagcatttaggaactgctgttttagaagatccggtttttaaaattctatataaccctattacatttatacctcctgatcaagtgttcccttaaacttcaaatctaaggaaaccttaatatctatggcagcaaacaaggtttcctgtgttcacacacacacacacacacacacacacacacacacacacacacattttccatgtgccattatttctgccacatgcctgacagcctgttctgaaagattaactcttcttcttctatttcctaaggtggatgggttgcttggattggatttgggtatacttgctctcattcttaaacagctgatcccattgaccacttatatatgagcaaactaagcatcataaggtgttttaaaatttggaaaaattaaggaatatttcaagggaaatggaataattttgttgcctttttcttctttgctttcatcgattataatattgtatggtaatgatgatagtgacatagctttagagttatgcatcggagtattcaaagttgttttttgctgtagcctgaagtcttgcacatgatctacatgagagccttacaaatagtatatggaattcgactggaacatttttacatggtgagtttaagatgaggcaaaattatggggttttttttgtttgtttgtttgttttgttttgctgcagttctgcttacaatgcatactggcttttaggataggaagttcttgactttatttttaacaaattcaaagacatataaaattagtgtcacttacaatgggatcttatgcacaataatggtttatatccatagatttagtaagatgaaaaccatagtaaaagacttaaatgacacagatcattgatgcaatgcaattgttatagatttataggtttgttttcagagactacaataaacaatagctaagtcttcatattgttctcttttcaggaagaactcccaaattagagtagaagatatgcagtaagattga

SEQ ID NO: 56704 - DNA, 1052 bp, Homo sapiens
tatggttgatgctgtcctgtctacagtgagtgagttctcacaagatctggtcacttaaaagtgtgtggcaccttccccattgtgcttttgctccctctggctatgtgacatgtctgctccccatttgccttctgtcatgactaagcttccagaggcctccccaaaagcaagcaaatgccagcatcatgcttcctgtataacctgcacaactgtgagccaattaaatcccttttctttataaattacccagtctcaggtatttctttatagcaatacaagaatagcctaatacacacaccaaatctcttaacttacagtaacttgatggataaatatcaaagtcgaatttaaggacaattaaagctagaattttacattctaatataacattatgactattcttttaatgataaaagataatttctatatggtaaatagtaattcttacatttgataaaattggtatgatgaatccactatgcaaaatcatacttacatattatttgtagtcatattcccaaatttatagaacactttttaaatggaaggagttttaaaaaaacatcagaaaaacagcttttctgtggctctcaaaaggaaaaaaagaaattcaacaagatattaaaaattcatacttaaaaatgggatatactttttaaaggcaatttccttgaagttgtttttttcctttttttttttttttacatttactgatggaaaggtgaaatggtagatcgaagccagacattaaaactgttttaaattctcacttacttggacatagaatatcagcagtctcaaagtcattcacccggcagataggcaaaaatgagtcccttgaagatgaagtacaaaaagactattgaaaagtattttgcacattaaatgctaagctataggatataaacatcttattttcagaaagagatttctggatatatttcttaaggtcagtggacgaagccagaattctactataatgtataaccctatagcactgaaatctattttttctgtatattaatcatgtagtcatgcaatactaaagtata

SEQ ID NO: 56705 - DNA, 1612 bp, Homo sapiens
aactcttaattatataatacatcctttggcttttgttgttgttgttgttagtgtgttagcctgatttgtttaaagccattagcttactgtcctgatttatgtctggaatattgtcttatgtaggtgagcagtaactgcctggactatcttccttcagatcagttgattccatcaaatgtttactcctacaacaaagttttcatttatttgttttgtttttgacttataggttatgtagggaaaagaatcactcaacagttgtgatttcttggccttccttatatatatatattgattttgagcaggatttttaaaatctcttctaatttatagatgtctttgaggttatctgttttagatgagagattttctaacctgcccctggttaaaattgcctttacaggcagacattagaatataacagggtaaaagatgccaccaactaaatcaaaacaagaatgacaaagtggagagaatatttgcagcacatgccacaaagccttaccaactctaataacaaaacccatgtaatattcctaatatacaaatataatatgcagaactacaaagcagtcctgtaaactgacaggaaaaatgataactttaaaaaaatagacaaaggctttaaacagggagtttatataaaaatagctaatatatcagataggcaaaaactaaatttgaaaacgttcttatagaagagacttgaacacgtgtaagtgttgtaaggaaggactagtagcggaagaatggatggtatgggagtaagagttgtgaggcaatgatagccagtgcagaggtagagaaatcagcattaccagaaggcatacaatattcatgttattaggagtgaagttagaaaggataggtatgtgtgtggatggatccatagatttgatagtagaaaactgaaggagctcatgtgatttttattttctgcctgtagtagaggccagatcattcattttaaatgattgccacatgaaagggtgtaattcagaaacataaaagtagacaatttcttcatctcagttatttgaggacaggtatttcattttagcctttcaaaagtgaagagcagtattttaatctattttgctgtgttaagttctgttccagttgaagagcaagaagagttcaagcagctttcagatggaattcaggagctacaacaatcactaaatcaggattttcatcaaaaaacggtatctgttgtgaggcaccttaaactttaaaaaacaaaatttgtttgtagatgtggtgggacatatagtggaggtaacagcacattgctttctctattaccaaagaaacagaatatatttctgtgcccatttgtgccccttataatggatacatacttctctcaaccatctagaaccgtgatggtttttgttggcaaagttttttgttgtcttattgaatagaattttttagggttttcctaggtttaatttcactgcttccaaaccatgcactgtggcaccctggatactgcagtaaaccctcaagaatgcctcaaaatatcttaaattttcaagggaaccactgtagtactcagcatctgtcatatcctttttgaattcaaggtagttcacagtttcagtttttg

SEQ ID NO: 56706 - DNA, 1039 bp, Homo sapiens
attgtactatttaaagaagaaatgtagagaaaatgggagcaggattttcagggatcagtacaaatttagcaggcagaccggagtgggataatgatattctaggaggaccctactggtcaaagaaagatcacttatacttgtctaaacataagatcagaattaccagattgtagggtgcagtagggaactggtgggagatgagactagacaggaagagagttaagagccatgtaatgaaaggctttgaatgtcctgctaaggagcttgatctttggcctatagacaaatgtgagcaattaagtaggtaagtgatgtgttcagaatttaattttaccctcattacagagaacatggacctaatttctttgttctttcccattactagaatggtaaatcaccaagtttattatatctaatatataaaaatgttttctcaacagaatgaactaaaattgtcggtggtttctttgaaagaaatacaagagagtttgaaaacaaaaattgtggattctccagagaagttaaagaattataaagaaaaaatgaaagatacggtccagaagcttaaaaatgccagagtgagttttctttttattttaatgcttttgtatctaaaaaaaaaaattagcaaattcttgtttaattatgtgttaatttttggatttctgaattatctatacttctcttcctcttaaacttttttgaccttatttctaatctgtagcttttctctagagtgaatatggggaaaataaatataatttcaagacatttgttcaattatgcaacaatttttcgaggcttttctctgggagatcaaaacagaaatgctgggtggtgagatttaattactttattacaagggaggaaagtattaagtaattttacaaacaattgtaattataaattacaatatatactataacaaagtataaggtatgcatgtgtgtaggtaggggtatacgagaaatctctgtaccttctgattaattttgctgtgaatgtctaactgcttgaaaaattaaaatctattaatggt

SEQ ID NO: 56707 - DNA, 1154 bp, Homo sapiens
gataactaacattacatttgataaacaatttcttttttgagataagtagggattagaaggtgagattgccccaggtattctttcccaactacatagtcccctcatctgccattgtgttacccaaaaaagatgtgtatctactgctttgaattgtttctagcacctacccttttccctttatttgtactactttagttcagatcctaacccctcaactctagtctcttagctaatcttaacatgtctccctttcagtctgtactgatagaaaacacctctctagttgtcatgtcctttctcagtatctctgatgcctccttgttgtctcttctggttcatctgcatttttctgccggactttcaggttttaaagagttttgtctctttttaaatttgtgtttaattatagttcatcctagaaaatattctttcattttatttctaaatcctaattggttatgttgactttaaatacttcttataaaatacagagcctgaacttggaggaccaaattgagagtgatgagtcagaactgaagaaattgaagactgaagaaaattcgttcaaaagactgatgattgtgaagaaggaaaaacttgccacagcacaattcaaaataaataagaagcatgaagatgttaagcaatacaaacgcacagtaattgagtatggagttgttttcaattttagtgtattagaaagcaattatgaaaaacaaatacatttttcccccaggatttcaaaacctcggtattttccaaaagagtttaaacagctttatctttatttcacctttagttgactaaaacagatgagttaattataaaacttatactgctagttctagatttagagatgtcttagctactcttttcctgggtatacagttccaattcctttgcatcattcttcagaagggttctgatgctactgattatttcattgcactttagagatagtggtctagcttgcatcagaattaactaaatggcctatcttatagtccagcttgtctgtagagttacagcatttgtgttttgagaaaaagtcatatattcaggtaagaagtaatactttcctaagtatgtaagtatgtttttagctggtacgttagggtactttattggtaaaatacccatcagttctaagaatg

SEQ ID NO: 56708 - DNA, 1050 bp, Homo sapiens
tgcgtcagagatcatctgagtatttccttcatacttcctcttgcagatgaaaaagggcagaacttaaggattttatgtttgttgccaaactgccttgtagaaaagttaaactgattcacattcccaccaacagtacctaagtgtgtacaactggggaaatgtaacttaaaaaatcttcattttaaatattgattgattgattgatttactcattcactaacccaccaatgagggaaaaaaaatctcattaatatattgagagaaagagttcacactatgttgtgatgtgattatagtaccacactttggggttttcattcctttgcttttatatcttgagaagagttttaggtttgtcaaatactgacacatggtcactttggaatcaaaactagaattgtgtttgcctttttagttgctgaagaggattaaatattagctgtctcgattttctttcagggattgcaataaagttcaagaaaaaagaggtgctgtctatgaacgagtaaccacaattaatcaagaaatccaaaaaattaaacttggaattcaacaactaaaagatgctgctgaaagggagaaactgaagtcccaggtgaatatgtgttcataagaagttaatttcaaataatctctcatgtatttgagttgttaactgaaacaaaacagcttacttggtctctgtgtaatgagacttttaatgatacctaaaattatttactctttattcttgttttgaatatatttactgtaaagcttcataaatagtcctaagtttaatgagaacaggcatcttgtctcctacatttttatctttaaaaatgctagtacagtgctaaacataaaatgtttacctgtttctattcttttaactgccaatgtctctaacaagtagtatattcctaatatatttattaaatatttattgtctccttatcttttgaagtttgatttatgtcttcaagagtgttctaccagaacaatagttcaaactgctctgccagaaatcacaaaaaattgctatttattatgcaaaatcccttagcctct

SEQ ID NO: 56709 - DNA, 1013 bp, Homo sapiens
tcagttaaaggactcctgtcttttccacataaagttctgccttgttaagagtttttcaccatactttagcacaactgttacttttaattcagaattttacttttttaggttttatttatttcaacctagatttcaaaatgtcaaggttagtttaaatctatcattctgtcttccaccttaactatttctcattgcttagtgtcacctgcagatttgatcagcatgcctttttcttcaaaataaaaatgtttactagaacaaggtcctttgctgcattataattttttcatcctagaggcgtagaactattgatcaaaactttgggtacaattcttcaacttgctaagttgttcttacctaccttgattcaggctacgttgtgatatctatttgttacacaaatgggaaggtctctaaatactttggtaaaatcaaatactttttgtcaaagaactcttcttagcttactttataatcatccttcatgaaaagaaaaaaggatatgattgccaaattgttctttgtgcagttctgttgcattttgtgatcatcatagtcttttttcattaaatgttctttcccatagataatttatctcttctagtttcaattattatcttcatttggatagctttcaaaaatctatgtttcttgttctgtccactcacaacaaaaataatattttaaaattacattcaacattttcccacatctgaccttttcttcactttctttcccttttctttttctctcttttgctcaacttcttcataaatttctttgtatttctcaattgcatcatcattttctatcacaaagcattgaaattttggacttgctttagataattctgacatccagataatctccaagttaatttcatgattgcttttacatggtggtactcttcatacatgtacatagcccttcatacatacagcgctcttattattatacgtctgtcacataattttgtagtagtcatggattgcagcaacatttgctaagtttct

SEQ ID NO: 56710 - DNA, 1082 bp, Homo sapiens
tgcatggaataattattattctgtttcattttctacttaggaaatatttctaaacttgaaaactgctttggagaaataccacgacggtattgaaaaggcagcagaggactcctatgctaagatagatgagaagacagctgaactgaagaggaagatgttcaaaatgtcaacctgattaacaaaattacatgtctttttgtaaatggcttgccatcttttaattttctatttagaaagaaaagttgaagcgaatggaagtatcagaagtaccaaataatgttggcttcatcagtttttatacactctcataagtagttaataagatgaatttaatgtaggcttttattaatttataattaaaataacttgtgcagctattcatgtctctactctgccccttgttgtaaatagtttgagtaaaacaaaactagttacctttgaaatatatatatttttttctgttactatcatggctgttgttttgtttattgacatagagttgtggcattattgagtccggactgtgccctcagcattgtggttgagatctcatttgatccttacttaagcaattctaggtagatatttttattactacatagataaagtaattataaaggtcctaaaagatcagatagctgaagcaaaatttgaactgtactgtctatgatactgaagtctacaatgtttcagtgtaccacagttttcaatgtagttaattgaaagagaaagtttgagtttagtagtcgatttcttcattgatgcaactggcattttttttcaagaaaaatgagttaatatgtataaagtgactaaaacagtgcctggcacatggtaaacactccataactctattagtatttaaggtcatggaagctccaggtactttcctctttgtcagagataataaaatgttattttagggagtgaccaggctttcaatgaaaggcaaagccctggaatggaaggagcagcaaaagctgggtgtgcagggaagaacagatgaggatacacaaattgcgctattgccttgtcccttcctagcttctctttaaatattcatgagttttcattcagagaaa

SEQ ID NO: 56711 - DNA, 1354 bp, Homo sapiens
aactttgatacagtttcagggtgctccagacacccgtggccacttcatgtaaaccactgacaatttctagagcactttgagagactacaatgtgaccgtgatcaaattttgtaattaaacctaatgagggcaacagacacttctcaaataagagatgtgtcaattacggcgctcccctgctctaagtattcacaaggagacgataaacagtttctttattcctccttctcctcatcctcctcctcctcctcttcttcctccttctcttcctcttcctcttccacctttttccgggcaactttagcaggacctttgcaccatcaaactttcctttcgacttatagtcagcaacatccttctcatacttctccttcagctttgcagccttagtgatgtaaggctgcttttcactgtcatttaaattattccacatctcactcaggttttttgccacgtctccaatagagatgccggggtttgtggatttgattttggggtggaattctgaacagaacaggaagaatccagacggtggccttttgggagcattgggatccttcttcttcttgcctcccttagctggtccataatccttcatttcccgatcatagcgcactttatctgcctttgccatttcatcaaatttagatttctgtttcccggacatgtcttccacctctcagagcacttcttggaaaattccacaaaattgacagggacctctgggtttttcttcttatgttcttctctacttgtctgcacaaagaaggcataagcagacatcttgccctttggtttcttggggtcacctttagccatcctgactgtattgttcgctagtctgggcagcagcagggcacgacgcacggctcagcgctccccagcctcgcgctagctgcctccacgagagccgcctcaattgatataaataaatggttaagatggtaaaattttataagtatattttacctcgataaaaatgtttcagcaaatgtattgaagacgtacaacatgatgttttgacatacatatacattgtgaaatgattgccacaatcagactaattaacatatctctctcctcccatagttacttttttatttttgtgatgagaatactgcttcctttctcaattggatggcttttcttttcttacctatttaagatttactgtcctaggaaattttaattttataatacagtattattaactataatctctatgctgtacattagatttctagaacttagtcattctgcatacctgaaactttgttccttttgatcaatatctccccattttccctactccaagtccctggcaaccaccatattattctttgcttctgtgatt

SEQ ID NO: 56712 - DNA, 1079 bp, Homo sapiens
aagtatgagaaggatgttgctgactataagtcgaaaggaaagtttgatggtgcaaaggtcctgctaaagttgcccggaaaaaggtggaagaggaagaggaagagaaggaggaagaagaggaggaggaggaggatgaggagaaggaggaataaagaaactgtttatcgtctccttgtgaatacttagagcaggggagcgccgtaattgacacatctcttatttgagaagtgtctgttgccctcattaggtttaattacaaaatttgatcacggtcacattgtagtctctcaaagtgctctagaaattgtcagtggtttacatgaagtggccacgggtgtctggagcaccctgaaactgtatcaaagttgcacatatttccaaacattttttaaatgaaaaggcactcttcgtgttctcctcactctgtgcactttgccgttggtgtgacaaggcatttaaagatgtttcctgcattttcttttttttattatttgtaaggtggtgttaactatggttattggctagaaattctgagttttcaactgtatatatatctatagtttgtaaaaagaacaaaacaaccaagacaaactcttgatgctccttgctcggcgttgaggctgtggggaagatgccttttggagagactgtagctcagggcgtgcaatgtgaggctggacctgttgaccctgcagggggcatacatttagcttcaggttgtcttgtttctgtatatagtgacatagcattctgctgccatcttagctgtggacaaaggtgggtcagctggcatgagaatattttttttttaagtgtggtagtttttagactgtttttaaacaaactgtagaactcttcattgtcagcaaagcaaagagccactgcatcaatgaaagttcaagaacctcctgtacttaaaaatgatttgcaatgttctgttattttttttgtatgtttagaatgctgaaatgtttttgaagttaaataaacagtattacatttaaaaaaataaataaatatatgcaattatgtgtcaactatacctcagtaaagctgaaataaataaataaataaataaa

SEQ ID NO: 56713 - DNA, 1181 bp, Homo sapiens
atagtttcaagatgtgactgttgaatgaatatgtaattacttgggtcttgaaatgcgtgtaaaattagtacgcagctcctttgttgaatgttatttgtgttgtgcataacattctagacaaagcacctgagaagtgatgttcagacctctaagtcttccaggttgccttgccaaagcttaaccttattgcaaacctgttaattgcattattttagctgtgagacaacttttaaaagatttatggactgtgcattcaaatatcaaaagagttttttccagtttgtcacactttttagtttcttttttctattagcccagagtaggaaacttaagtgtgtgtgtatatatatatttatatatatttttttatcttctctcttttttcttctttgatctctgatgcttatttactttgagtgtttggtttgttgagatttgtttctaaccaagtatgagttcctgctgatcttgtttcatgaaatgtagaatcaaaatataaaagcatatgtgataatatggactaaagagagtctatttttgaagatactttatcagatttttattgaaaggaagcctgtcagggcacttaaatgtacattgtggccaaagtgcttaattctagtttcctaattaaaacctactgaggcagtagattaaagtgggtgggtgtgaatagagatccggttcaggtgagggttaaagagttcgctccttgttcatgttggctcaagtataatgataggaagtaaagtagtcagtcgtattggtcaaagtaacattctaaaagttttgtattttaaattttgtgtcaatacatttaatgtttagagacttaaaaaaatctaaattaaggttttttgtgttgtctctagaataacatatttaaaaaaacaatttacaaataatgtaattgaaagtgataagagtcattgccccctgtgttaagggacacacacacacacacacacacacacacacaagtcttggattaagagggcacccctgggtgaaagtaggggaaaaaaaaggcttacctccctcttagtcttcaacttgtgtgttggaaggattgaagggaaggcaaaaacctctcctggaatgttgagtgttgtgttaaaggtaggagtcaactgtggtctgctgaaaagaaccctttgattctaaagcacgattacttggct

SEQ ID NO: 56714 - DNA, 1870 bp, Homo sapiens
gggtagtttttattctgatacattttcgcttttaaaaaaataaatgctaagaagaagtgccagcaaaatgctcgggtggcaattctcaaagagcagctaaaaaaccctgtcaagacctatagcaatgtatatttcacatgtggcttttatctgctcgctcattctaggaatacagagacaattagagttttggatcatttaatataacactttcttttggatttttaagatccattccttgtcttctggcatattagtaataggctaagttttgcatatgtgtatatatggtggtaatggggttggtgggatagaagaaaaggagaaaaagtcaagcatattacatttctttaaaaaaaccttgaatatatttttaaacatttcctgatgttttttattcctgtgtcaaaatcacgcaagtttaaaaattaggaaaacacgaaaaatattgaatgccatttactaaggagaatatttatagatagcaatgaatagctgcaattgttgtgaatagtttttaattttagaacataatagctatatatggcacttttcagccaattttcctctgtgcattgtctgcatcaaagttaacgcaaatcaaatctttggaggaggttaaaaaaatttattttttgctccttaacacccttttgttctctctctttccttttctctctgtgttcaattaacacccccatcacagaactgtagtgtgtgtgtgtttttttaattctactactttatttcacttttgacaccctcccttattattctcgcctgccacttctttttaatatagcaattacattatgggacttctcctctcctctcccctttaaagcattagagaataatttgtgtgtctatgtatatgtgtgtgtgtatgtttgcatatgtaggtggaggggcggtgggttatggaaggaagctagagattgcgggaagagaattctgatggtattaggccttgagcaaaataggagtaaaataactttaaaccatttagaagcagcctctgatcagattccttttggggttgaagtggtaggagtcatttttgtagaaggtcatcgatagccagcaaatgcaaaaacttttcttgctgatgagaaaattcaagaatttggttcattttttttttttctccctcctggtaaagatgcagaggaaagaaaaggggatcaaatgaaaggaacttacaaatcagttttacctgatgctatctttcaggtacagtgtgttaaggcagaagtaatgtggttagaccctatattatttatttattataatgtggatataagccgtagacctacaacaatataactctgacagacataatataagaagaacttgtaatgagaaatgacttttctttttagtcacttttgtgtattccatttttagtctactactagaattagaacaattctggcttttgagaagtgcaaagagcaatttggtcaaagctgccagaatgagaatttgggaaattttggtgtcatttttttctaacaataggagtgtctgtgaggattggacatgagagcgatttaggttatactgaaggatctggaaggggatttataagcggggaaacatagaaccttgtgaactaagagctgtggggcattgagctgggccgggtgtgggtgggttctgtacagtaggctgcactgttggctgagaagggggcattacctgcctgtgtgtttagttcactgctggtgccagacctattcacatggttttgcccctgcattctgttgacatccatgaactttttgttgtggttgttggcaaaattataaaaatacccccaaacgagcaaataaaccaaaacctagatgttgcacataatttaaattgg

SEQ ID NO: 56715 - DNA, 1022 bp, Homo sapiens
tgtttgatagaagacaacctgaccttttcttgcccttctagtacattccttatttaggaaaaatgttatctttgtcataaggacagccttgattcatagtagatttattcttcattatttttatagctttcttgaaatatatttctaacaccatgaaattcacccatttaaatgatatacagttaggtggcttttagtgtattgacaaagttgtgaacccattatcacaatctaattttagaacatttttatcagcctccttgccccctaaaaaaacccagtactttttaccaatcagtccatatttcccccttcacctagtccctggtaaccactaacctacttgctgtctttgtggtttttgcctattctggacatttcacataaattgaatcataaaatatttgatgttttttgactcatttcttctgtttagcacgttttcgagggtcatccatactgtagcatctatcagtacttcatttttctttatggccaaatactattccgctgtatggatataccacattttgcttattcattattcagttgctacagtaacttaaggaatggacttcagttactgttcacttaggttatttccatttttgactattatgaataatactgctatgaacatttgcttacaggtttttatgtatgaatatatgttttcatttctctggataaggagtggagttgctggctcgtgataactctatgtttagattttgagaaaatgccaaacggttttacagagtggctgcagtaggcacattttttaaaaacagctttattgaggtctatttgatatacaaaaatctgtacattgtatatatatatatatatatatatatatatatatatatatatatgcttttttttttttttttaagatggtgtgtcccaggcaggagtgcagtagtgcgatcttggctcaccacaatctctgcttcccaggttcaagcgattctcctgcctcagcctcctgagtagctgggattacaggcatgggctaccac

SEQ ID NO: 56716 - DNA, 1357 bp, Homo sapiens
tgatgcccaacaaatgctagttgaaggaaggaagggagggagaggggaaggaggaaaggaatcacaaataattcacctaaatctactttggatttacttatatttttagagtgaatatcttaagaaattatttccaaaagccaagtgcagtacggtgcatacctataaatcccagctactagggaggttgaggtgggaggatcacttgagcacaggagttctagtccggcctggacagcatagtcagactcagtctctaggaaggagggagggagagagagagaaagagagagagagagagagagatctaaaagtagtattgtctgcttgaaggatactagtttgttcatcttatgtatgctcttatgtgatgtgtcgagaattagaagacaggatggaaaagcctcttagatctcttagatctattggatcactccagttaagtgctcagagagaaaggtttctggtttggatcagcatgttactgaatggggagaagttcttgaatagctctctgttttctgagttaagattttgtgttttggtgtgtgaagagtaagaggggtatcatggagtagatgggggtgaggtagaatgggaggtgtgcaagagaggacacctgaggaccgtgtgaaggcaagtgataatcagactaggaagctggctggacacaaccttccagtgggagaggcggaggtgagggggcagctgcttctttaactaatcaagggctcaggttccagtaccttccttttatccccatccacagtttggcctgtctcttctcatctgcaaaatctcctcttttctttttccccctcttttaaaagctaaactaattttctgtctgttcatgttgaccttttgtccagttttcctcccatcagatgaaccaaaatactagaaaaggactcttccatctactactactgctagtaataataatagtaataaaataaataaaaccaggaagctaaaaatggaaattaactaattaatttgacatcaatgaaagaggttgtagaactggaggcaagggaaagaatggaatggacatctttctgggcacactcctcactccttccccaaccccttccaatgtgagtatgtgtaatttaaacctcttcctggggaagagtgaaagaagaattttacccacctttttccattcccctcctcccttagtgaaaattcctagtcatggtctgtgatatctcaaacttggctgtcactttttggggtcattccctggggatacccttcccccaatcccagggcagttctaatgtttctgagtaaggagtagtgagaaactcagttttccctgcaaacttccctcctcatcagccccactcag

SEQ ID NO: 56717 - DNA, 1050 bp, Homo sapiens
tcgtagagacggggtttcaccatgttggccaggatggtctggaactcctggcctcaagtgatctgcctgcctcagcttcccaaagtgctgggattacaggcgtcagccaccgctcctggcccccagttaaatatttctggaaaagagttctgttcacaaaaaattttggaatcaagggaaaaccttattaattaagatctttgataatgtggattctaaataatttcgggctaagttgaatgaaaacttaccttttcacccatgaaaaaaggagctctgtaactatattagtagcacaaacgggttcatgtgaatgtttaccctgcttaagagagtaaacttttcagagttagcagcagcatttgcatacaataaatgttctaattactaatgatccttgccaattaattaaaagtatgtctgtcatggcgctgctttcttggcagtgcttttattgatgatgagcttgtgtgcatattaaataatacagtgacatttctttttaatgtttcctaacccaggctttgtatggcagaacattctgttagcagacttgtgcaggttttcctatcctacaagtagagaaatggagagatccatgccctaccctgagcctgagagtaacttggtgatagtgtctgcattctaacccagtgctcctgtatttccttggattcttgtttcttgtgagcctgtaaaggcatttgcaaagttggggccttctgtgaacaggggtgctgtggcactgcagttcattgcagtctagactttccacctcccctgtggcacttttggcaagttgacaggtataattgatgagttattctaagaatgtgattcctgagtaactctagagtggagtgactgtgtttctgagtagttaatgtggctggggggaaaggcagatgaaggggatgggggttgggaagctggagggaggtggggaggagggcctttgttcaaatcaagttgtgttcaagtctgtggttttaagagagagcaacagcgattctttcctagcatatgaaatcttcacagggctcatagttt

SEQ ID NO: 56718 - DNA, 1011 bp, Homo sapiens
cagcttaccgagtagctgggattacaggcacctgccaaatttttgtatttttagtggagacggggtttcgccgtgttggccaggctggtctcgaactcctgacatggtgatcctcctgccttggcctcccaaagtgctgggattacaggcatgagccactgtgcccggccaaaatagagttactttaaatttaagtagaaaatttaaaatttttaattgccacattaagaaaagtttaaaaaaggtgaaattaattttaataaaatattttccagtatattcagaatactatttcaacatgtaatcaacataaaaatgttaatgagatattttataatctcttttgtcctaagtcttcactattttgcatgtattttaccaatttagaccagccacattaagtgctcagtagccacagtggctagtggcaaccttactagacagcacagatctactccaaatatttaattttatagatcaggacactgaggcccagaactgtgattaactaataagtggcagaaatgaaacacgtctccctccagagctcttttcattatactgtcttcactctactgctttgaacgtgaagacaaaagaacccggtttctgttcatacttttatatcctctcttatgcagtctatagcctgggcttggaacttagagccttaacagactttaagacagtaccacgtctgaacctagagttatattgtattctttctattagcagagagctttctgattcctaagaatttccttactctacaagaaatgggatttctgctttgcaaagttcccttcagtggaatgaagttattgttgcccagagcttccctggtacaactctatggacttgggcatgattctccctaaaaatccgtggaagccgtgatcagagcccttggaaaattgctctggtgagccaagtgggcagtggcagtagagcagttttcagtagtggtcccacggtggcaagttggctgtgaagcagttgaggatgacatga

SEQ ID NO: 56719 - DNA, 1729 bp, Homo sapiens
atgatcgttgtatattcactggcttcaagaaaccaccagtgggaaatcttatttatggagatgatggttatggttatgattattgacagccattattataaacatcattattatttagtgttaatcaacaacaggatgaaaggtgctctaaagaacacagaattagaccctgtctttgcaaatgggctcataagaaaagaatgacagaaagagacacccagcctgggctagctaggaaaaatacgttttagggaaatacagctgacaaaatagctccaaaggttgtaatttttagggctttggtggagttcaatatggtactctgaacacagaaaaatggaaagtagaatttctcagtaaaagaaagtctgttgtttcagtccagttttactattagagtgagttgtaaagaacaagtaaaagggaaaaattggatatgtgtttttgttttgttttattgccctgcaggtcccctctttttttttttttcttggtttctcaattttgaactttaatgcattaatacatcaggtatcttttacaactaaagtagcccctgaaatattttctgtgcagaaaggttaccttcaagtgcattagggtctcacattgacatacaaattcaggtttgaatccttgcaaaatcacatggtaaaatcgggcctcatttcctacatggtaaatatgcactctccttgagatggtgcatgagctttctagttcatcatagtccctcccatgcaaacaccttactcattaacttttatatgcctgttccttacaaaggcatttttagtttcaacccatatatttagagcagtggttctaaccatgggtgatttgcccccaggggccatttggcaatatctggggacattactggtttgtcataatgcaagttcatttttatgtcatatttttactgtgtactttttgcattttcaaatgactttgactattgccagagtcattatagacctgcctatgatgtaggagtttattgtatctagtggaaaacatacctgtttgtggggcagaagcttctgttccattcatcctgattttagacacagcatttaacttttcaggttcagttccatatgtataaagtagggataatagtgacatcctagtgtattaagaattaaggtgttattatttctgtcactgttacttcaccctaattttgtttccacactcatctctgagcttttttacttcttatgttgttcagtgttttctaaattaaaaaaaaaaaaagaaattatccaggaggaactccagggtcagagaaatttagttccttggccaaggccacaccacaggtaagtggtacagcgtggatatgagactcagtctcctgaattggatcagttacttgcatgcaccctgtaccctctgtctttatttgggttggaaccctgggggttcagtgatcctgttccaggatctacacttagcttggacttcttgttggttttcttatgcttatttttgttttataaaatgctcaatggtgtaacatttcctttgaggaatcgttattcattaaaaagtctgaaaacagtgctttaaatcatgtctgcttctttttgtacaaccagttacctcacttcttcagccaggatgggtttatgtggcccctcagggccttctaagaagactatcttccctgtcttttgtggaaggaacagagttggttgttgtcccctagaagggtggtcatctc

SEQ ID NO: 56720 - DNA, 3373 bp, Homo sapiens
ttgagcatttaaatgtgtagggtgctgggtttatgtactcaaggttgcttgcggggattatttagctggtttaaataaacaaacttttaaaaggctttataaagtaaacaacatctatttgcataccaattccaatttatactctgctcaaaaataggtctgatggtgcctctttgtggaaacagtttatcagtagttagagtttatgtctcataaagttttaagattttatttttcattaaaattctttgaattcagacacttttggtaattcatgccttccctccagtttccctagattgggtagattttcctggagttgcactctctatttttataataacataagcatattgatgatagtgaataggcaaaaggctgtgggtagtgtaagagcaattcttttcagcttcaagggatttttaaaaattctttcattattcaagagttgtaatttgttgtgtatatttaaaataactctcatctttcagtctctccaataaatgcattctgctatatggccaggtgtggtggctcacgcctgttatcccagtgctttgggaggccaaggcgggtagattgcttgaggccaggagtttgagaccagcctggccaacatgatgaaaccccatctgtattaaaagtacaaaaattagctgggagtggtggtggacgcctgtattcccagctcctcaggaggctgaggcacaagaattgtttgaacctgggaggcggaggttgcagtgagctacgaaaattgtttgaacctgggaggcggaggttgcagtgagctatgagaattgtttgaacctgggaggcgaaggtttcagtgagctgaggtagcgccgctgcactccagcctgaacaacagagtgagactctgtctcaataaaaagcattctgtataaatctatgatatctgagaatccgatgtcgtatttgcttattgtctctctttcctgctggaacataagctccatgatggcagggactttgtcttgttgctgtatccttagcaactagaacagtccctgctgcatggtagagtcttcatatttatttaatgagtgtatgaaacagttcattctttgtgcatggaaacatgatatttgcacattttataagatatattacattaatactaatattaatactgccttacatataacaagtttttttatgagaggaatttcagactcttataaaatcatttatttacagaagatggtataactaactctgacatgaggtactggggaagtatttcaaagtgacgttggaatgggatttctggatattgcaggatgcaagaggttgctgaagagcaagtttgtggcacaccaggctgtgagagcaccgcatgggcaaaggcccagggtcatatgatctgcagggccataacaggagtaagtagattggggtcagattatgccaggcgaggaattttatcttgaaggcagttggggactattgaaaaatcagaggacagtgcaagggaaggggatgagaggtaacaagatcagatttgtactttaaggtaattttggtgtctctgtggaggatggattaaagtgggggtgagattagaaaaaaatgagctagaaggtgagagatggtgtagtaagtgggatgaatgagtttaaaaagctatttttgcgattaaatttaagcaatttgctaatgggaaggtggtttgagggagaaggaagagttgatgttaataccaaggtttctagtttgtaagtgaagaatagcaatgtctcaaaggatatcaagattaccagaggctgaagaaagctactgaggaaggttagaaggagagagttgacgagttagattttgagtagcctgtaggatattcaagtggagctgtccaggaggcagttggaaatatatgactgaagcttcagagagaggtcagggctagagacataaatttggatataatcagtgtgtaaatagcgattgatgccgtgagagggaatgcagtgatccaagagagcctacacagtatagaagcagaccagggccaaaccctgagaaggccaaatatttggcaaggtggttagtggagaggttaagaacaggattatcagagaggcaagagaaaaatctggagggagtagcatcttaaaagccaaggggagtttgagaactataggttcatccgcatcattagatgccacagccttcctctgggctcttatacttctatcttaacatatattatgttaacttcatgtattttctatcaggttttcctatgtctgtgagctctgtgaaagcagggataaaaagtgtttcatctttgtgcataggccagaaatggcaaataggtttcatttcatgttccaagtctgagtattctcagctgagtccagagtctgcagagaagagtgccttcatccattagtgatttctgattagtgatttcaggatcagggactgatggcaacttgccctgtatttctcatgtctgcattaggcacttattcattcattattcaacagatacttactgagtgcccagcatgtgccaagtactgtgccaggtgctcaataaatgtttattgaataaatgttgaatggttaaaggaaggctcgcaacatcctttagaaggaatgggaaaggacctgagtgaggtgagccacctctgagagcccagctgaggccattttcagtgttgtgtgcctcaggtcatcctgccttccacctatgcggagtgtactggttaacacaaagtctctggtaaaagaatgccagattttaatgatttttaacaaaaatactttccacttttgtaagtatttaacttattagtgtgcacttgcatctcacttgatctttgcattaatccagcaagagagataggccatatgttgtcatctctattagacagatgaggaaatagagatatttattactaaaaatttgagtaagaaagcaaacactgagccagaattggaactgaggtctgactcccacttctaactcttgagagtatggctcagaaatgggcatctctagtcacaaaatgtggctgagctgtttgggcaactagcagagctggacaccttgtgattcagaggggctttcccatggaatgcagggggccacaggcagcattttggatggtacaaggttggtaggaggaagagaagaaatgattggctcccagaggcttcatgggctcccaattcatgattctttctctgtggctaatttttgttaagtataagaattccaggaatctcttaggaattgtggagactgctttctcctgaaatataaaacatctgctcttggtctctttggagctccactgtctgaggggaaaacagggaaaaagaggtaatataaaacagacattgt

SEQ ID NO: 56721 - DNA, 1084 bp, Homo sapiens
cacctaagccagtgactggcacgtagtaggcactcagtctttctttagttaaatacaatgaataatttaatgttgggggggatatggtaaaagaagaagaggagagttggaaaactcatgggcatcttcaacagacaggagccccatgactggggggtgtcttagcaaaaggcttcctggcgtcataacagaagtagtcacagaacccccaagaccggaacctgttacaccagagggttggtgcacattcacgatgccctctgtcgaagggccccaccttccatgcctgcgcgtctccttttgttctgtcaggtttagcattgaggcaattggtggccgccgcctcctttgcctcatctgccccaaatccctgcttgccatcagcccaatgcagcaggctctggtgccaaccacaatctccccgggaaagagatttgagggactggaattgtgagagaaatgtaagctctgagcttgacggtggtccatgagcccctccccttctcacctttgaagcaagaaggggctggttccagggctctgtgggaaagctgctttgaagaatggtgaacttgggccacggggcatcattctgctttagttgagggggtccctgttgggttccaaagagaatgcggtggggttaacataaaagcagagtttagcagtgaggaacccattggtctatggcctgctttcttaattgttagtgaattaagccaggaaggcactgggggtggctggggagatcctttgtaagaggttaaggtcttcatagagtgatgataggattagcaataatttggtggaaacaaacaagcagaataccaggagagctacaagcgatcggttctgtactgtgtccctgtgttctctggttcaccaaggaccttaggcctgttgtcctaaatgatcacagggctggcatcacccttgctgtgatgggctggcaggccaatgtgcttggccctcctgccaaaagtatctacgcacattctgccatggatggtacatttgcatgctcccctctccttaaaatctgagctgggagatggggaagaatgaaaggagaaaatcaaattaa

SEQ ID NO: 56722 - DNA, 1267 bp, Homo sapiens
catcaactcccaggatgaccttcctctggtatttctgtggggtgtctgttgttggggaagcagaagcacaaagcagaagaaaccaagcacagttccttgcccagaatcactcgggaggcaaagtacaattccgttcttccttatgttgggaccttcggtgattgggtcctccttgtgtgtggaagtacatgaaagaaggatagacaaaattagagcatgttttcgagaccatttggttcagcctctctgattttacaaatgaggagagtgatgcaaagtgtggttaagtgactataccgaggacacagacctactttatgacagaggcttgggagccagattttaggatgccggtagttctaaagtatctagctgtgctgccgtctgaatttctggttcactccatcaggtcagcccatagacacctcctttttcttaggtcggacctatcttattcgtttcctcttttgttctctgcagctgccacccccactcctacctcccctattctctatgttgacatgtgacttggggcacttgcaacgtccctacctaaaattgatgtttgccacctggctgctgactggtgcgctatgctgcttcactctgcctgtttcaaccctgtgaaatatggaagcagatcataaaaaaatggactcccacacattttgcagatctaaattgggccttaatataatgtacttggttatgacaaacaggttttctagggcatgaccggcagcttaggctggcttccctggtcatgtcagttgaattctttttttctttttttgagttgggagtctcactctgccgcccaggctatagtgcagtggcatgatcttggcttaccacagcctccacctcctgggttcaagcgattctcttgcctcagcctcctgagtagctgggactacaggagcctgtcaccacgcctggctaattttttgtgtttttaatagagtcagggtttcaccatgttgaccaggctggtcttgaactcctgacctcaggtgatctgcccacttcggcctcccaaagtgctgagattacaggtgtgattcactgtgcctggcctcagttgaactctttaagattattcaactctttccttaattcttaggtagtcaggattcttcaaaactttatgtttctctgggagtcaaaggaagtttatggacacaatttctccatatagtagcttatttctgaaaataagaaaaatgagtaagttggacctcatttctttttctaacaatgtgtgggt

SEQ ID NO: 56723 - DNA, 1028 bp, Homo sapiens
ctgatagatataaaagaaagtaataataacattcttttttttagaataattttttttttcttttcaggcaagtaactatttgttcaggtgtaatattcctgattttatactgtggtgattccctatagatgacaactgctcaaactctagccttctaaatgttaggtaccaaattgacctttttgtaatcaatttgtttttatctagctttattaacagccagccgccgcaccgttgattggatcgacgaggtggtgatgtgaaacaatcgctaaacgtggccaaagtaaccagactgacttttgtgtggtttttgttttctggacaaggattctgttagttagaacagcatttaattgtgcccaccacaactaaataaaacccacgagacagttacaaatgaactgtcacaagaggggaggagtgaagtagaaggagccagagggagagcctacaggccttctgtgaatgaccacaaaccctctcgactttgggatttggcctccctgggttggatatgcctggaagggtcgcagaggttaagagccaggagtctggggaggccagggtattgtgtttggttacagaggtgccttccaggtgatcaccatggaaatgcctttcactggggtctccagagatgaaaaattcaggatatgtctatgtgaaatatggtcttgtaaaccatgggatagggatgggaaaagttggcttagtctctctctctctctccacctctggagtggcagctgtgtgactccctgtaaactttcaaatggtggttcttcatgcccggggatgattccgtgtgtcaacaagtctgggcagtctttgatgtagccaccagcgtctaggccaggaggcacactgctgctgcctggtgccctcatgatcattctctgtgccttctgctgccctctcagcccctgggtctccctccccaggtcctccttactcctgctcctgtgacgaggggtgggaagctccgtttactgatctatatattattgtgttggtgggaaacactg

SEQ ID NO: 56724 - DNA, 1052 bp, Homo sapiens
atcagtttaataggcattggttgatttggattgcaaaatataggtgccctgattagccctctatatggacttgcgttgttcttcagccattcaaaagctacctaattatgaatattgaagtataatgttctggcttttaacataaggcacttaccttttaattggccatcagctttgtttttagcgcttatgtacctccactgggattcaaatgaaatggggagataatcaaccagtaagcagagaaaagggtaaaatgatcagggataattaagtggcagcagggaaatttagggttagacaacagggagagaaacaaaagaaggaaactcacaggaaaccagctctctgccacactgccaggcacaccccttttgaaaccacctttgattccctctttagcttacaggtgggacacatatagactttgtggctgacatctatcagcttgagcacaaacttgattcctccctgcgcctaaactcagagccaggcagagggtggggcattggatcttcactgcacaaacttggcagaggaaaaaagaccattaagtgaaggctaattggaatctgccccaaactgcactttgttggagctatttacaatatctttcaagcagctgacttacttactgggttattcagtgaaggggcagtgagtgaggggatcggtggggagtgctcaaggagaggaaaatgacctatacaaggcagtgggtgctttcttacacctttgaaaaattaactcctacaccatcttagtccttggtacaaagcctaagtactcgccttgaccacagggagcagttcacctcccttgggtcatgtgtccctttattttctgaggaaatttatggtctagttccagaaaattagcctagatacacacattttttttttccccatggaatttcaggaagctgaggaactcctgaaagaccatccatggatcttctagttttttcaggttaaaaaaaatcctgtttttagatccagaagtagggctggaagcaatttttatacataattgtggagagtgaagtggagaaa

SEQ ID NO: 56725 - DNA, 1532 bp, Homo sapiens
tggtggctctgcagtcttaggctggcctagttgcccatttcataagccacacaaggctactggactgaaataatcatgaaacaagaggccatccctcttgttgcacagtctatctttttggccataattaagaatcattcacgtccagggtgcacatttagccaatggagtttcttaactcctttgagaaaaggatcaatggacatacctgaacagaaaggtttctgtggttccataatgtaagagttccaagtgcacagaggatgattcctgagtctgcccatcgaataggcatttgggtagattttttttttctacaatttgacttccatcttccttaagaatgagaagttaggaccagaagaaaagctcccatctttcacactaaatacgttctataaaaccaagcaactttgattcttcctccctgtaaatgaaccctggttgcatagcttttgatgtgtcaagtcaggtgtcagacaagctagagggtataggaaatacttccatttaggcaccatctaagtttacccagcctctcttctgcattgacattggctgtaatccttgtaaatgctgagtatactcttctttccgtgtgggcccaggaggcaaggctaggctggaagtgatcactaggtaggagaaggcgtcttgttggaaggagctggtgtaaaacagcgggttgccaggcctctgttcccagcgttgtctcttgtgaagctgttccaaggaagccacatttctctctgggccgcactgttgtgagtgcctaggatgcttccggtggatctgtgtgaaatgtcaagtccacagaggttagcctagaatctctgtgctgaaagactagcaggatttttggactccaaagttctggattgatctttttctatcgtaatgactagatgagtgaggttctcctgattgtttctgaggctgcttgttccctatgccctcagcctgtgaccaaggtatagctcactcggactgagtgcttccttgttcaggatgaattaagcacttgatgtgcacatgctgttaactcatctcccccaactcctttgaattctctacccatcatgtacttggccactttcctgagccaagcacttcattatcttcttgtcctgtgagtcctaatagatatatttagaaacacttctatgaaatatggaatccaggcttaaccagctgtttgaaatcacaacccacaaccactttgctggtgtgtgctcacacacacacacacactgacacatgcttgctatacatacatacacacagtttccatcttttttttttttttttttttgagacagagtcttgctctttcgcccaggctggagtgcacttggctcactgcaacctctgcctcccaggttcaagcaattctcctgcctcagcctcccaagtagctgggactacaggcacgtgccactacacccggctaatttttgtatttttagtagagactgagttttgccgtgttggccaggctgatcttgaactcctgacctcgtgatccacctgcc

SEQ ID NO: 56726 - DNA, 1008 bp, Homo sapiens
ctatagggtggaaaaatctcctttagtcagaattgaacagttttcatgaagaacatgttacaccatgtagaaacatgggtactgcagggcataggtggcactagcttatgggagcctgaattccagaaacttgattttactttttgtttaggattaaaatgccaaaaagagggaggcttgcagtatcacacttcaccaccaggtaaagcttttagaaacatatattcagtgtgaaaatgccccaagtttgcagcttcttgacggataaagacagttacagagacaaagaaagttagtgttttatgaattagtcctctactcttgaagtagtatagcttatcggcaatgaggtacatttgtatttttttctcggctgttcttcctgaggaaatacaccatgttaccattgaggaagttcttcttctctctttccccgtacatttttattgtacgcagaaagacagaagaaggaagccctgaaggaagattgtgtatgaacccaggattctgttattacgtctgatgtttgtttctagttaaaaatgagaagtaatttttgggagggagacagaaatgggaaaagtttataagcgagccagtggaaaaagcacattcattatcagtgtctttctcactgagtcgtttgaaattggaaaattagcagcttctttgaagctcataagatctttcatctttgtgtatgtgagtgtgtgtgtgttaatactaagtggagattctttctcttgccacttatttggtttttctgctaataatgaaattataatgagatccctgatgggatttaaaaaaaaaaaaaaagaaaaaaaacaccttacatgaattatcccattcccccaccctccttctgcctttctgtaaaatctattctgcataataggtctttgtttctggatttgtgacagaattgaaggaggccaggagtcggaactgcccctcattgttctttttggtgactaggatacaaagttctgttcggcacagagtact

SEQ ID NO: 56727 - DNA, 2698 bp, Homo sapiens
agtgaaatcccttgggtttatgagtacctgacttggagaagaattataagaaacaaaatttgggggagaatttaaaatgtcattatttactttacaaaaaagttttaaaaattttactctgaaaggcttcactgcaggtttgctttaaattgctaagttttctagtcctgtagtcatctaatgagactataaatcagtttacaactgatactttagaagcatattttttgagtaaggtaagggatatagaacatgcagcatgacagtcccctatctcctgctctgggttgcaatggtctctttctccgagtccgaacagtcaccttgacaatccttgatggcagtagggagcatttaatccaactgtgaaataataaattagctgtggagtcaccaccagaacagggaatcctggctttatgcacctggctagtttgcactccctgtgaaaccatcacggttccttctcattgcagctgagctttctgaatcttttaagaactgaattgatgggatgtggaatttgatagccgataaattaaggatattggtaaatgtagcaactctattagaagatagcatttccaagatcagtagcaacatttgcttgcgttgtttgtgagtgtatctgtggaggtcctttatatctgtatctctctctttctctctctatctagatatatatgatatgtggggtgctataaaatttttagtgccttagtttgggttgaccgccttattactcacgagtgagctatacaggtcttccttaacaagtggcaataaaggctttacagcaccccttacaccgtcacatatttttgtttaggccacatattgtctttttctttttaagtctccctttgctcatgtccctctcaagtacctttgttgccatggcaacagttccatcgtttcttagggtagagcaggatgacatctcacgcaagattcttgaagtcagtgcttgtttggactgacctcaaacactcagctggggccagtgctgtggcccttaccctggtcatctgtgacactgttttctcttttttgctcgaggctctgtttattagactgccatgtctgtctctacattaatattggccgtgtctccatggacctgttccaaggaatggaaagaagctgatactcatgatctaaaattgaaaaaaaaaatgttagtgttaagcattttgagttaaatatggagctttgtgagtggttggatgcatagtaaatactgtggcaagatggaaagagtgagggcagctcatcctctgcatgtcaatgttctctttggaattccctcacgggctcagttttgacaggttaccatgtgcatttttcagtcctctctgtgtgtctttaagacccagcagacctaccttctccctgactcatggaatattagtcctaaaagggagtcacagaactgagtccagtgcactgattacattcttagggaaactgagacccaaaggggcatgtgtcttgctaagatcactcatcctttattggtgcagatgggatgaaaacccacatctcccagtcttcagttgggcttcacctttgctacaatttgttagttttttaaaacagaaattatttgaaagattttactgtcaagctaatttcctctcaagccactgcaacatttctgtaaaaagtggctgtagccatagtggagacctcatctggcaaatgtggacaggtggtgaggctgtacctccaaatttcttaattctttttccaacaagaaggttggcttgccaattctttgatcaaaggtaggagtttctgtaatctgttctcttaaccacatttgggatgcttgtatatatgactacatatatttatatattttttatgggcaatattttgactgtttctcttttgaaagacagtgcgaatgagtatgccaaaaatcacagatgatatgagaaatgctatcaataaaagcattttttcagaaaggtgaataaagtaaccccaagataacgtaaaatttttcctaatgttattttgcaaagtcattagaaaacctaatgcttgtgaccaatggggtgatgctcgtgggacagtacgtggctgacgttgtggttttcactgggcaaaataattcagatctacgagtcttttggcatgggcatagacagaaagattgcataatttgttcttggatgacgtgaaaaagaaccctgaatatatttttcgtttctatgcttccaaagtctgagtgggatgttttacatggatgggtaagatgggattttaggagacagataatgctctgttttagatcttcacttggtctttccaacttgtaggggtggtgtggtgatcacctatttgactagtggttatgctgttttcatatttaagctgcctgtagcaattcgtgatttgctatcagtacatctgtcaatctgtaatattacactcaatatcattcttcttttacccaaatatttggtaaaagagaaagctaacatgcactaggttcctaccaagcagataagatgagataatctatgtaaagtacatagtataaccctgaaagggattattagtcccacttgacagatgtggaaaatgagccctagagagattaaataaaatagaaccttctatgactaagtgactaaattcaggtctctgatttcaaagcccatactctttcctctgagttgcattgccc

SEQ ID NO: 56728 - DNA, 1108 bp, Homo sapiens
aagagtacagcaattaatgtgcatatgaaatccgtaagataaatcagctattgtagcacgtgaaggaaattaatacaaattaaggaattggaactgatttgggccatattcgactattttcatattaagaaacattattttagaagatctgtttggctgcagcggagtcaggaactgggcaagcagtgttgtgacttgcttgttccacaggcagagcctgggcagcactcaataacacccctcaccttcataggccatcagccgtagagaggcaaattagagcactggcataagccacaaatcacaggctgttgttagatttagtctgacccttagcatcattttatcggagtcctcttgaatttaatgtgattcccttcacaccaccccctctctggacaaatactaatattgttattgttatcgccatgattacttgtggctgacctaatacccttctgccctgaaaccacaggaccttgccgcagcctaggcattaatagccctcacagcacctcattgacatggctgcactggagttgaagttacaaagcaggaagtatcatttagtgcccctgctaccctcgcccctttcatctttattatgcagtttcttcttatggtgctgcccattttcccaaggaattaaagtcgcagatattttgatttcaggggagggtgagggggaagttgggctctgagtgtagagaagcaagagctggcacacctgtccttaggttcacagcacagcctttctcctgctggacacaggagtaggatgaaaagccaacatcaataaccttgagtatatagtttcataatccatgaataatttcaggaattacagatgtactcttagtgtagaacatgcagaatgcccaccgtggattcaacactgtgcaaactatgtgtttggggttttttctcaattggtggctttatatcaacctccccagcacacttatatctaggcttttataatgattaatacactaggaagaatcagtggtacggacacattggacatgtggtatttatggtctagaggatattattaccaggaactcattggtgctctccacaagtttgatgttggttgagcagtaaa

SEQ ID NO: 56729 - DNA, 1902 bp, Homo sapiens
ataccaatgaggttatcactttggatgatctcactgaattcagactatacttggaacgatgcttggagaattttctaaaatcctatggagagatttagaagaaaatgcatatgcccttgatagtattgacagactgctttccctgataggcagagccgaactctatatagtgcctcctaaaggggtcatttgaaaagttaacatattaaaaagttggaccaaagtaaaactgagagaaaaaatggattaacgtgattcttatgtgggtctagcgtgaaagcagcggggctggtcggacggtggctgaggccgttgactataagccaggggctcctgagttcaagtgcctactgggatgctaacttcctgtgggattttgggcatctgttttttatcgaccaaaggcaggaggtagggtgagggagtcctgttattcagtaggcagctatttgatttgctcaataagttgatgactttggccctgctgctgaggagtgacagattgtgaccaatgaggttaagatgactgtaggacaagtttgccctcagtgaggagaggcctgccaagttccactgacgtttggttggggaccacagaaagaaacatcaccattcaaggtatttggcccttattttgtcctagttcactaaatggcagatcctggggaggagattatttcaccagtggattcttcagaggtatgggggcagacagaacaggctttcttctccaaaagttcaagcttgctgactcaagcttcttactcatctctctggcatgtcactgcactcaggagaagatttgtgcaactatcaggtgcaaactcaagtatcaccaaagggatactttctgattaaatagagccatcgtgctctggggaccatctcaatatcagtggaatattgagggggtctattaatgtttatacgttccttcgaaattcagcctttttctttgaaagctgtaaggcagcagttaagggcactcgtactgctgctatggctgtgtgtgtatgtgatgggaaaggctggttgccaagcagcggagaatggacataatcatgctgcctagcaacagcggcagcgtggtcacttgcgcagatttctgcgcctcttcctgtttggtctgctggaaaatacagatggcttctatgggtcgctctctgccctagccatagtgagaggtaggaaaacattatgaaccagggtggaaaaatacacaagtgcatgttttaaagtgattcgtttccaaactgcctagggctgagcagggattcttacatagcattcctcagtttcccctttgaagatattgtgcactggcacgttgacttgtaagcaggaagaggaatctttgaaaagtgctaggcccctctgggtgctgcctctactgagcccgagcctttactctgcatgtgtgaatataaagccaccagttttctgataaagacacacacatacactcacacacactcacaccatgggtgaaaacgacaagtggagcagagcgtgactactgattgttctttgaggccggaggaacaaagcagtcaggagcgataaaggcaggtgatccctgctggtttgccctttctcccagctctgaccgtcaccgtcacacatgacattcttgaatgaggtcacctgctcactacagattctaaaaggggcttgcttggcaaagacctccagggtcagagtgccggcctttactgtttttggcagttgtgtgcatggaacattggaagcgtttggaacggaatgcttaaggaagatattatttggcagcaagaaaaagggagtgtgcagactccccctacccctcctgggatgagtaggtactgcctgcccgttttttctctacaggagttgaatagtagccagagtacaggcttggcatca

SEQ ID NO: 56730 - DNA, 1046 bp, Homo sapiens
cgatgtgatgacactagcacaaaggacagtttatagttattttctgtggttcctcgttttttggtgttttttttttgtgtttttttttttttttttagacgaaattttgctctgttgcccaggctggagtgcagtggcacgatctcagctcactgcaacctctgcctcccagggtcaaacaattctcatgcctcagcctcctgagtagctgggattacagatgcccaccaccatgcctggctgatttttttgtattttagtagagacggggtttcaccatgttgcccaggctggtctccaactcctgagctcaggcaatccgcctgtcttggcctcccaaagtgctaggattacaggcatgagccactgcagcggccggttccttgtgtcttaaagcaaacacaggcacagtattctgggcaaaccagatgttaatagcttgacctctctgtcaaaggaggacttggttgcttaagacccttaaagctgtcaaagttatagcttctccaggatactatcatcctcacccatttcttattctctttgcagggagagatcatctctcaaaaagctcccatcagagcaaccattctgggactttgagcagaatgcttaaggcagtggttctaaaattccacaccacctgttcttccagttgtgtcctctctgagctgcctctgacggtcacattccatggccatgtgccacagcagacttgtgatactgattttagtgttgtccttggccattgggggaagggaggaaggagagagaagagaaggggagagaagaagagaaatgggagtggggtccattcatccatctctcttgtcattaggggcccagcagttcccactatggtacctaggaaactagcttggacctggaggccatccagtgacctagtctgggccagtaaagccaccaggccattttcctgcttcggacatgctttctcagctgccctcccccttagctaaggctgaaatgactcatcttcccgtgccctagttccacggggtttcatctctgtgactcgggacaga

SEQ ID NO: 56731 - DNA, 1697 bp, Homo sapiens
ctctgctctctgcttggactggtgtcactgtgatcattctaaggtaacgagccaccttttattcttttacccagcccagttgtttcagatgaaaggatagagaagctggcgtctgctgtgatggagttgatgttttattttaagataaagtatagaagcaactgattgatggattataaactgggaggtccaggataaagcttcattctgagggcatcagtatatttcactgggagcctcctgggcattaattctgccgttaattttgttattagaaacctagccaaacaaagggaggtggcgaagcttgaggctggtttaaccttgatgaaacagtgatttcaccaaggatgatgttgccccatccatcttcatccatcaaggcactgctgaaatatgctaatgaagcccaaagataggagcacagagcagttaaatggggcgttgcagacgctctccctacccccgtgacagggtgatgccatttactctccagatttagtataggaaagagagcaatgctgacgtggtgtcgtggtggaagatagaatggaggctccacctaataaaaagaaagggcaaagttcagggtatatattctagaagaagatgggaaaacttggtttttggtgaaggggttggttttcttaattctctttggctcactttctagccagtccacacaagaaccagatatgtggcatactgcagatagggcaacatttttaagttccagaatgtgacctcccaccatgtgccaaagcaagttatttgttaccatgtcagtctgcagcactgtttgtttccaatggtacatgagctaataccttggctttatttatttatttatttaagttacaaccttttggatacttatgacatgctgggcatactactgaattattttatatgaattaatctaatcagattcttacaaatagccaacgaagaagcaaagttatcacatatattttatagatgaagtttgagaggctaaattcatgtccaaaattatgtaaccagtaagtggcatggttggggtttaaactcatgtctacctgactccaaagcccttgtacaaaatcactgtggtctgaagactcttatgtaggttatagctgagaatccctgataaccattgggagcagcttgactcacatatttattgcttgtatattctttgggttcagtttaactttaactttggcattcccttcacaattctttcttttgtaaatagactataagctctctgaggtcagcagccaagccctttctctaatctcctaaatgtcgatgatgtccctagtttctatgtggagtgtttacttttggcatcatgcttctaatatagggttaaaaaaggctggccagctgctttctggttttcatttcatacattagatgaaagccgtgggggattttacttgtctttacaagttaattctacaggattcacagttaaatttctgtttctttgaatttattggtggatccacttttgtttcctactagtacattacctatctagtctatatccaactgtacagaaaaaagtaaaccgcaaatgaaattttattattatgtattaaacagcatctttggagcagtctatattaggaggtgtgtgtcaaattctgctcatcttaggaccctagacagttcctctaagagagcctgccacccttcgcttacaa

SEQ ID NO: 56732 - DNA, 1073 bp, Homo sapiens
gcaaaacaattcctaaatctaaaacgtttatcagcttttgtttttttttttcctaaatggagataaagttggaagttaaaagcaaaaaagaaggatggattaaaaaatatttaaataagatgccaagtaacatgaattgcctgaaatagactgtttcaggataaaaactgtatcttggccttaatgtgtcttgtgccatttattaaatcagttctgaactttggggactccagactgttattaaagagttaataaccaaaggcttcaacgtccaggatgttgtgtgggtcagtgtatcttgccaagaggtaacatcagccagtggaatcagttgggctctccgtctggcagatctgtctctttcagctgctcctcctccagtttctagtcttggagttcatatacagtaaatctttctcttaataaagccgtttttcaaatctgactttggactagggactgctttttctccaaatgcaacagctgttaaacatggtgcattgggcacggtgtatatctctttgtttagttttgggtttttaatatgagcagagacataaaggagtgggaggactctatcgatttctttctacccatgagtcatccactgggtttggaaataaggcctccagcctcaaaaggcttctgggctccctgggcttctcacccttaaggatgaagcctattgtgccctaataaccagtacaggattcccccccttcttttggtgagatagaattgtagagctcaaggtgtccgccagcagaggccagaccttttggcccctatctgtcccatttacatggggaaaagcatttttgcccccttgctctctggtccttctgtcactgtctctgttcccaatgcactagggagcattaactccctgaaggggaaaaaagttcacaaaagaaatgaattatgcatatggaattcatttccttgatgaatagggaatctgaacaaactccatggctgtttgattttaaggcagaggagaaggggggcttagggctaaagagtatagtggggggtgatcaaaaagaacttggaacaagagaggtgggagaaaa

SEQ ID NO: 56733 - DNA, 1935 bp, Homo sapiens
catggccctcggaagagtgtggagatgtcccaggacagccttcctggtagtaaggggggcagccctacaggctcgggggtcccaccccaacttcaacccctgcacctttgtttcatggattttatttgcttgggtttgtgggaaagagtctgcttttaagtaacctttgaaacccagtggtgcagagaatagaccaatgcctagtatgaattatttatttgtttattaagattttcatggcaccttccctttcaaagctcaaggcactgaatgaactcttcaaactgatagcagttagcactaaaggttgaacaggggccgttggaggaggaaccactagggaggatgagaaaagagggaggaagagcagagagaagagcacggcagtccggaccccagagccaccactacagccaaaggaggaaaatcgtaaagactgcaggcttcccaggaaggaatccagccctgctgggaagttgttttgttatcagggaaagtcacttccttctgtcagcctcctccatgaaatcgaggtgacctagttgaccccctgggcccctcccaggtatgatcttttaagaagcctgaggagctttcctttttaggtgagcaggcctaacccttctgccaagttgttacggcaataaaaatcatcataaaattttttttaatgttatgcataaacctttcaataacaagtatatttggtacagagtggttttcaaccctggctgaacattaaaatcacctggggaacttttaaaaaatattactggtgcctgggatctaccctggaatgatgaaatcagaacatctgggggctggtgctgagcatctgtattttctcaaagcaccccagctttttttttttttttttgagacagagtcttgctcagtcgcccaggctggagtgcggtggcgcgatctcggctcactgcaaactccgcctcccgggttcatgccattctcctgcctcagcctcccgagtagctgggactacgggcgcccaccactacgcccggctaatttttttgtatttttagtagagacggggtttcaccgtattagccaggaaggtctcgatctcctgacctcgtgatctgcccatctcggtctcccaaagtgctgggattgcaggcgtgagccaccgtgcccagcccaccccagcttttgtgttatgcactggggttgtgaaatacccggggacctgggaaggctgacaataggaggtgagcttgagtgtgcccaaagaaaggcaaagaaaggcttattattaggggtgtgatttaagtgtttccaattaacagtggaggaaggaaacttaaaactgtactttgaagttaccaagctctaggttattcttatagtaagtgtagcccatttggcttgtgtaacttatttttcacatacttcaaggccaggaaacttcagaagtgtcacagcaagttctttggccacctcctcactagctggctcccactgaaagtgttagccacatgccagctaccgttgtagggaaatcacacttaggatattttacttgcacgcagcagagaggttgctgttatcctccccattttacagagaaggacatggaggcccagagaggctacataattttctctgggtcccaaaacctgtaaatagtagagaaggggatcaaacttgtttatcttactctaagctaccccactctttctactatacctaatgcctcttagaatgaccctggacttgttgatttgtcagctgcttgcccttggcgggagggcgtttggctttctttttcagataggagagaaaacatgagaggagaaatcagcttctgcagagattaccttagagattgagcaaggcagtgtaatgtaatgaaaacatgcaccagagcaggggcctctagccccaggggcaggcttgcaattagaactgggctaa

SEQ ID NO: 56734 - DNA, 2662 bp, Homo sapiens
agaaaattgtgggagggtccaaatgagtaatatgggaaacatgctttttgtttaactgtgatacctttggtatcacagttttgtgattgatgtgacttaggctgtttgcctctttcattccaagatgacacacctctgtggggttactttgtgttcattctggacctggatcattttcagggggtccatgctagaatgtactgcaatgtgggaacattggcctacagatctagttaggtcctctcccaccgccatgcgcttagtcacttcacctgctgccttccaaaacaaatgggctgtgtgtgtctccttcccttaacaaagtattctataatcatattttctagcttaaaacaaaattagtcttttagatgtaaaacacatctaaagcacttttattaatggatcgctttccttcagggattacagtgcttagtatgaggtgctgactcatctattttcatgccatatagggaaggaaagtgttaactattttcgaatgtagagaatacttttgttgggagtctctaaaccttaaacccaggacctgtttgacaaaactgtcatcctcccaaccccttgaaaagataatgccctaaatctatcagttttttccccccagtatgcgaaagtggctgttttctggtgttagttgttcctatgtgtggcttggagccatggccacttggcttcctagattgtgtcccatgaattcaagcataaggagctcccagtctgctgcacctggcctcccttgtccttcacatccctgcagcatactgtagcaaactttcaagttagctttttattgcattccaccccctgccagggagcaaacttaaactcatgcaactcaaaatgaccatgctgggtctgttctaagtttgaatttggaccttgatccagccttcacatactttctcttatgaattcctcttaatgctagttaataaaaatataatggctttcatgtcccttctcataataacattgccagctttgggggttctttgaaaactttgcttgagaagtccatggccaaaaaaaaacaaagatatttggctttaaaatatggtctttgcttaccaaactcctctctctgaggaagggagagaaagagttgaaggtttctgggaaaggggcatagaagcaactcttaactctggccatgtggatctgcagacaaaattagggcaaatgtagtgctacagatcccatccccgggcctcacattgtggccagccatatggagtcagatttggagactttttggagatggggaagccactggactcttaggcatctggtgtaaagagagactttttctttgctactttttttttttttttttgagatggagtcttgctcttttgcccaggctgcagggcactggcgtgatcttggcttactgcagcctccgcctcccaggttcaatagattctcctgcctcagcctcctgagtagctgggattacaggcacctgctaccatgcctgactagtttttgtatttttagtagagacagggtttgaccatattggccaggttggtcttggactcctgacaagtgatccgcccgcctcagactcccgaagtgctagggttacaggtgtgaaccaccatgcctaactatcgttgctactttctattggaagagaaggcagccctgatttagtctgtttacagtctgcattatgtggagaatagagagccatcatagtccctaaaactttccttgccagttaacccagcaggacaacctgtctttgtctcttgacaactgttaactgagaacagggcccttgctcctctaggtgtgcacattaaggactttgcacagtgtggatgtagctcatgctgctctgccgtctagtacatgctgcttgaattttcatcatcatcctccactccttccacctccaagaaaaaaaaaagcgtgcaggaagtagcatttcagatccttctccaccacctctgcttcccttctcccttcttttcctccttgcagcattccctttagtaccagggagggatggtggttgaaaatggggggaatgatgttgctcagaaaaaaaaaaaatcagcctagaccttaagaggtgaggggaaaggaaagaacacttcaagcatagcccagcccaggcatgtcagctcccaccccagcctccttgtacctcccatctctgaaggagggtgatgaattcggtttccaccaacattaaactgataaatgaaatttgtatgttaaaacaatgataatttaattgtattttatttccttctttcccatccacacttggatctcacccccctccccattacccacccttcagctttggggagggggtggtggaggctgtgcaggggagggggtggtggaggctgtgcagaggcgggggcattgcaagctgtcggtttgcattgtgcggacggggaaaggtctctacctggctcattttgtcccctttgcttaggctgtcactgctgacagtcctcatgtttatttcatctcgcgtggtggctgtctcgtttccctaccctccgatgtcattaacgcacagagagcgggccctgcagtgttgagcctaatgaattccgctgtggctgctctgctccccacctcgttaccaaagctcaaggtgtcaaattaaacccagcctaga

SEQ ID NO: 56735 - DNA, 1207 bp, Homo sapiens
gggcccacaaacccatactttaaatggcttggaacttacttgtttctttgcttggggctcattgtctgcttcattgtccttggctatttataacaataggtgtgacaatagaacagcctgttccttctttggagttttctgtgttagttatttgattttaaaattctgctcctttttcccaagattaaaatggaattttgtttctgataaatttttaccattcttttccaaacagtagagtcaactcaaggatatcacaaatcgggactagaaattgctggcagatattccgtaaacacagtgcattgggggtagggtgtctagctctaatatttgcattttgtagatggggacaatatgaaaaactttgtcactccactaagatttttggcacttagaatggcaagaaaatccaggttcccttacttataatgtagtgcttttaccttgaaccaaaaaggtaggatgtgcgtgtgtatttccagggtctctatgatttgccatttgtattaacagaaaagaggcccagtctttggaactctggttagaggtgacatcatggcaaaacatcaggcctcaggtttcattgattttaaacttactatgtcgtgtgattatctcatcgctgatggcctttgtcattaaatccactgcttcagctgggttgaacacatttgaggaggaacaggatcaagaaggtttttgaaagatatggacaagtgatgtgagaaatactggaatttaaattctttccttctttttaaaactatccctggtgatatctgtactttctaaagagtcaaaatgggaagagaatggtctgagagtggagatttggtggcatcacatcagtagttctactttcttctccattcccacacacataaacttcatgaaaataaactcagttatgtagcatttaaggcctattcagaaaggattcagttgtagtcagtcaatggaagaaccaagatagttaaccaagtcttaagcatttctctattcattcagcagcatttatcgaactgggtataagaaatagataaagccagcctctgccatcaggagcttgtgattggggagtaatgtgtgatgtgatctgtattatcacagaggggagcacagcatgtgatgggaatggaagatgggctcctagcgtggccttcttgggtcaaggatggcacgctggattggataactcagggga

SEQ ID NO: 56736 - DNA, 2971 bp, Homo sapiens
taagacggaatttcacttttgttgcccaggctggagtgcaatggtgcgatctcagctcactgcaacctccacctcctgggttcaagtgattctcctgcctcagcctcccaagtagctgggattacaggcatgcgccaccacgcctgtctaatgttgtacttttagtagagacggggtttctccatggtggtcagactggtctggaactctcgacctcaggtgatttgcccacctcagcctcccaaagtgctgggattataggagtgagccactgtgcccggcctctgaagtcttttttaaactgcctgtcttctacagagcaccatgctatgggagtgtggtctggctttgggagtagaaaagtccaatgttgagtacaacattgagatacatggctgttgggaccactcttaatcttccaaggatgaccaccatttcttgtagtggtttactgagacagtcaagacagtgtgaatatttctggtaatgttcagtgaaattttttcttgtgattgacttactgtttgtgtttgctgatctggaacttcagttgacctccttgactgcaatcatttgttttggttttgtgtgtgtgtttgcactgggctttagatttgtaaaacattgtatatagttaatgtgatgtagcctccctaaatctcagtgaataggattttacatggcatcaatatgcagtgaaactactatgattgtcatagtctaacatggtgtaaggacctgatgaagattttgtatgacaaatgaggctatggctgcctttgggattagtagatatatggaacaggaacaagaacaagaaggcatgtaggataggtattcaccataacatgaatagatggagattatatagacagttagccttcaattgcaggtggagaatggaattaatatggaacatttaaaaatattttagaaatgatatttttaaaagagagtcaaaataaaatgctttcatctgattatttgaccagaaattgggctgcttaatataatgaataattgttaggatctatcgatatggctactcagtggtaagaagtgccacataaatattggtctaatacatatataattatgtaactctagccaggtagctggattaaatatgggtaacagcaaaagcacttctgtcctgataaaagtctcagttacatttaaatacttaatataatcagctctttttcaagtaaacaataattcaggaggcaaatgttcagtacatctcatagaaattttttgtcttaatttgtttgcctgtacaatctgcattcttcttattaatttaatccatattttgaagtcagaaaagaattcatctcatttgagttagtttagatcaacatactgatattgctgaatagtttcacttccctgaaactaaacatatctattcctttcgtcttagacaaattatgaggggaaacctgtctgaaatttggctaacacatggtgtgcatttgatgccactggaggatttgctttgtcaatttaagattgagtgatggctatagaggaaagtgacggaaaaaaaaaaccttcttaatgtgaaatagaaagtataaaggacaataaaatgctaaaatgtacaggaaattcttgtaatatgactaataatgtatgagacttgtagagatcagttctgctacaggtattcttatgttatataaatgatattataatatcctattacatatattatattatcatactataccaagaatagataatatttttcatcaactggtgattcaagtgtgagtttatacatgggttgactgtggattgtatatatgataccaagcctgtgtaaaataaaacaaaaacccccttcaaactcccatatggagtatttgactaaagcaataatattaagataacatactctattccaaataaggatataatttgctgtttgataaagcaaaacaaaacaatggagtgtattggtactgttttccacagagtgggaagataagaacacatgtagagatgataaaatgtcattggctccaagagacaagcttccgaaatccatggtggttgaagaacatcaaagaggagcaattatttcagtcattagggcagttccacctgttctaattgaacatttttaggatgtagaagatgcatcatacattggtatctattcagaaggtggggacatctgctgtctgtcatgtatctgggagatgtttatctcaacaggaggcaataataatatggtaaaccaaacctaatattatcatgatgcattaaaactgggttaattgaagcaataaaatcaaagtaacagtaaatgcttatacaacatgttaagtaatatttacttcaatcttagaaatgaaatgataattttacattctagcagatgtatttcttgatacctgttctgagaggacagaaacaaggctcaaaattcatgcaagaggctaataacaacttagttgatagtaaaatatggagcattggatgtagagtgcattaaccttcttgtttaatctgagttgacctataagtgggcatattgttttttggggaatcgggagttttctcaagtagaaagaagccccacttttcctttgatagggtaccagtcaaggaaataaatgctcttttttctacctgagttagatttgcctttcatttgctcaccctgatctgtgtggctttattgaccactacagtttaagcccatgcaacctgcatgctgtgcaagaaagaaaggtgatggacagatagtcccagagttaaacttctggtgcctttgccactccatgtcttgccatcttatcatcatagtagctttgggtatggcctcctagcagcttcattgttatgcctgtgggcattcgtgtcccactgtcaggcagattctgggggactggggagccagaatgatgggtagcaggcaggtggtagatggggagacctaaagtccaaaagctagacc

SEQ ID NO: 56737 - DNA, 1052 bp, Homo sapiens
caaataattatattagcaaagtatgttgaagtgtgttggcgccttaaataaaatatcaattgccaggtacgttaggggtgaaccccaggccaactttcatagtagagctatgactaatcagatggtgtttaagttaataactcttcccagaagccaagtattaaagaaagtgaaagatggtggtcctttgtgtgggaatccaagcacctgctgaatggtgcctgattattttgtcagggggtttcaaacagtctccccatttgtgacaggtaaatcctgaaagagcaaaaaggctggattgtcagtcagagactgagcagccactttgcatttggtgagtttgttgaattacctaatattaatctacataaccaagggaagtgtctgtctgttcaagagaaggacatagatgtctcaactgaaacaggttaactgaggtcatggagttgagaaagtctgctttttcctcatcttcatataatgaagtctttccttctcattatgatctgacattaaccagcaggcggaccatgtctaggtgtcttgaccttttgaggttatgtggcttcctctgtaagatgagggagttttttagttggtgtccctctagtcatatgtctgtgctgcctttgacaactggtgttggccgtaccaaaactgtcaccacaattgggaagctgtgggaagccccggtacatcctttgtgttgccgccagtaccaagccaactctggattcccacagtcaggtgtgaccaaaccaaaactgaccataccaaaactagtcacaatatcaactggcacaatgtattagagtttttggcttgagttgaactcctatcatatgagacaagtcctggcatcattctgcattattctggtcgtgatggtatgtattagtctgttttcacactgctgataaagacatacccaagaccggacaaattccaaaggaaagaggcttaatgacttacagttccacatggctggggaggcctcacaatcatggcggaaggcaaggaggagcaagtcatatcttatgtggatggcagca

SEQ ID NO: 56738 - DNA, 1067 bp, Homo sapiens
gatgtgactcctgggtaccgttcactattcccacgaatccctcacctcccagaggatgtccccatttgcaatactcttggggtgactgtctaacatagtggtctctcctgggggtttctcaactgccacttggcgtctcagcccttcttccccaaagcctcaaaagctagatggaaaggaaagaggctctgttcatatctgcattcagtggacatattacaaatgctaacaaaaggcttaagtccattattattattattcttatttgttgtttttgtatataaatatgcctaaggtttcaaagatccagtgatgtatttagctaatgcttatgttgttataatgtactagggtgttcattctcagattggtctgagtaagaaaaatgaaataatgatagctgctctaagaagcctgataacagattctggctgatggagcaaatattctgctgcttgataaactcatagaactgtggggcctctgttattgctattttagtaatggaaatgtccctatactagtttccaagaatatcagtaaataacacctatgggcctaggagaggtgctgaagcaaatgtggaggatgagggacgggaaggagaggattcctgggagttactgaatttttaaattggaaagggttttagagactaagccatttgcctaaaggaaaaaaagtagtaaaaataaataataatttactacttgctaccttctactgagtcctaattatgtgctgaggtttttattagatcgtctcattgaatcttcacagaaccctttaaggcaggcaatgattctccgtttctcagatacctagactgaggcttagagatgttatggaaccctctttgtcacagagtgtgttctgtatagagctgagatttgaacccgaatttgctgtgaagcaccaagatacaccctaagaatagagcctgacatcgtgtctgtcttaggatggttctgcccattctagttaattgctttgaaaacttcattgctcaccctacccagactgacactgcttctgaaggttttttcaggccaactgctccatcttca

SEQ ID NO: 56739 - DNA, 1047 bp, Homo sapiens
agcaatttgtaagggatgggtatattatgcttaatgtttccccaccagacccgattgtgtcttgatttggggcggtggttcgactttgagggtcagactttactcctgtagcaaaagttggacaaatgtatacaaattctctcacctctcacacgccaacatcttcctccacccaccccacctccaccatgacttaggatcacctgagagagaaatacaaggtctcccagccagggccctgctgggctgtctcctgaggtgatctttagataggtgtcgataacagggagcctccgagccctgccaaaatcacttggccacagccccaagataatatttgaagttcttgtgctcaagagtgtcaaagtgtaacatactcttcccctttcgccttaccttccccaggcgcagccaacacttgacatctttttatcagatgagcttggcactgccaggaccggctcctcgcgccaatgtggcagcagccacagcccctcagcttgttagactgaaagaatgtgccgttttaattaatgatatgtaaatatccttgaatgggccgcatttgcatattaagagagatttgcggaatctgcggagtaatatattttaattaaggattaattaaaaataatgggaatttcatttcgcctggcagaatccgtttagattttagcacacgtctgcttgggagtctggtaggaagactgtgtgttacgattcccgcagatgagagaggcactcctgtgtttatcatcttggagccccactctggggagcaaagggaatataaagggggtaacattttcctcttacctcccccatcacccacccctcttcttccctcctctttgtgattttagggctgttttggtattctttatggtaaagtaagtaaatggctctgagacacggaacactagttgtgttggcaattatgttaatgggatgctattaggctatgattctatatgagcaattggggagaagaaatgccttactgagagagaatgatacaacagacgtctgtcttattgatatagctcc

SEQ ID NO: 56740 - DNA, 1623 bp, Homo sapiens
cagcccaactgggagctcatcagacagagcctgcttgcccatatgccttaccttccctttcttctccagaccctcttgtactttcaaagaatgaataaattaaattgaagagagtccaccgtggattcttcattattaatttgtttctttttatttatttttcatgcatttttcttactctggttgtttttctttctgtttttttttttttccccttttattcccctgttgacacaccacatatacagccctcccttctctctctgtgaacagctctcttccctgtatacgaacagtcatggagagtgatttctctgcagcgtgtctgtctctacatagatactcatgggtgtaaacacaccagagagggccactgcatgtgtttattgttgtactttttccctttgataagctgtcatcggtgggcactgctcaggggacttgatcccagtaatctctcgaccccatggaagacatttaacacccttccagaccctgtgctctgcctctgtctctgaacctttcactctcctttaatgagaatttctcctaattatttcagtggctgcagcagagggaccgcagtgtacttagatctcgatactgagacgtgactgttatgctgataaaggcaagagatcaataatttaggccccagctttaatggcaaagctgagagcttaagtgtctgcattcaggttgagtcttagaggttcttggagtattaataatttccataagattttttccccctttcttcttgagctgcagctgatcagcattcttgtacttgctaaattgtatttataaaaagatattcacctcctctatttgaacatatgtctgaatatcacataaatgtgtagcggcgtgcctttgcatcatgtgtgtacatctgattattcgcaactgtgtgtaacacatagcacatacagatttctgtttttgttcttatctggggagtgtccttcctcacattgcctttggcttttggactacccataatttgttctttcaaaattcatctggtaaatatgtaaccacttcaaaggcaggagtgagatgtcatccttttcctcctttcttttttttgttttcttttttcttttattctctgtctaatttctcctgctatcttaaagccacaattgtacttgactgaaaagggcaacaccaaagcattgagctcactcagatgtgggtgtccatgtgtatgtaatatagttctgagtttttatatagggtccttctttgagggattccagcaaacctgtttgaacccaagcaaatccatacaatacatacatgctaacagatatataaatgccatgaaaatgatcatagtatatgatatgttttatattaaggttgaaaaaaaaccccagcataacacagttaaggggctttcttggaagattagtcaccggggtgtttgtcacctatactaagaggtaaccagtgctccccagaaagggttggagtggggctgggagcgcccagaacctggatttctcccaaaggagacaacttgttctctagtgagtccaagcttcaggggccaccacgtctctccgctttcatcagcccaacctctctggcatttttttcttctggaaaattact

SEQ ID NO: 56741 - DNA, 1002 bp, Homo sapiens
ttttctttaatgcattactaattcagacaggcccttctggttgttctgaattggagagagagcagacacttcagttggatttggaatcatccacttttttttgcaggtatttcgaaaaaagcctggttttggtacagctcttccagaacccacgggaagaacctgttcatcagctcatccatccgtctgctgagtaaatgcttattgagcatctactgaatgccagcactgttctttgttcttggaatacatcagtaaacaaaataaggaaaacaaaaccaaacctcctgacctcaaggagcttttattttaggaatgatgtcttttagtcatttaatagttgctgtttttattaactcttaactgtacccataaactggatactttcaacttaaaaaaaaaaaagagaaactaattatgtgccctaaggatcaccaggccttaggttctacctttatttttcttctactgttaaatagcaacctcattcctcaggctgctgatggaattggtaactgagtaatcaggccactgtgctcggggacataaaacctgtggctgctgccattgcagagtcccgtcatggatcagagttcgtccctgggaaacaacttgtgccgacggaaggagttcttcctttgctcccctcatacctcccttccttgcagatgggatccttgcaagggcagagcagctcttagagttgtcaggcccttttctttcattctgcttattttcccataggcgagtactgctcagaacccaggctgtgagttttttgatgtggaaagctatttactaagcatgtcttgacgcagaggatggagggaaagaaagcctccaagagagtggtgattctacaaccatcatcaaattttggttgaaaactcaaagctgctgatatgtattagtaagcagataacagtaacatcctgtatttgcatggccctgtatcagtcaatagcattcagatttgtgtggtggtgtatagctttccttatt

SEQ ID NO: 56742 - DNA, 1028 bp, Homo sapiens
agcctctaactcctgggcaccagcaatcctcctgagtagctgggaatataggcatgtgccaacacaccaggctaattttatgtattttttagattttcatagagatgaaggggtctcagtatgttgctcaggctggtcttgaactcctagcctcaaatgatcctcctgcattggccttcccaaatactgggattacaagcatgagccactgcgcccagcctgtaattattctaaagatttctttcctgtttatgtacagaatatctaacagctatgcttacctttaaagcagccttatgaatatccttgtgaattccttaagctcaagggtcttgtttgcattttgtaggtatatctgtagatagatcttacctatctctggcaggtaacattatcatcatgttttccctgtttctggacactttgtgaaagcattgtagaaataaaagaagtctttattctttgacctctcttatgcattatgaattctgaaaaactgagggagataaaaggcaatctatgctttactgctttccctaagttttgagaagcaggcttaaaaaaatgctttaaaaattttagatgccataatacactgaaaatagggatctcaggtatttgaggcagaccaggattcttctttgaccagtcctttcactgaaaagactgtatttagatatttctctgagtgttctagattcatagacccaaatgacctctctgagcatcaagatacatgaagaagttacttcctgaggataataaatatgaaaagagaattatcaccctctgctttcagaaatcacttaaaaaggaagggagtgcttttcccatgaggttcctgagacagagtccttatgtcaccttgtattggcaaaaagatctggggcactgtgtttgacgatagcacttctttgttcccctcccgatatatttacagaatataatcctattttgcttgcactcatttccataatactgaaagtaaataaaccttatataacgttttatggttaagaactacttag

SEQ ID NO: 56743 - DNA, 1065 bp, Homo sapiens
ctgctccactcggtcccccttcccacctcttacagccatgaaataatgtgagagtatttgtttcccctgcaaagggaagagggtccagagacaaaagggaagttagtattcactggaagcctccctgtacaagcaacagtgttaggacttttatacacatttttacaattattacagcagttctcaattattgaaacagagggtaggcatttcccctttttcagaagggaaaagtgagaattaagttaattccaaagtcacacagctagtgagagaaaaagcctggacaggaactcagactgtatgactccaaaggctaagtgcattctatacacacaggccgccctcctggcagtgagagttcaggatctgttggagaaaacctcagaccatggttttcttgcagcttctgctggagaacattaggtgcctgttcccccgtggtgagtgttacaaagtgcagcaccacccaggggaagagtctgggccttggagttagacctgagtttgaatcctccttcagatatttactattgatgacattggcaatcaatgctgctgaatttctccagccctccatttattcatctattaaggggagagctacctacagggcggggaacttacaaggattagatgaggggatatgtgtaaaggcctaacacccagtaggtgctcactaaatgatgttccttattattatggtgattaccactgtactcttttcagatgaaagtgttcggtcacctggaacctgtgagtatgtggtttttgatctgtgactaaactgttcacccatttcccagtttctctgctgtgtcaaatatcaacattttaccaggtttctctgttgttgccaaacctgtcatttttatttggtgtggcttcttgggaaacttccatggcccatttgatgggaatcaaacagagtgaaaacaaggacagatgcagcagaggtggcatcaggaacaaatgggtcataagaacttaccttggcagcagccccagaatggtcaggaggaaaggcactttaaggtatcagaaggtagaaaggagaggttggat

SEQ ID NO: 56744 - DNA, 1016 bp, Homo sapiens
gagcccttgggggtcgaggctgtagcaagtcatgattgcaccactgcactccagctgggtgataaagtgagaccttgtctaaaaaaaaaaaaaaaaaaaaaaggaaatagtttagtgtctagcttctggtccacttgtactggtgttgactatgtatcagcccagcttatgtggctacagggattctcgttgcacatctgaatgaagccaaaaacatacgcaaggttttaagagtatttgatgtcttattggcaatatgaggtggaccagccatacagttagtaacataaccagcattggcttctggcacttagttctgagttctttccgaagaacttatatatgcagaaactggacttagcactcacttaaagaagaaataactttgataagaaccaggtgggttgttctttctctttattggtttcatgttttcagatcttgctaactctccccagctgtgccctgcagtggagacctatttgagactctgttatgatatgcccaagataccacacatgccctaggctcttcccctagcgacaaccatggtgctctctaggaactaatctttgtggcaaagacctttgcccgggggacacctgcctctcccagctcttttcccctcatgtcaaggaccatgcatctcatgctatcttttcatcgtcattttctcaaccttagggctttatctttgaaacgtgtgcatccgcctttagacactttatcattaactggaaattactgttcagatagacttgaggataattattcacgttattaaaaaacattcctcagttcggtaaagtatttggtagcaagctcctataagtagagagagtttctgatgtatttgagtacagatcaattacaacttgaaggagaggttggtgcattgctgaagaacttttaataaagttgcaggtgctgtcagaaatggaaccatacctgaaaaataataactgaaatttcttcagttccatagcattgcaaaacttacttccgcatttgctcat

SEQ ID NO: 56745 - DNA, 1290 bp, Homo sapiens
atcgcatctgaggcctgccaggagactcttaacatgctaacctgcttgctatacccttattcaaaattctttgatggaggtcccattgtcaaaagctgcagtcctgaatctcaaaactgttgtgccatgatcagttgtgaagtatgtcacaagtaattttgatattaataatggttcaagacctaaggtttgcaaattatttaaaattttaagctaagtcaaattatcaccatataaatgtcactttcgctcacttgaattcccatatgctttctttagtggaagagaaagagtggcattacagtctgctgagaattattcattttggtctgtaggatgaaatctaaactcctttgcataacctacatgaaccttgtgatctagtccttgcctacttcaccagggctatttctcaccatttttttctatctcatcatatgctacaaatatactgagttacctgtaatacctaaaacctgccacttctttcttatacctttgaagattgtctcctactagcgatttcttgtacctgttatcccctaaaacactcttactgatcattcagatcctggctgaggccttgcctgagtatcctgacccagttctagatattcctcttcctttgtatccactttgccttgtatattccttcattgtagcttataataattacatggtgtttttagcatgttcgtttccccgttggactgtaagttaatgccttttcatgttcttctcccaatttttagtacatggctgaacatatggtaggtgctctgtaatcttatccactggtcccaacattcttcagaatcaggcaactttagtaccacatcataacttaatagataaaagcgagagagccctggacagggagtttgagcagctagtcctagctcgtctataatgattctgtggcccttgacatgttacacaaaacttatatctatctcagtttctatgtgtatggtctgtttgtaggacttccctatgaaatggtggtttagaccaagttggaaggtgtgcattgattggaaaatacaggaagtaggatagagtaggcaaagtgaggcccatgtgcttgccattgatagtctgtcattgaatgtctagctgggagtaataaatggagacccagtcgttatttgagcatagatgacatgttctgaaattagattgaaggacttctcatctggtaaaaatgtgccggatgtactagagtgtagagagagtgaagaaacagatttcagccaggagacaaaaggatctgggatctgctatcttggg

SEQ ID NO: 56746 - DNA, 1056 bp, Homo sapiens
tacttactaactgagacactctcctaaatactctcaagcattcactcaggtaatcctcacaaccacactagaacacgaggtaccacaactgcctccattttacatgtgaggacagagcacaggggggttttgaaacaaggtcccaagccagtagtcaggtctggcttccatgatctggaaccacagcccatgctatcagctatagcactacaacctcagaagagggggaaacttaaagaagcagtaaaatcataaaaaggagactcaagaatttaaaaagaccagcagactgagtctatacagaataggcatgcgtgctctcacatagcagcgggcctgggtgatcatcagcattcctaatgataaatgacgtgggtcacaaagaggaggccaaataatgtccaagatccctctctatctatctacctagatattttttaaaagaagctagatggaaatataacatgttttagaagattactatcgaaaatgatgaaaatacaaatagttttggtaaagctccagtaacagggagccaagctttcaaaagtgatttatttttcagtagttaacgtttttgtgcctttctacctgctcgtgggttccagagtctctgttgcctggtgtctccccgagaacaaagattgtggatccccaaagtacctccacctcctcactggactcctgctccagaaaagatgaccataatctaataatcactctaccgcatgaacagggtgtcacacatgtgcttgactgtgcctctacagtggcaggtagagcgagtgcagtgcaggaaatatcagcccttttctaaagcactatgaagatgaaagggggaggtggtcaggggatggagaggacggaggggaaatcacttctttgtctaaaagggaaatgccaggactgtcccttcaggtctgttaagtgtctataggatgtggaggaaaattcttcttctcgttgctcccacctctccccatcccctttattctttctcactttgtagaataatataaaaaagcccagcagaaagggagctgtgatgctgtcgtc

SEQ ID NO: 56747 - DNA, 1166 bp, Homo sapiens
tcattaccacgagcctgaactcatttcagctgagacgaccagttagccaacagcccaggcgtacatgtgacagcttgggtgtctgcccctgctggtcatagctaccgcttccgtcactggctgttaatcagaatatgagaaactctggccatttctactggctggactccgtgtgctgcctgaatccaggtgcatgcagagatgttctcagatctaagagaggtcaggaagggaaagggatgattcctcctcctaccttttcctaagtcccttctccacacatccaattgcacccatgagaaccgaaccaccatgttgaatggggtctggcattcagagcaacttccctacaaatctctttttattggcatttcctccaatttaaccagccctgaattgcatttgaatcagatgagagaaagagagggaaggagaagggaggaggtccctccctctcttggaaaagcagctcacaaccagctttatttggtaaaatgctgcaatagatgcttgtcagaaataatttattcctgttagctgtaatctgaaggaaaacagatacaagtcctatagttaaaaaaaaagtaaagtagtcttgctttcgctgacagtacaaaggtgtcatatacaagaaggattgacacagaccaaggggtcttgtgggaaatatgataataactataaagaagacagattattccccagttgccaacattcaaacctttttacagtcagttcaaacatataaaactttattgctctagcagaaaggggaacaatttctggttgcacagctttcccagggctgggtttatactgtctgtgttattgctctatagtggcattttaaagtttattgaacaagacttttacaattgaaggaagtatataaaactgtaaatttattagatttttcaggataagtgccctttgtagttgtgctcaagaattcggagctatgagaaactgctagttacaagacttattaatattaaagactgagagtacgcacattttataccttaactgatctcaaaaataatattattatattactgaatgtcagagctctgatactatagaattggatggatacacacacataggactctatgtaccagatgtgtttatttttcactggctaaaaagttagctttcgttatatc

SEQ ID NO: 56748 - DNA, 1648 bp, Homo sapiens
aattaaaaaatatattgttactaaacaagatgaattacaggattatttacttgcagaaatatctgactgttgactgcttttaaataaggtgtttcccccaaagaatgtaacatagctcaatctttaaaatttttcatataaattttggggatcatatcactatgtggaaggagatgccttgcttgcttacttaagcctcaggacatgtgtttatggatataatcacttatgaaaccagacctcatattctttttatattatgttatgattagccactgatatgtgtttgcctttttgatttttcacatgcatatgcagaaacatgtatatgtatatattatgtgactaacacagtgaaggatatgaaaagtatgaagacaattttgattataattttctcatttgacaagttcaattttgaggtaccatcaacttgcctttaattttcaatttgtattctagaattccttaacctcttcagaaggttttcatggtagatacatttaaaacattcaaataagttgtttatagcacctgttcaccttcatgctgcctgatgttattcaagtacctatgtgtgaatggcactttgatctggaattctgtgttaatttgtctagtggccatagcatttacagaaataagctaaaatgttttcaaaaggacttaaattgtaattggccttttggtttttgattgctgagttttggaattctatggttgatataaaaaaaatctagacacttgtgacttactaaggagtatcttgaaaatgtctcaattctgttattcagtggaactaccattctcttttgcccctatgacctctgatggctgagcggtgttagccatatactgtgtgtcttttcacctcttcttgccatctctgtgggtcactgggctcctctggaaacttctgtaggcagggcagaggtttccttttgtgtttccttttagaccatgccttaagaagtatggtgtgacttcctttattcactaaatgtctttctgataagctgtgcatgaattatatgattggaaagcaaatcatattagaatccactagtggagtctggctaggatatccattgtaatcctcctagtaagtcataagatctattcacaatcacccctttagttatgcacggtttccttaaatcataatatatcttgttagagtttttaaactactaatgtccattctagtatggtgatatgtatgatagctgtgtcctgcctggattcatgcagtcacatatatatgatatacctttttttgaacatatgacaatatgcatagcccctatttggtgaactgtcttctctacaaattatagccttggtgctttacaaggttaaataacacagtctctaatttaagtaacagtgagaaccaggaagatttaaacagtctgagtcaggcacacataaccctaccctcaaaagcactcatagctaagtgggggaatcttgctgaagtcttgttaacttcctgggtttcaaagtcccacttccaggtaccatggatgaggcagcaggcatgcaattacagaaaaataaacctttagtcaaacaaaagaagccactgaaagaactgaaaaccccttcctagtcccagctaaattcccagggaagatttaggacctgt

SEQ ID NO: 56749 - DNA, 1030 bp, Homo sapiens
atataccgtttttccattttctcttttcagtttttttctttcttataagaaagactccagatgttgaatttaaactgggggatgtcttcaatgccattgaatatattgagcgtgtaggcaggcagtggaaggtgctggtttttttcttttttttcctttttgttttttgagatggagttttgttcttgttgcccaggctggagtgcaatggcgtcatctcggctcactgcaacctccacctcctgggttcaagcgattctcctgccttagcctcccaagcagctgggaatactggcatgcaccaccacacctggctaattttgtatttttagtagagacggggtttctccatgttggtcaggctggtctcaaactcccgaactcaggtgatctgcccgccttggccccccaaagtgctgggattataggtgtgaaccaccacgcctggcggtgctggctttctttggtaaaacggagaaaagccttgagggtttaaggaggagagaggggagtaaaatagagaagaggatcaggaaaagaagaacaagttgaggatatttaattatttgaaatattgtgaaacatgaatattgatgagaaggatgaacagggatgactaagtgcaaggcagggcgtgatggcttaccttcctccaagtcccacctgctgttgttgaccccatctggccagccaggcgtgaaccttagtctagcaacaataggggcaacacagagtgcatctgctgctcaatgcagggagagatgcactcttcatcttgtaccttcttgctgtcaaccctttctctttttttcttctgctcatttcttaccactctgtttatggtaacatttgaggggggaaaatacatcaccctatgaaagaacagggtggctgctgactttgtaccaacagcagtgaaccagggcctagttgtcagcaaccaagacctctgctgacccagaagcagacaggtgaccctttcaccaaaacttcaatcatcagtcttctcttttctttttttgaaacagag

SEQ ID NO: 56750 - DNA, 1169 bp, Homo sapiens
ctagctaatgtcttattcagtatgaatagcagtggcgtttgggcagggaggtgatgagatgcctattaaggtaacagaggtgtccaatggaacattgcttgtttagccttatgacctctgtccaagggagggcttcctctgtactggaactgtggttgacttagggtttctgcggtttccttcctgaggtatatttacagtgactgtgccttcattgcaacaaattttaggttcatcctcttgagcagggggaaggagcctctctcttcagaagcatgtcaggatatctttggtaggcatcatgttctgtttacttgaaccagtgagaagatggccgagcaagcaaggataagtgtacgtgtctataaaggtttcttctaatcctgcgagtctgtaagcattctagggttcatcggaaactgtctactcccatttctggaatttgcctcttggcatcatcatgcagggggctttttctagtcatgctttgtggtggaaaggtcagctgagcacggaggaacaggggactcactgcttttctcccctttgggcccttgagcaggcatttgactgctgcatatgaacctgggagccatggggtcttaaggctttctacttgattctcagtgtggccagaattctgtttagggcactgctccaaatctcggtgacactccatctgtaaaattgggtggcagtgtagtgtgtgtgtgtgtgtgtgtgtattttcttatacaggactggaagagaatggaggaagaaggataatgacttaaaagcgaaaacaattgaattctttgagctacagtgctgtgtcctgagagtgcagttattttccactgcagtaatgctttcaaaaacatttatctagcttctctcactttctcatttgctgtcattggtgtgaaaaatcgagttaccagaaggttcacccatgttccacaggtatgaatactgaacgttttatttagtgtctcattaacagctggcctgtggctcctccttctcggcttgactctgccctgtccagggaaatggggaatcacgcttaaggattagcagggtgcctattttcacttacagtgcttcattcctgtgttcatgttacctattccctttacaaaatatgaatgagtatctttttgtgacaggctatattctaggcactg

SEQ ID NO: 56751 - DNA, 1053 bp, Homo sapiens
attgagcacctatcatgtaccagattgtacatgtacccagattgggcattatgcatctgtcacccccaaatagtgaagtaatatactggacatattggacactcctactaaaacccaatccctttcctggcaccagactactgcttcttaaaccaagaagccaaagagagggaagagaggcacagtgcagaggagtttcttgggctaactctttagaggcttatgctccactctacctgctaagctgtcagcagttgtgaacccttcccagaagctggcagtctcgcaaacactgggaggtggccagactggatgtgcttggagcattggcagtcatcaaagaattaatgttggacgagcaggggtggcgggcatatgaaaggggttgcagggagagatagatagatgaatatacaaaccctcagtcatgccatctgaccatctgaggttgtgtgcatggtggaaggccaagaaacacattcagagaaggggcgtggacttgtctaaaaggacgttttcctttctgcctgggccagccaggcggcagagccctgcactgcctgtgactgaggaagactctgttgctatgcgccggaagcttaattttattattgctctcccctatttaatgtctgtctctcaggcagctggtgatgttttaatgaagctggaattgtatagtctgtagcgctggataatcataagctgccgagtcagaatcaaattaataattcatgaaattaaagtgtataattaatttgaactgtgcagatgagaagaagggccagagcccacagcctggaaggagctgaagtgtggggagtgtttactgaactcagcttctatttccaaataatataatctgcatgcaggttaggggtagtctgtgggtctacctgaacacgtatgcttaccagaaacaaggttctttcaactaaaacctggaatgactttcttagaagttcaaaagcattttaattgattttgatttacccttccctggccccaaaagaatgttgtttgaacagaaaatgtgatactgggttacaagtc

SEQ ID NO: 56752 - DNA, 1050 bp, Homo sapiens
gcaactcaagtgcctcattaaaatggggaatggtctgcaatttctaaaccactcttcctttcttgtattcctctttcaggcaaatatgcagcattcatctttgttgcctctccaggtgtgagaggcagtgtaacatccaggctgtttacataacttgcggagtgttttacaatgtactctgcagacaattgctcggatccctttattgtctttttaaagatgcctatacaggtgggtcctttttcggtttttgaatgatggatgctgtggtatcataggaaaaagaggaatctctgggttagcttttcattagaaaatccttgtcatgtttaagctcctaagcaggcagcttgaaccccccacccccttcctgcatccagtagacttgcagggaatgagaaggcaaaaccagcatctgtgattgtccattcttctttgtcaggcctttcagagttcctgttctagagggacaaatgactggaggccatgatacagactaatggtgcataagcccccaaaggtttggattgaattgaggctcagctgacttcacatttttaggtcttcagtatgtttatttgtccctcacatagcggcttgatctgtctgcctgtgtgttcacatagttaaccagaaacgctaggaggaagttgtaccagtgggatacctccttaggattcaagggcctcccgtgtaaccatgttctgcacatcagctctctttgctcctctcttgatctgcgtgcttcccctaacttgcttctgcttgcatggccttatcttctctaacgcctttctgcttccgtacaagtttcagccactggtggtttgccaaactggctgattacccataaacacacaacatggttctgttttgctcctagcaatccttaaaccattgcatgtctaacattctcagactaattcacaaatcagaaacatctgatgcccaacccataccaaatgcatttcagggcaaaaattatgctcctataatgtctggcttcctgtcttcaaggcactttgcttacatgactgaatcctcactgtg

SEQ ID NO: 56753 - DNA, 1007 bp, Homo sapiens
gcccattattcagaattataatgtattttgatttagacaaggccagaataatgaaattggaagaaatgcagaaaatatgggcattaatgttaactaaacatacttcattcaacagaaggagggaagctttctcagccaaagaattattttcccaaaaatgcgtatataaaaatttttttattcagggcctctggtttttaactttataacaccggttgagtaatttttaactgcaggatgcatctctttcccgatattctccccacccaccgcaacatatttcagtttaaatggcctgttatttttcttcatagagctgtgtctctgcatgggtgagaactacaaaaccagtcaggaggaatttgatacgccaagtgggccagctcattataacttctaggaaaccacaagataattgtagggttactgctggtaggctcctcagcattgtgttaggcgtttatactcttctctgttcaacttgcaatagccacttctcttttcagtacattttgtaggacatctgaataaaggtggttgacaagcattttcaagcagaattttcaaggcagcatccaggaatacttggtaactaacctcagaggtttaaaaaagtaaaaaataaaaatatgtggttgaattcttacagtgagtaggaaattaatcttagactgcctgcatcaaattgagcctctttattgatatgaagtgagttttccctaaatgataacctattgagagatctgctcactatgaaatggacagattctgcttactgaattaccttctgctatttatccttgtgcttctttttttccttcctttttttccttatctttatcatccaaaaacattttgtaagaatttatttatgcaaattaacacaaacttttaatatggatatcaagatttcaaagatgttgtgtaaatatgtatatatacataatatagacatatacatacatgtaactaataggaagcacttatttggcatttactacaggtat

SEQ ID NO: 56754 - DNA, 1127 bp, Homo sapiens
aagtagatatggtaggtatattattatctctcttttacagttaagaagaacctgagtcctagagaggttaggcaacttgctgaaggtcacacagcttataagtggcatatttaatcaacctaggcaggcagtctgactcaaaagtctgtgcttttgatcagtacactgtactgcttctcagtataagtataataagcaaaagacagataataaaaatcattataacaataattaatataataagtaaatattactgaatatttcctctgcatcaggcactgtggcaagcattgtacattcgttgtctcatttaatcttcccaataatttgatgatgttgattccattttatcccacttcaaatatttagaaacagacttagtttctaaacctgccccagtgttatatagctggtaaacagcagagccatttattgttggggtaaaccctggagggcttcaggatatctgaaggccaccataaatcactgtgagagtagcagaaggcaatggaagttagggatggcaggtggatcagctggttagagcatggagttagtgaatccacttcttgtcaattagttctgccctattccaagaatacagccatcaacagttagtcccagagttggtggcattgttggggaaagagattgcaatagactggtgcagatcagttacctgaagctcctgccttatctgtggcctggtgatgctgctgtgtgcccagaagccagtcatatggatgtcttgacctgtccagcacacacctcagtagtaggagatatgggtctttggaatgctttatgtgtgatgaggatgaaacagttaagtgctactttctcatcctcggccttatgacattagttagttgtgtaagattttgcagggaggtattccctcctctaccctttcgtcacaagcccctctcattcctctgaaaaggttccatactccagtccctaccctcaaagaaagattttactaagcaaaagtatctatggctctctctgttctccttgctttagctagcacagctaaactgggatctcaccagtctgacagggcaacctccaagattcacaacccaggaaaagtactgctttgcgtaagtttaatcaagaccaga

SEQ ID NO: 56755 - DNA, 1034 bp, Homo sapiens
gaccatggaaccttgggtcctgtgcatctctgtgaaccaccaagggtacatagggccttatttcctgtgtcgctttcacccttgcacaggaggatttatctgctgggtatgagacaggtctttgtgacattttaaaaaaatcataggactatactgtttcaaaggaggcccaaaggaggtttgaatagcaaaattcaaacagtacattgatggtacataaaaggaatactgggtatactatgtagtatgtttttgttctatatactaaaacctgtttacctgtttgcacataagtaaggctatcttcatattgactagatgataaagctcaagtgtaaaggaaaccttaatttgggactaaggaaacagggaaattaagtttttaatatatccaattaaaatttttaataaaaatgtttaacagtcttatatttgaattaattataagattttttctgttgcattaaatcattttatatcttatgctaaacttgaccgactaaaagaaaacaacttttatgcaattaaactatttgttttttaaacagacccttttgtgtttgctgaatcggcagaaatgttctactaatttttttctgtggttgactaattagcaaatggattgctgggctttggcgtatgcatgcacatatttacgtaccaaatattgctatgttgtgtaagtgtggattcattttgtatgtgtgctctgtatttttcactacatgtttgctgactgtgattttaatggacatttgaatgcatgtgatttcagtgggtgtgcactttacatacatttcaaatacgttggatcctaccactatgtactttggagttatctcctttctcattttctccaagaatttagttgtaagcagtatgttactgaacattcagattcccagtaatggcttgaaggaagcatttcttgtatacaatgaacccgaatcaacttctgtgaataactcatttgcatttttaaaatacagaaaatataaaaactacaatactaaattagtcagctacaacctatt

SEQ ID NO: 56756 - DNA, 1038 bp, Homo sapiens
tggactcatagggccagaaggactttttggtaaaattcctttttcatatgattcacatgtatgccttcattattccaaagaatgtcagacagattttcaggaatataaattgctatttctgttaagcagcctcctcaaagcagccagaaaggtcttttaagtcaaatgtatttcagatccaagagagcaagaacaatggtatactaggtcatatggtcttttggccctgccatttaaatataatatctgtacaaggaagtaactgcaggagtagtctgtatattcctgttggttggctggtgggaaggtagctaaccttttgtttctttctttttcagtacactgctttaataaatggtaacagtgctttaataagtcccctggccatcatcttacttatgatctctagatgaagaccactgtgtgaaactggtatcctaggaggttggagtgagcatgtatgagtgagtgtgtgtgtgtgtgtgtgtgtgtgtgtgtgtgtgttgcttgatttataaaccactgaagcccgatgaagtactagggtgaaaatcacctacgtttccagaggaaaaaaatgtcaccatcaattccaagagggacttgtaaacctgaaactaacagccaatggtttaatttttttaaggtagattttttttttaacatttctaggcttactatattctatctggaaaaatataaatttatgggcaaaaagaaaagctgagagtcgtagttttcatgggagagccaaacaaaaaatacccattattgaaaggcagtctttcagggattcttgaaaagaaaggtaacctttcttattcatagtgcagttacctcttgagaaactgcagattagggaaacctgtagatattttattctatctcaggtagggaaagacaagccttcaaaggcttttaatgacagggtatctgtattacttacggattggaaggcccatcatgtattcaatatcaaggatcacaaagccaggagtggtggctcacgcctgtaatcccagcactttgtgaggccga

SEQ ID NO: 56757 - DNA, 1023 bp, Homo sapiens
tcaaatgaagactggaacatatcaccctaaccgcatgggactaggatggggtgagcactggggcaggagcagtggtgtgtgatggaggggtggaggaatctttctccactccaagatgggatcagaaatgtaggaggaagccaaaaagagcaagctcaccactcttggcatattttttccaccttgacattgatagctagacctcactcctggttgggaaattttctaagctaccaagaataggaaaaaaatcaaccataactaaagccctttgagatattcttccttgtcttcatgaacaggacaatattaaaacattacagaaagtctggaaaacaaagggaaaaaaaagctgatagccctgcccttcaaatatacaactcattgcatttttagtaatgccccctttcagtttttaatctatttgcatatataatatattagctagctaaaattggaacataaacaatatatatcttgcttattcatcttacaacttaatacagaaattttctgttactttattactttttataattatttttaacaactgcttaatatttctcagatagagttttaagtattattaccctacaaataggtgaaagtaatgatgaatagcatttagtatagccagtcctggatagacacagaaagaaaatgatacatttttgtttttctcctccttcaaattctgccaaatgccactcatcagcaatataatagtgaaataaagtccatattcaggtatttgatttggagttgctggagatttttggtagatttaattcttcacatgattaacccactgttattagcaaggcttggaccctttgaccacaaaaaaactttttagaagtacagtagctgggggatgattggatgggtgagtggatggatggatgggaggcagagcaaaagggagagaatgaatttgtcattgatcaaagcactgtgcatggcttaggagaaccgtggaccaagcaggcccgtatagatgatccaccctgtctgatggtgatt

SEQ ID NO: 56758 - DNA, 1609 bp, Homo sapiens
tggaacatttgcaatgacttccaaagataatattcttctaatttaagactttggtttggtttttataagccaagttgtctttattataattctcctgtgaattggtcttctttgggaaggaattttctagcactggaggacaggtttccatatagttataggttaaaatacccttcctccaccctcacctttccagcttaattgcttctgtcagcggccacatatatggttgtcaacagtttacagacagtgatttaaccctcagttttagaaacatatagaggtgatgtcttgacaaaaaagagcaagcagtataaagatgtacatgtagccctacctacttccatgatttttgtctctgcccagcaagagtcagtgttatctttaaaaacaaattgcttctggtatatgtgcgataacatgtatgtgtgagattgtgcacatgtacatgtgcagtggagtgggcatcaatgtattttactgattgaagaacacagaataatttctattctcatttgttttggaaacttggaacaggaagagggaacttggcttcatcaatgaagatgattggctcccgataatggctcccttctggtgccagatttaaggcaggaaaaagcaaacagctgttcaaaatgactttcacctagtaaacacaggagagaaggcagctaacacttactggatgccttctgtgtgcccagctttagtctaattgctttacacatgttaactcatttaaacctgatggcaatcctgtgagataaatgtggttctccccagtttacagatgaagaaacaactgaggctttgagaagtgaactgactctcccagagtcagacagctaacaagaggcagaggagttggaatttaacttaggtctgtctcattataaaaccatccagtttccagggtaccatggaaacttgtgtcactgtgagtcagatactctcattctgtcagggtgtgaaatgccccttaaaatactgttatgtgaaatcatagctggtggctttatgcactatcctcactgactctgctaaccttgtttgaataaattaaaaaatatttatgaacatgtaccatgcccctagcaaagttctaaatgccgttgggggaaaaaagaagggtaaaatatggtccctgcccttggatgggtaactctcatttggcaatcagaaaagcagtacatgcagcagctgatggccatgatgatatttaataaatttgtgacttgggtgacaacagaaactgaataactgtatgacatcattcaagcacaaaatccagaagctgagaagggggagattagtatatgctagggtgaagggaatctagaaggacagtttaaatgtggctgcatggaaggctggaaggaagacttgagagaaacagctggactgagcagtgattgtagaaacataaagtgtcatcattacagatttaagaagagtaacatctgcctggcactttacagtttccagagcactttattttcttatttctattttctctcacttccattattattgttattaatcatcatcacccctgctttacctatgaggaacaccaatcaagtaccatcccttacacatattgtgc

SEQ ID NO: 56759 - DNA, 1353 bp, Homo sapiens
cagtgtacccaatccactctgcctcatctccccaccatggacctggaatgttgtcaacctacttgtgtgagataagaaaactctcattaagaaatccattcatcacgcctgtaatcccagccctttgggaggctgaggcaggcagatcacttgaggccagtagttcaagcccagcctgggcgatatggtgaaatctgtttctactaaaaatacagaaattaactgggtgtggtggcacacgcctgtaatcccccagctactctagaggcttaggcatgagaattggttgaacccaggaggcggaggttgcagtgagctgagatcacaccactgcactccagcctgggcaacagggtgagactctgtctcaaaaagaaaaaaaaaaaagaggaaagaaggaaagaaggaaggcaggccagccattcaaattgattcgaacatcagattctttgaacttgcacatgtgatgtggtttgactcccttataaatacatcgaatttggtggcttaaagctttagagtggatcatgaagaatctcacaggggtcaaatgagactctggccccaaattatggatctgtacttggggtacattttctttcctggcccctacaaaggtgagcagaagacacatttcctttggtgtcagaagtggcttcatctttgtggtcctgcagggtaaagtgtgacacaagagaagacttaggtccagaagatgctatacataaagtggggaaagcaccttgcccctaatgaaggcccctgagacatgcactcttttctgcccttcacatgatgaagtctcactttgacatttattaaatgggcccggtagaaccagtcctctcctaaggctgttgtaaggaccagatgaggtcttgtgtgtgctgtacaaatgggaatgacaccatcataaccaggaagattgagttggagttggaaatctagggagcatggcaaatgtggaccttgagccaacttttattactgtggcaccaaatcatttatgaataacttatatataagtgatgaaactctatagtactaaaaggaacttggttccagtcacttgccctcatgcccttactccattttggtctataaaaaaagtcagtgctcatgttgattcccacactttctctctgcttgcctgcacctattccagttacctaccttttgactccctttttttagctttcagatggtaactgacttgagaccagtacatccctgcacataagcagacagtccatgcttatctgaattcctggtgtaagcccagggtagtgcaaagagcatggacattgaagaactgcacttgcgtaagctgtaactttgaacttattttcctaa

SEQ ID NO: 56760 - DNA, 1119 bp, Homo sapiens
ttctccctaaaaaccttgaagatatggaatacttcctgcctacatcttcaactcagagaccgccaggggatttcagtgtttattgcttttttctctgggtttggaacagttccgaccaggtactatttgaaaaatgtagaagtatttttttgcttattatcaaaaggagaatgtagttttcttgcaacaaaatgagaacttgatatctttcttgcctcgagggtgtgtgttgggagacgggggtggtgttcagccttctcttcctccacctctgtatcctggtagccagaattgaagttccaagccacaccaaggagggtggctgcctttcatgaaaggcagacatgtagtaattacctttttgcctatctgccgccgtccccttgtgctgagggggttcccttgccgctctgtctgttgtctgcacactgcatttgtttgtctggaatgcagaactccttgcacttgacaatcactacagtctttctgctttttctcttaaacagcttttttaaagcacccagagacccttaaaaaaaaaaaaagaatgcaaatagaaattgcgctggaagctgaactgaacattgttgcgagtcatgagatcccagccacactgggacaaactattttttattttgggtaatattttttctttggcatttattacacctctgttaaacacagctcatgtgacacagtgttactcataggcaatcagaaaaaagctgaaagttgagccattagtagggcagggcaacttattgttaatagcagccattaaagctgaaaggaaaaattacccatctgcccccgccagacctgtctgtctgagatcgagattgggcctccaggccggaaggggggctgggcaaacatgagggaaggagaatggaatgtagaaaccgagatctttgtaagggaagatagagctgaattcaagtgtgggccctaccccaagaataggggggaaaaaaatcctgccccaagaattccagctgtcctttgtctgttcatcctttctcaggaaagcacctgatagcttttatccaaagatctgctgcaaaatccattttagctacagacaggaaatgcaaaagaaagattcctgtagcaacaaca

SEQ ID NO: 56761 - DNA, 1039 bp, Homo sapiens
accgaaagagaaaagcaaatttggcttctaagatgaccatatgtctgttaccccagaaagcatgagcccctgcaaagttctctgctgaagtggggagagttggagcctcctgtctgttctgcaaaggatttgcagggtgcttagcatgctggccccagtgtcctcatggaaatacggatggcttgctaggggctgtcccatacaaccagagtggggttcaatgaagtgccatcaacaaggtgcctacgaagggccatgctaatgtctggccagtgaaacaggggaacttccagagcagatatcacatgggttggagagatgttgctttacacagtgagcaggaaagccagacacctcttcagagaaatacagtaagaaccacagtaaataaggcccagcctcagggaggcagatatttaaaggaaaattaagacggctcctcatctatctctctgtcacccgttgatgcatttagccagcatcttgtggtgctaaatgctttttgatgatgatggttcatgatgaccactgtatctccccacaggggtgggcgcctccgatgtgagagttcttagtggggggctccatctccagtgcacagaaagaaggaatggtccagagaccccctgctctccccaaattcccgattttaccagcatgtaaaagcaagtggaggcaacaaccaccacaaaaaagcccgtctgaaaatcagagcctaatcactcccatctgctccagtgctgcttcctctcgctgcctgccaggatgtttgccgcagatgctaagtagcacattattttcgataagttgcaatcatttacttgaaatctacttctcctttaaaatgtccccctggaaacttgaatcggcagtcgagaagccttgttcaggatggaatttgaatgctcgcactcaagttcaagaaaagttaaacccatttgacctccaggtgttgatgaattgtaaatttcagccccttagactctgttgagaagagaggaagaggcaccagggaagacgtctgggagaacagagccat

SEQ ID NO: 56762 - DNA, 1194 bp, Homo sapiens
ttttgaaatggacctggggcacccataaatagacccagtgtccttcagctggagaattctgcttccactaaagtgaacagaggtgatttctcctctaagtagggtgcattgggatctctcttccaatcctctgtacctgacaaattgagcaggctggttagagtaaaaacctgattttattagtatagtgtaaggaaacatcccactacaagatatagatcaatatatgcagaaaggcaaattacaggtactcagcctaaagtaatttgttagaacttggtctcacaggtttacagtttagtccaccttagaattcccttggtcaagatagagtcttctcttctactccctcatcacagaggctcttggctggtttccatatacagccactcctcaccacctaccactgtattctcagtctaaactcctcaagggcacccgataccctcactaggtgatgtctttccctgttccctcatcccggacttcctgggccttcttttgcctctgctgatagccgtggtagtacccaagagaggcccctctaatgaccaaggtctctttgatctgttctaaaacctcctctttttgccaggagttccccacagtgactactcaggtttttctgtgacttgcctctggttattaaatctgcctttttctaattttctctgtaatactctacatgagatcactgtgcaatactctacatgaaaacactctgccttctagatttttatcttatttttagaaataatttgtattagcttagattggttaagctgtctaaagcaaacaaaacaaaaccctctgaaaaaccccaaaataacatggcttaaacaaaatacaagtttattttttcccttctttcttatagcccaaagatgactggtgggctggtctccagggtgtgagaactcccatctggcttctttccctagagtggcttccagtgcccagcccagctcatgggccgggggatgggggagctgcagaagggatggagtgatttagagtactgcaccttgttgccctactctaggctactggtaaccctggctggaatttgctgtttggcatcagtgacatcatttcctctgtctgtccttggtctgcacacctctgtctatggctgtcacctggcagaggtttgcatttcaatcttattgggaaggaatcctggtctagcaggga

SEQ ID NO: 56763 - DNA, 1058 bp, Homo sapiens
aaaagcaagaaaggcaaaagtgctaagtgagctaatttaaagatgaaggccacacaacttcaaggagggccaaccagcccctgcattgagcctgcaactccctcaactatccacaggccttcattgtcaggaagcaataaagtgattctcactttaaattagttcaattagcactttttttttaaggcagaaaatgcttttattaaaaaaaagtgattttctcctttttggcaacctgtatatgaaaaagaattctgtgggcttttgttttaccatttagcagctgttcttgcttaagaagtgccacttttctccttttgagggatgtcaagctgttgggggttaatttcagtcagttctgtgccctcttccccagatgccttttaaaaatgttacatgcatttacatggggatagaatggaaagaacatgataacttatttttaacttatggctgcagaagctctgcataattgtgaggagccaatttgtatagaagagagagattgggttttgtagtggtcagacctgaattaataccttagctctgttacataccagccaagtgacctttgagctcagttcttcatcggtaaatacgaataatcatatctgcctcagtagtagtgaaaaatgaataacttgaattgattgccaagagggaggggtcaggcccagtgcctggaacctggtaggaagaaagaccaagttgtagcagctgccacgtgttgggcgctgtgctgagtgctgtctttgtgtggtctcatctcttccctactctcaccctgtgaagtcagtatcaccctcttcactttcacggaagaagctgatcgaaatcacccagctgatattcaattgaccgaggattcaaaaccaagatggggctgggcgcggtggctcatgcctgtaatcccagcactttgggaggctgaggcaggcagatcatgaggtcgggagttagagaccagcctggccaatatgatgaaaccccatctctactaaaaatacaaaaattagctgggtgttgtggcacgtgcctgtaatcccagctactcaaga

SEQ ID NO: 56764 - DNA, 1040 bp, Homo sapiens
acaggggaggggatggtttagcaatgacatatttagaatccagttgaatagtttatgtgctctatcatggtggcagaagtaccagtgaccagcccatagcctccatcttgtggtcccctggccaaccctagaattttagaggcatagaagagagatcctaggtctagagactacaatccaaatagactaagttgggaagaataaaggttccctttcttggcttgaagttgccaaggggaagcagttctattgacaacttgcagtaaggtatggcttcacataacataaacaatatgcaccctttattgcttgctctgttcttcatgctactaaccagactctgttgatgttatttttattttagtttttatttggggggggttgctttgcatgtcattcttcctcttggctgttagttgcggggtttgagccttttcctttctgtgattcaggtgcctcactctttcctttccaggttcttccagttcttttaacatgtcaaactctggagatttgttcatgagcgtgcagtcactcaatggggattcttaccaaggggcccaggttggagccaacgtgcaatcacaggtagggacccagccaatatgtcaccaggtgaatgccttagagtccaagagccctcagttgtattggacttcctgcttctgtccagagagagagagaaaaacagatcagaaccaaaaccttaccaacgaccgaaccaaaatcaagacaaccattgtcatggggaatctcgtccacactttgtgaatgcatttggctctggcttttcagttgtacttggaaggcaggagaagaacagtaagcacagggcaaggtgaccgagacacatcaggcaggtggaaccagcatattctttattcaccaaagggaaaaggaggaggtgttcaggatgttacctcaatttccaggtctccctctcatgtgttggtttctcctgctcaatatttaccatataaagaggcaattaacaagcaagcaaatatattactatcggacgttttcattttaagctttaa

SEQ ID NO: 56765 - DNA, 1592 bp, Homo sapiens
cgcatcccggctgaccctgtgccccagttggggcaggggcaggagggagggtttctctcccaacgctgaagcggtcagactggaggtcgaagcaatcagcaaacacaataagagtctccttctcttctcttctttgggatgctatttcagccaatctggacacttctttatactctcttcccttttttttctgggtagaagccacccttccctgcctccagctgtcagcctggttttcgtcatcttccctgcccctgtgcctctgtcctagactcccggggtccccgccctctctcatatcactgaaggatattttcaacaattagaggaatttaaagaggaaaaaaattacaaagaaaataataaaagtgtttgtacgttttcatgctggtggtttgaggagccaaatttacctcactcgaatccctcactccctatgttaacaggcaatccttctctgtttctcttattactctcactacctcttagcaggaatactccacattgccctattcattccaggcctccctgcttcctcttgctcttcctccctggggacagtactgattggaacactttcctcctcttccttcctagccccagctattcactggggactgtcatagctgggattctaaaggtgccacatttttcagtttcatctccactaggttggttcccgggcaggaagtcaggcagcagggaaggacacgggaacagcaggtggagaattcctacagtctttcttaccctgctagcaatagctctcagtttcagaggcacagtctttggagaccattcagcactgagaaagcaatatttagaacctattgcaaaactgggcctgagttaggcatggtgatgaatgcatcagcaaggaatagaaagttcttatcgtgaaacccttcaacctcaactatgccttcatagacacacacgttcatgcacatgtaggcacatgtaccatctcacatcttcactttcccgagatgccatatacaattacctacattaataactgtagcactatgccttttgagcccgagagagggaattagtgactctaagtgaaggtcactgacacagagaagcagtatgtgtctggggcttccaggacctgcaggcccactagcgtgcacttaccagaatggcatacacaggacctgatcatgaggaagaccaggtttccagtgtaaactactcttgttcccaccacctctggagcactcagggagccccatacagtacttacaatgtctttaatggacttgattctgtttaattttttgttttatattaggcacactgtattaattttccaaaatgttataccacactatgttcttggtcctgacctattgctctggaggaaagagttgtataagaacgtggctcatgtgaacttttgctagcttcatttgaggacctgagaatcatggggaaagggaaggtaatgttttcattgaaatcatcacagtgatttttattccctgggaacacagcgtgtactaaaaatacatgagaaaatagcatgtatatgaaagctattctcaaaagtcacctgagctcaccatcttcatagccaaccctac

SEQ ID NO: 56766 - DNA, 1063 bp, Homo sapiens
ctgtaccactgtgacctctgctgcttccttctctggaattcctccagcccatgaccttctctgggcttttcctttgtctcaattggagtcaagctcaaatcctgaagcaggccattgttggtgcagagggcagggcttcttccctgggcaccactccccacaaagcctcccttccttctgccttggagttccaggccttgaataactggtgctgcttcagtattagcagaaacattcctttctgccctccccttgagatttgcacctgatgtttctctcctattgttcctcaaatccttttcagcagagcctgcaaggtttaaaatgttctaacctgctcctttccctggttccatcccttctctgtcttgcatagggctcactctctgctgttgggcacagacatttgttttcctaacatacttctctaaattatatttttaattttttttcaatatctctggatctgtccaaagcttccactgttcagctttaattccttgagttgagtaatgcttcataggcggagtcttcccaggagcacacacccaggctcagccattacatggctgtagtgtgtttccgccctcccaggagccctcccttagagcccatttcctatgctacaccttcagaacacatgacaggtctgtttctctatacatataactgctatgttggaattcactaataatccttcaagtattttcctctgatcttcttgattttcccctctcaaatgtgtccaccttttctgttcgcacctagtgaagtcttctgaatcaccagtgagaacatttccaattgctgccataactggtcccctatctgctgctttgggtgctttctggatcctttggtattgaggaacacattggttgctcactagatcctaaaagcaagaccacacatacttgaatcccagctctgctactgccaggttcttcctgatgccacttctgacaacagatgagaagttttcttccaattccccaaaaccaactaggtgtcctacaatccaactcaattctgacaccaactacccggaattagcttcagactc

SEQ ID NO: 56767 - DNA, 1059 bp, Homo sapiens
tgatgacattatttgtctgattattttcaaggaatggcagcatctttgaggatcttggagtcagagaaattcagacaccaaaaagtcgaagagacttaagagatcctttctacctttttgtctgactcttaattctcctatttcatctccttgaaatgtgtcattgatcatctgtttggaacccactaacaatggagagcttaattcaacatgacagaggggaggaaccagacacataaataggccattttaataaaatgtgattaatgctataagagaactgtggagtggcaactatgggagtggtcatgaggagtggcctggcctggaagtctacggaatgaaataaggcttccaagggaaaatgacattgtgctggctcttgaaaggaagaagggagtttggcagataaggggaatagtgagggagtgagtggggatcattcagaagtgggcaaaaatatcaaatatttagcagttatgtgaatcatgtgacaggtgtctcagtgtagctggagcatgggccatggatgcagggatattgacagataaagcacagcccaaactggaaactaccccatgctgaggagtttggattttatcctgaagttgaaagggagtcatttaagggttttaagggattgacaggatcaaatctgcatttaaaatgaactggaataagaatggaatctgggagaccccgaggaagctagtgcaaggcctgacaaagagggatcaaggaagaaggagagacagcagtaaaagttaaagattttatgagaatgtgggtgtggtatggatagagagtgggagaagtagagggtgatgcccaggtttctagcttgggtactttggtacctgaaaaattatgcggggggaagcagagcaagttctatgccatcactggcaaactccaggtgtaaagtgagtcttcttgtattgatctgaaaatgactacaaccctttaaccttctcagggatggtcttagtctctcctccataattataaatagcaatgaacattattttgtgaatgtactaagttgcaaataaatattct

SEQ ID NO: 56768 - DNA, 1008 bp, Homo sapiens
gtgacaaggatttagttttacagtgttggattacggaccaaatacaacatgacttggataatttccactttgctggctccttagctacaagtaatttattttaaccttcttccataatgccaattacagctgttagcacatacttcaaagccagtattcaaagtacaaagctatagttaagatttccgaagttcctgtgctgatgtgctgggcctggggggctttaaaccaaggttggaatgggtagagatgaaaggaagtagggcttttcctgaatattctttcgttagtgtggatgttgggagaggggagtttaggaaggtggctggaatcagcccaaaggagggagtggccagaggggagttgtagatgtggttcgtggggacatccccttcataaacataaaagttgtgacttactagaaagactttcactaaacagggaggggtagagaacagaatgaaagggaaagatgaagatagagaacagccctaatgagagaattaattgataagacgtgccttgctgaacatgtcaagagagacaagcagtgcaactccagactgtcctgtcttgtataggtatctgatcagtcacctaacctagggtctgggaagcaagagaaggaagtatgtcaccagtctagtaggagcctctggggtgttggtgttcagggcttctgcctgggatgaagtggggctgcctgtgattgctgtgctccatctgatgccaagtggaagccatccgccactatctgctagttatgccctcattactcagataattctaataattattgggtgcttagtatgagtaaagacaacatgctggctactgtagaaaacagaaactgctagttttgcttaaagagagatgctggaccctagaaatcttgtggatgtggagaccctgaacatctgtgttctctcttcgttcaagccctgagagactaaaaaaagagaaaagggatgggatctacagaatgagaggtaataaaaaaaaagatat

SEQ ID NO: 56769 - DNA, 1037 bp, Homo sapiens
agcccccagaagaaggacaaaaaggcaagcagaatccattttctttctctccagctcccagggtttgctattggtgacttttgtcctgggagcttgtctgcacatttggcagcagaactgttgaatatcatatccggagcttccagcataacttccatcgggaccagccagcagctgtccatccattccttgcataacccctttccaagttttcttctgaactgtgttgtattttcaaacaagtctcagccttagctagaaaagatcccactgtgcccccagtggaggctgatttccagaactgttgacatccctcttgttttttacttggcctagctggatcaaaaagtgataatggaatcccagtttttaaggaaactgagtattcctgtattgtattatttctctcaccattgctgaaattttattctcttaaaactagttctagtccattttggagagatgaaatatgtgtctgaatttaatgtttgtaaactggtatttaatgaaactagagatttcaggtaacacatgagcaactggaatgtactttacctagttgcatgtggaattttctaatttagagttaaacagactcttataaacagttggttcattaattaaatcactcattcattcatttaatcatcaaacattcgtattaaattcctgtatgtgtcaggtatgtaaaaatgaataaaacaaatcactcatgtactaaaggtctagcagaaactgtttagacatgtaaattaagcagatgctttgaaaaaagaataacattattttaagaaaggcatggccacagggatagaaaaccaggttatctaaattccttggttctgtattactatgtgctattcatcatcttcaaggcacttattacaatttgaaatatatatatatatatatatatttggtttattgtctgtctatgtcactagaccataagctctatgaaggaagacacttcttgttttggttttgttttataatccctacatctccataatcttgcatagtatttagtgaatgca

SEQ ID NO: 56770 - DNA, 1069 bp, Homo sapiens
ttctttcctctccattcttcctgccccatatttccctccccatcaattttgaacacatccgaatctccgatttgattatttgaagaacaataataagaggaggttattctcttttctatagctgtccatgatggctaactgaatatttccttatactcttaatgccaccaaagccactaaagaatgtcactccattgaaagttccaggcacctagaacttacctagctgaatggctgatgttttcttgctctcaaaaaatatttcccaaatcatgcagacttggccattgccataatagcacaccagccacagcccgacagtgttttctctgctatgcttattctagttgaaagtctatgaggttcatttaaatattgaaaagccatgggaatgactatgtcacacagttgaaaaattggtcccatatttctctaagacaaatatttcagaactgagagcactaggttttctgggcccaagataaaatcctgtatttatcattgctgtgagttcagcaatgtgaaaagccggcctgtagtatggtcaaccaatgaggcaaaggctggcttttcttcaggcaggctatctgtacccatcatttcatcttacagtggcttcctctgaactgtaaactcctgagatgctggaaacctaagtaaaacagaattagaaagtcatgtcatttctgtaactcaatgacatcacatattacattcaaagaatcagacacaaatatgttttgaatgatttgtttccttatatttttgaagttctgcaatttcaatcaatcaagcatagtgcctggtattaagaagacttctacctagaaaaaggattgtgattgattcatgatgcctgtctgaggatgggcttggtggctctcctgacctaaattagccacccctgcctggggtaattgaaaactgcatgtgtggacaggtaataagggcaatgaaatatgcaacaaattagtctggattaagcaaaatcaccttctttttttttttttttttttttttttttgagacgggatctcgctctgtcactcaggctagagtgcaggggcat

SEQ ID NO: 56771 - DNA, 1156 bp, Homo sapiens
tgggcagtgtcttgaactctgagtaatcagagggaccttcagtgacccctcaccaacatgagtgggtaggttaagttactaggttgctcttataggtgtttaagaaatggtgaataagcctattgtgtaaagttttaaattagcatcagctttcaagggtgtcaggttgattattgtagagattgcctttaacacttgatataaaatccaagcatttttcagacctcaacccagaatagtagatacctgaaattaagattcctattggtgagaaacaagatctgtatatttccctatccctatccccaaatgccagtgggtcattttccccatgcctagctccattcacagctaatatgtggattgaggctttattccaaaacatttaggttctatattcttccctagccctgattagcagtgctcatctttgaagatcattgtgacttttcagactattgtagtgatggctcaacctgaccccttctcctcctttcaggatttggcagagagaacggccgtgtgacaatcgaatattattcacagctgaagactgtgtgtgtggagatgggtgatgtggaatctgctttttgaaaacctgcagtgaaacctattgacatggccacgctgtggaatgatgtgaattggccctgtttacagaggcagtacaactgaatgttattttacatccagaattttggcgttcagtataagagaatggttcatgttactctttctctctccatcagcttcctcactgaaaatgtgcattaagtgccttgtagatactaatcaagaaagctgtgattctcctcaaagcgtatttttgtgaaatcttttaagagccagtaacatacttctagagaacaggaaaagagactaggataatacatcttccacacatttggcccactgataatgttaattctctggcgtatttcaaagaacttgttcctggctgatccaagtgcagtggtatttacaactaattgatcacaaccagtttgtagatttctttgttccttctccattcccactgcttcacttgcctagtcttgaagaaaaaaaacaaaaaacaaaaaaaaaccttgttcctttataggttcctggtagaatcagtagagatgatttcagctcattgacatttttttaagct

SEQ ID NO: 56772 - DNA, 1047 bp, Homo sapiens
cagctaaaggaatcaaacctgttaccttggaacttggaggcaaatctccactcatcatcttctcagactgtgatatgaacaatgctgtaaagggggcgctgatggccaacttcctcacacaaggccaggtatgtacctgtccctggaagaggtgtaaaaggaatctctaccccctcatccaacagtgtgttttaaagctttttgttttacaatactttcagacttacagaaaagttgcacaaatagtacaaagaattcccatgtacctttgaaccagatttctcaaatattaacattttaacagattcactttatcatcttctttatctgcctgtacatacgtaggcatattaagtttttctgaaccttgagagtaaattgtagacataaggcccctaacctctaaatataaagttcctaaaaacaagtgcattcttttacataagcacggtacacttagtaaaattaaaaaattaacattgatatagtactgttactgaatctatagcccttactcaatctatagcccttattcaaattttgccacttgtttgactaatgtcctcatagtaaaatagaacaaaaatggttttttttccggtctaggatccagtcaaggatgatgcattgcctttagttgtcttgtctttaatctcctttagctgagaacagttcttcagttattcttgtctttcaggacgttgacattttgggagaacaggccattcattttgtagaatgttccttagtttgggtctgtctgatgttttctgttagattcatattatgaatttttggcaaaaataccacaaacatgatgtcatatcctactcagtggtgatttaactttgatcacttgctttaaggtaagtcctcactgtaaagttactgttttttactttgtggttaataagatcttgtaggaggtattttgagactatcctgttcctcatcaaactttcatgcagtaaatacttctatcaccactgacgattcttgctgaaaacaatttttattatggggttgcaaatggtgattttccaattc

SEQ ID NO: 56773 - DNA, 1024 bp, Homo sapiens
catgtgtttgaaggataggcagggttctctatgtggagagaatacgtggaagccagtggaagactgcctggaacaaatagaagaatggagacagggtgagcctggtgtattgggagaagtggggaggctgcgttgactggagtacaagtcagactggtacagatgttggtgaaatcttggggagcacagacctgcatcctcctttactcctgttttccccataggtgaacacatccagctcccaggtggatcgtttggttataccagaagagaaccacttggggtatgtgtgggaataggagcatggaactacccctttcagattgcctcttggaagtcggctccagcattagcctgtggtaagaatgaattatccctccatttgagagccattcgttcattctctcgttcgttctctccccattctctacctttcacctctctataaacacacactttaaatcggaaggggcctgctctgggatattcaaagcctcagaggacatggctcgttcctgccctgtcttgcccctcaaggagcttatagttaaggttgtacacaatcatgtctagatattctcaggttttatttatttaattttgtatatgaaaagaaatttaattttttcttattaaattgaattagatttgtgctacttataagttctcttcctttctggacaagaattttaaggtaggagttagcacttaggagtttgacttcatttacgaagcagaagataaactcctttcttcatttgggtcttaagagaaatgataagcaaggctttgataagcttcttatcaaagaggagctttggctgattgacataaaatagttttcttacagtatttaaagagaagaatctttgaggaaagaagactaattttatcttagaaaaaattgtaatgttagaaagcattactgttaggacattatattgaaatgcagcttttgtcctgttgccattgcatgttcttgttttagcctatttctctttgagatacagctgtgaaagaggaa

SEQ ID NO: 56774 - DNA, 1046 bp, Homo sapiens
gagatgaacccagtacctctgttggaaatgcagaaatcaccgtcttctgcattgatcacgctgggagatgcagatcggagctgctcctattcggccatcttgattctggactctgatagttaaactttttatagtcttaaagatcagaagtaccagatgttcattatagaaagaaaattcagaagagaatacatcaaaataagaatcatggatagctgagtggtaggtctgtggtgactttttgtcataagtatgttacgtcagaaactgtgacgggtctgagagtttccctgctttcaagagtgtgtgtgtatatgtgtatatattacatacatatacatataaaacacatataatatacatatacataattatacacatataagctatgttatacacatagaataatatataatctatataatatacatatattctatattatagttgtaaattacacaattatgtgtaatatatgtatattttatacatatatatattctagcaagagacatgaggctttttggatcacagagaaggatggtttattacagcaaaatgcagcagccatagcaataccttagcactaatttctgtttatttattattattttttttttgtgatggagtctcactctgtcacccaggctggagtgcaatggcacaatcttggctcactgcaacctccgcctcctgggttcaagcgattctcctgcctcagactcctgaatagctgggattacaggcacatgacaccacgcctggctattttttgtatttttagtagagacagagtttccccatgttggccaggctcgtctcaaactcctgaccttaggtgatccgcctgccttggccttccaaagtgctgggattacaggcatgagccactgcatccggcctagtttttttgttttcaaagcaccggtcaccacggtgagtgaggggatgggatgagaaccaggtgagatccctgtgcatgcaggaagttgcaccaaaggagaagaaccctaaacttctgagattcatttaaatagaaattactg

SEQ ID NO: 56775 - DNA, 1522 bp, Homo sapiens
gaggtgggcagatcatgaggtcaggagatcgagaccatcctggctaacatgatgaaaccctgtctctactaaatatacagaaaattagccgggtgtggtggcgggcacctgtagtcccagctactcgggaggctgaggcaggagaatgacgtgaacctgggaggcagagcttgcagtgagccaagattgctccactgcactccagcctgggtgacagagcgagactccatctcaaaaaaaaaaaaaagtgataatcatcctattgcaggtcataatggttcctttaatctatatgagtatgagttccctttgcctgagagctacataaaacacatcttctgtatatttgatattaaaacccaatccttactgtgctttcttcacagaacattcagaagattctcggccttgccccttcacgagccgccaccaagcaggcaggtggatttcttggcccaccacctccttctgggaagttctcttgaactcaagaactctttattttctatcattctttctagacacacacacatcagactggcaactgttttgtagcaagagccataggtagccttactacttgggcctctttctagttttgaattatttctaagccttttgggtatgattagagtgaaaatggcagccagcaaacttgatagtgcttttggtcctagatgatttttatcaaataagtggattgattagttaagttcaggtaatgtttatgtaatgaaaaacaaatagcatccttcttgtttcatttacataagtattttctgtgggaccgactctcaaggcactgtgtatgccctgcaagttggctgtctatgagcatttagagatttagaagaaaaatttagtttgtttaacccttgtaactgtttgttttgttgttgtttttttttcaagccaaatacatgacataagatcaataaagaggccaaatttttagctgttttatgtacaaggagagatctgtttcattttgttttgccgtatttctagatataagttttagcatgggccaggaaggactaaaataaaagtttttaaggtactgtactttttgccatacttgactcatatactcaaaatacagagttgtcttggtgtaggaattggaaagcaagagtggaaaggaacgtaataactcgttggagtttaaaaatgagggtcttggcaagtaacactgatgtctgaaaaaaaattaaatataaataaataaataaaaatgagggtcctcagctgttctcttcatatcctattacagtctctcagattcttgtgggggcactcttagatctcccttggagacaaggttatagttatatgttgttaatctcgcagagcttccttttagtcacaatagccttcattttctgccatgccccttcataagggagaaggatgtttgtaccatgatcctccccgcataatctatggaattaggagtcctgtgtggagtcttatcaataaatatgcacattcatcaaatgtctacttaaatgtgagtattcta

SEQ ID NO: 56776 - DNA, 1130 bp, Homo sapiens
gggaaatctgtctgagaaaaatggaagacctaggtttcacctgtgagactataggaatttaaacagattagtttagaatttcacgaaaggataaaattgcatgcagtaaatgcagaatgtttgtgttaaaatacaaatacctgtgtaatgtaacaccgatacatttaatttagtgttcccaaaacgggtctgtggcaagagccacaaggaaaggaaagtatagagtaaaggaaagtatagagttgcctggatttccatgtactttggctgtggctactgaagtgtctcatttttaacacttttttgttgctgctattgctatttgagatattcccgtctagagcagtggcttaccctcagtagtcatttaaatattttgagttagtaaatgaaattcaacagactaccagttcagtttcttgtttcttcaaaatattattttttattttttcaatcatcttctttaaatcacggtaaacctataaagggcatccaacatttttacattggtttttaatctctaaaatgataaggactcatctatttgacccttcagaataactgagcaagaatcccttgtgtattttgtctaggctatattactgtatttgttaactagacaaatatgtttatcagcagctaattctgtatgtcttactgtttcaaattttatctttaaagcaatttcccttaatgcctagcttagtgctaaatacattgtaggtgctcaggaaatattaattaaataaagaaattgcaaactagtgacatcatttggtctttttactgctttgtgtaatgggttttttagaggtgagctttaaggagctatttttattataaaagtaatgcaggccaggtacggtggctcatgcctgtaattccagcactttgggaggctgagacaggcggatcacgaagtcaagagatcgagaccatcctggccaacatggtgataccccgtctctactaaaaatacaaaaaattagctgggcatgatgatgtgcccctgtattccctgctactcgggaggttgaggcaggaggatcgcttgaacctgggaggcggaggttgcagtgagccaagatcgcaccactgcactccagcctggcgacagagcgagactctgt

SEQ ID NO: 56777 - DNA, 1065 bp, Homo sapiens
gcaatgagccgagattgtgccactgcactccagcctgaccgacacggcaagactccgtctcaaaaaaaataaatattaaacatttctcatttttaatttctaatacagtaaatattaataactataagctacagaaacacaaagtttttagggtcctaaataatttgtcagtatataaaggggtcttgataccaaaagaattgagaatgactaatttaggaaaagattgatgagaataatctaggctcttctttacatcaccgtacatcaggttcatgtgtatttttagcatgtcaccctctctttgtttttcagagatcagagacttaaagctctatttctgtcccagattcttctttggaagtaagaaagttgtcagtcttccaaagataacaattctttttttttttttttcttttagatttgatggtagagtggtggcaaagcttccttttacccctctttcttacatccaaggactgtctcatcgaaatctgctgggagatgacaccacagactgttccttcattttcctgtatattctctgtactatgtcgattcgacaggtgagtgatcacatctaccatttaatatgtatatttttccttgctgtcataccaattagcttttacttttataatactagaaatgtttacccattgttcctgagttctttcagttgctcattttagaatttcagtgtatcttccaaaagccattttaaatggctgtaggtctagatgactgatccttagggatgagaagtagtgataaaaccaaacatggattccacatcccattcttagagctctcaggctccttctttattacaactgcctaaagctgcaaaagtagagagtgggtttggtcttcccagtaccatttcttcattatataccagcaccatttagcggctcaggagcacaagtaagtttaacaatgtggtaattttaggttattcacagttgagataaagtttaggttatagaatttacatttggccaacttggtgatttgacattcgtagtgaaaaagagtgagaactaaggagtaaaagggttatga

SEQ ID NO: 56778 - DNA, 1626 bp, Homo sapiens
tcttcgcgctgacgttcgctccttgaggccagcggcccacaactaactcatttcgcggttccagcttcacgtccatgccctggcacctacacccagtcgttcagtacctttgcggaagtcagtcttcttacttcacggcaaacccaagctaaactaatattacgaccacagaagttgggctgaggtagaagtcaagactatcccaataactggattctggccgagaaaaaggcgcgcgccagcaccccagtcagtaaaatctaccgggcaaagttcgccgccgccactatcctcctctggctctgaaatagttccaattctcgcgagattcggcctgactaccagcccttcagctccagtgagttgcgggttggtttcctctagactctcgtggccacaccgttctccgatacgagcctttccggtgctatgccccggaagcggaagtgcgatcttcgggctgtcagagttggtctgttactcggtggtggcggagtctacggaagccgttttcgcttcacttttcctggctgtagagcgctttccccctggcgggtgagagtgcagagacgaaggtgcgagatgagcactatgttcgcggacactctcctcatcgtttttatctctgtgtgcacggctctgctcgcagagggtgagagcgggtatttctcagacgtttgatcagtccccgggaggaagggccccggggtcccctgtgccaccaggggaaagatcgcgagccttacttgcttgagaggctcatctactccacttcagggaatctctgggcaactcgtgaacaggagcaggaggggagtatggagtcgattgccgagttttctttggtctcaggtagatttcacttgggtatttgtggagacaccttcacatcatgttactgttgttttggctgaagagtcagttgtattagcctttgaaaaaagttaactatgggtaaatacaaagcgaaaagttggaattcctccttctccaacagtaaccactttgtttgttgtgatcattccagtcatttctctattaacatgttgcttttaatgttttaggcataacctgggtcctggtttacaggacagacaagtacaagagactgaaggcagaagtggaaaaacagagtaaaaaatgtgagtatggcaacacattagaaataatttcaacacgtcaagctcattaagtccatgttcacaataaatattttaagagcaccagctgatacaaagatgaacctgacttgaagcctatttagaaatagaagacttttatgcaaaatgtgtaataccaactagagggaagtgaggggcgtagcagatacatgttatgtgctgtggtggttctaaagaagaggttcaatctggcgcagtggcttactcctgttaatcccagcactttggaaggctgaggcaggactgaacttaggggtttgacaccagcctgggcaacatagggagacctcgtccctacagaaaaaattagctgggtatggtggtacacacctatagtcccagctatttgggagactgaggcatgaggatcccttgagcccaggagattgaggctacagtgggccacgatggtgtcactacactgcctcctgggcaatagtgagac

SEQ ID NO: 56779 - DNA, 1049 bp, Homo sapiens
atatgtattatatatatattttatatatatatacttttatttttgagacagggtcttgctatgtcactcaggcaggggtgcagtagtgcagtagtgcaatgtcagctcactgcaacctctgcctcctgggctcaagcgatcctcccgtctcagtgtcgcaagtggctgggactacatttgagtgccgtcacacggggctgatttttgtattttttatagagacagcgttttgccatgttgcccagctgacttcgaacccctagactctagcaatctgtccacctcagcctcccagagtgcagagattacagatgttagccactgtacccagcctgtatcttttcttttttgttgtttgtttcaagttttaatcaaagcttgtacataagattactttatttttgcatcttctcaattgtttcttcctagtatttgcccttttcctttcctacttggcgagatttggctttccattcaaggatctttttgctgtctttgtccagttttagcctagtgatagccacctttctggggtgaatgcctgtgtggacagttgtgccattagtcttttcccgctgcacccattcaatgtagatgacatatttcttcctgtaaacctggactactttaccaatttgctgacctttatagtgccctcgtacaacctgaacttcatcatcctttcggatgggcatggattgcacattgtacttctgtctcagctctttggaaacaggggaagacataatcttcctgtgaatgtgggaaggtgcattgaaatgccttttgctatttttgatttggttggaagtcacaaagggattgaacttcattttggccgctctgtcacccagactgaagtgtagtggtgtgatcatagctcacggtaacctcaaactcctggccccaagcaatcctcctgcctcagactcctgagtagctaggactacaggcatgcaccaccatgcttggtaattttttttttttttttgtacagacagggtttcactatgttgcccaggctggttttgaactcctggcctcaagtg

SEQ ID NO: 56780 - DNA, 2675 bp, Homo sapiens
agccaccgtgcccggccttatttttctacacagccaaatgcacacagaccatcttactgaactgtcttcacttacatttttgctcagtggtcttctttttgtaatggcctttagtctttttaaggctcagctctgttaatactttcttgagggagctttgttacccatttccttaatgagaattattttttctgtcttctgcttccatagacttaccatatctttcttgtcttatgcttatttgttgactgcttcttcccgtagagtatgtgttctgtgagagaatactttttcttacttaacctgtttaagtgcttgggattgaggggaaataaggatttaagaaaccatgaaagaaggtctctgtccttagcagtttactgtttataaatttcttccactgtgtttattaccaagtcactttatcattaaagcatttgattatctattccctttgaagtcaggcatgtgtcttccctactggtagatgacaatggaagatgaggttaggggaacttttgacttagtggtaggactgggattaggatctagggttttattttttatttatttttgggacagagccttgctctgtcacccaggctggagtgcaggggtgcgaactcggctcactacaactcctgcgattctcctgcctcagcctcccaagtagctgggattacaggtgcccaccacaatgtccggctaatttttgtatttttagtggagacggggtttcactgtgttggccaggctggtctcatcttctgacctcatgatccgcctcagcctcccaaagtgctgagattacaggcatgagcctctgtgcccggccggttttttttcttaaaatctgtacctgttttgaactttctccacaagcagtggcctcttcgtgtaaatatttttagggaggttggcctgtgtgtgaccattataggataagagaggagatgctgtcccctctgaggtgtggactgccacctcagtgcagcttggccgtgagtcagcatctgcttttggaatgcttcagaatgtgctctggacccgtgtcggcgcccactgctctgttctggaaccttggtcgccatccccatccagccagatcacgtattccacaccttcctgtcaggtgttcccaggactgtggggctggtttggtccttttgctgcttttctcagagatggcattgtgtgttttccgtcacctcaaactgctgccatgatctggcccttcggaccttcttccctttcccccttactctagctagtccagccagacccactcttggcatggcaggctttcccccagccaaggatgtccgcatttgctgtctgctctgcctgaatctctcctgcttgttcactgagccatgcctagcacgatgtctggtagaatgaagaagaaaccctgggtcctgctgcctccagtagttcctatcctgctgcctttcctcaggctgtatttcttctttgttccttgagtgtctttgaagtatggtttctgatgctcactctgtttgtggtcacctaccagttcactacatagcatttgctttcatgtcatttctttgtcaaatcttgcttttatgaggttctgtgatggagacagattgtctttgggaatttcactgctgaagacctgaccttttttgctagtgggctctgtgatggtgctgttggaactacttaaggtctctaaatcttagacttgtatttcagtattttaaaatcaataaaaaggggttgagagtatacttttatatgtgagtgtgtatgcatgtctgtatgctttcgtgtccattaaaccatttcagtcattaagctgatttgtcatgaaagcattcgatcttttcatcatatatataaaatatataagtataacccatatataattatgacatacaaaataggaataaaaaatgagaaaaaggaaacatttagaaacataatttctttaatggtataaaatcttttgatactaaaatattttttatttgtgactgaagattgaaagacgttttatttttaaaaatcttgtttaatacttggtgagtcttggatgaccttggtggtgttagttttggtggtcattcaagactgaaggttttgttctaagtttagtcttctgaatttttatttaatgattatcatatttgaaaaagttacctctaaaaagatccaagtagaggaaagtcatcattttgtagtacttactaaatcatgatattcccatcctccagttatgctatggcttttccttaaaacgagctagaaaattttcatcctgtagtcccagctacttgggagactcaagtgggaggattgcctgagccttgggaggttgaggctggagtgagccttagtcccaccattgcaatccaacctgggcaacagagcaagaccctatatcagaaaaaacaaaaaaagtgcaattagtagacaatttaatagaataacctgaaaaatataaagaaccatataaagccctccagcattaggctttcaggcctcataagccataatttgattggatgagggggcagtggttctaaatgtatgcctgagaattttgaacaatgacagaaggtgacaactctgaaaaattcagtttgctttgccaactcgctattggcaatactctttccataacatgggtttctttctttcttttt

SEQ ID NO: 56781 - DNA, 1412 bp, Homo sapiens
actgcactccagcctggatgacagagcaagacttcgtctcaaaaaaaaaagaaagaaaaaatcagagagtgactttaacttaaacttttaactttaaattcgtattgtcaagctcttaaagaactgtcacctattttgtttaactcaatgctttttttttgattgaggtaagatatgctttttttattagtcaatggctacatttttctctacctccttttgtagagaaagtaaacatttgagagcagaaggaatagaatattgagtgatacatagtgtttgaacaagagaggtagtgaatactcttcaggaaggaaatgcaagctgagcgagccctccttgtctgactacagagggatgacagaagctgaagtgggcatcagattggccatttgatttctggaggaaggggtcaggagacatccattgttaaggtggaaaagcttgtgttttagacctgtcttctgggaagaactcagtcctagcctgccatgaggctcttcttgctgggtcttggtggagtttaaggtgtttttttggtgtgatagaattgaagctttataatgtgtccacttcaagttaagatagagaatccctggtttgttcagaagatgcttccttgttgaggtaagcccaggaagcttgatggagtggagaacgtgcgtgggttttggagtcagccaggcttgtgttaacatccctatttggccacttttaatctgtttcttctgaacctattcctacatctgtgaaaaggagatgatgtctggtttggagaggtgttagggttaaacgataaaatgtatgcagaggtatatacatagcaatgcttctgcagtgggccggtcacttgccggtaccgtgattcatgttctgtgcagatgtgctgtcagaacaggctggttggccagccttcccccaccccggcccccgccccagacagagtcctgctgtgctgcccaggctggagtgtggcgcgatctcggcccactgcagcctctgccgggttcaagcaattctcctgcctcagcctcccaagtagctgggactacaggcgtgtgccaccatgcccggctacttgttgtatttttagtagaggcggggtttcaccatgttggccaggctggtcttgaattcccgacctcaagttatcccccggcattggcctcccaaagtgctgggagtacaggcgtgagccactgtgcccggcctggtcagcctttaaaaatgtttttaaatagttattcattgattttaattgacaaatgaaaatatatttatggtgtgcccattaatgttttaatgtatgtatacattgtggaatggttaaatcaggctaattagcatatctgttacctcacttagtcatttttttgtggtgagaacaattgaaatctactctcttggcaatt

SEQ ID NO: 56782 - DNA, 1489 bp, Homo sapiens
ctgccaaactgaattaagtagtactccctttactggtttcctgtagcagtcattctcttgtgtcatggttagctgtttacacctctagattccaggatcctgcagtgtcagttatccctcttgtgtccccagtctcgtgcacagggagggcttcagtctgattgttgaaagtatgctaaataccaagtaaatgctacagtcataaagtgttgtcgcaggtggagaggagtcagaaagtgttaatgactatgctaaagcttttcttgctaaagtcaccagtaatcacctagtctctaaatcccgttggagctgtagattctttaccttgacttttctgtaacacttgacagtgcccttgtcctctgggaaacttttcttggtttcactgctcttggctggttggctttcttcactctcaccattcttctcagtcatctctgggcccttttctgcctatggctgtgtcatgcctcagaatccccttcttgattccctgttttttccccctccatgttctgtattctccatttgtcagtgcttcgcagattgggtatttcctgccttgagtcctttcctgggcttctttctcatttattcagctgtcactgggcatttccacatcatgttcttcaccaatgattatccagaatgagacccctaacaatacctgcctcctgttcctagccacagacctgctgctctacctgtattttctctccacacagatgtacaagacagaaaccttacagtcatctctgtcactcctgcacttccacattctcccacatccatcctgtctcctggtgcagtcaatcttgctttctgaatttctcttgaaataatttctcctcccaatccacatccatatttcttgcctgggtaactctccactgactgatttcccagctgccaatctggaccacctccaaaacattttccacattgctgctggagtgatcttttaaaaatgcaactccgatgttgcctgtccgtcgggtacattcttcaatagctcttctttgccttcagtcttgctgtcatcctgttctcccagctaagccacaggaggcttagtccctccagccttgcttcctgtcactccctctttgccttatcggtcctccccaaccctgagttgtcagcacttccagttcccagctcttgagagctcacctccacactagtgcacgtgtgttgatgctgctgcttctgatgtgcctcttttgtgtggtcacttttactcatccttcaaagacctcttgagctgtcacttcccctaggaagtgttctgtcagttgactgcaatctgaattgaggtttgcatcctgtgtttttctttctctgacaccaccccatactgttctcttctcagtagactgagtttcaggtcactgtctttatctctgtccattgtgcctagaatattgtagctgctcaaacatacttgagtgaatgtattcaagtcctttttttttttaaaccatgattg

SEQ ID NO: 56783 - DNA, 1067 bp, Homo sapiens
tcagaatggcgattattaaaaagtcaggagacagtggatgctgacgagactgtggagaaatgggaatgcttatacactgttggtaggaatgtaaattagtgcttatggtttttaaaaggcttccagagcaggggacccatatatttagtcccatagaacacatcccttaacctgcctcttagcatttcatctatccttccttatataagttctttcttctggagttgggacaggaggtgtcttgttatttgggtagaaaggagaaagaatgggtgggtatgtggacaaacggtgcagggaaatagatagcatgggaagtgttgccacagctctatggaaactacttggatattatgattaatggatagtcaaacatctctcaaataaatatcaaagagtgatcttcccttaaaggttattgttcccaagtttatccctctcttggtgccctggctctggtttcttttcttctaagttgcccctttgattacttgtcatgtgaatatcaaggcctgatccttcctctgtgtgagctccaaggggccgccttccagtggagctttgtagaatcatatgtgtcatagagaacaggttttaatgctgggctgctgttaggctttagcgctagtgctgagaggccccacaaagagctgaacctactgatgaggcctctcccaaatctaatcagagatgggggaaaatttgggtgctgggaagagcagatcatctcagtgattttaatgcccacctttatttgcaaagtgaaaggagaaatatatttccctattgcatttcctacccttcacttgtcaggcatatttgatatttttttttttgttttcatttaaaaaaaattccaaaaacaccatgtcaaatatgtcaaatatttattttttaaaaagtaggccaagtattaatgtctttctgctaaatctagtgggttctctctcacccacccccgctccaaccaggtgtttgcagaaaggatctttttttttttttccggaaaggatctttatccagaaaggaattttaaacctcagagttaagttcttcttcacctcagt

SEQ ID NO: 56784 - DNA, 1410 bp, Homo sapiens
aataaataaataaataaagtgagtgtgtcttttggatctcttcagattagaaaaaaatctgtatttgacttttcctatgtttgttctgattttgttcagtcctttacgctgaagcagctcccccactcttcccacttaactcctatcttacttcaccatatcttttctagtccatgaatactaccttccatgctttattctggtcctctaaatctttcctttatacttctgtttttcctgccaatccccaactcgtacagaaccctactgtaggagaacataactgagaagaatttaactgggtttgaataattaaataaattcccatacgaaggtataataaataattttctagatactttgtacacatgacactgaaaagagagggacatattctgtaaagtagctcactgggggaaaattaccattgctacattttcagccttaaattgtaaggagtgcagatggttagccagcctatgtttctcccacccaccttcgttttaaactatcctaccctggaaagatggatgcttataaaataaatgaaaaagactttacctttagaatgacatagattgtgattgacaggtccaggtagctcttgtgtatgtgaaggggagttatataatgtattaggctttcttaattcattccacaaacacctattcctagttcttgtctgaatctccatttattttgcagcaaagatgtccccaaataaggtgcttatatatagcaacagattctacttccttacattttgtttcaggacagctcacacagtttttttaacacatttcaatgggcccagaatccatcgtggtaggaagtaaaactgtttttacatatatattcggtcacttcccagttttttcttttcttttttttttttttttttcttgcaagctccttctgtctgggctgactgagacccacataacatctcagccagctgagttggacattcccgggtttctgttggtgtctgaatatgtgcagagcagtagaatatgtgctacttgaatcttgctgtgcgtgagctgctggaagtcgctgtgtctgactagtgtgtagaagctggggctacctgtgatggggaacatgaatattcgaggagcacaggtggatgtggggtggggacgtggggtgtgcatcgtcacagagccagcctggccctctggagagttggaaccctgtttccttgtcctggccaatgtgaaaccttgggaatagttgcagagtagagaaatcaaaatacacaatctattctctgcttggcctttttacgccctggtgcagattgactaacctgtggtttttgatcatctctggtccagcggttgggaatctgtgctgtctatagcatctgagtgttgtgagaataaaatgtgaaaataggtatgaaaa

SEQ ID NO: 56785 - DNA, 3008 bp, Homo sapiens
taatttattcagcaaacattacgtgcctgttgtatccccagctcctggtattttgggtattaggtgattttttttttttttgtcattaaaatttcctccccccacccccaccccacaagtaacttgtaatgagcttcagaggcatttagctttaaaacaaaaatcttcctccctctttttaaccacactacccttggttcttagtttaaaaatttagttgacattcctgtgtgtttttatcttgcaattggccggagggttatttattaggaaaagagattttgaatgatttcagtaagtgaactaggagttgtgatacacgattatattaaattgcttatggttagttttccaggaggtgatttaattgttcaccttcctaagtcttcagtcttaggcttatccagtgggagctggaaagctttaataggcaagtttattggaacacacttccagagtcaaatgtcactcttggcagctgcagatgtcaactgggacaagtattcagagcctgagaattaaggatatgtgttaaatatggccctcataggcggccccagggtttttttttttttttttttacttttgcgaacatgttgacagagatgaggctcagaaggcaggtatacatgtgccttgtcttcattctctgcagagagaatgtttttaggggcttgggaaagtatttcaactcgaagaaaggacttatagttactagaatcttcacatctgctttctcgagtgaccttgagtcaaccacagtcttgtggggtagatggtattattcacccctcttttgttacatattaacatgacaaaactaagactcagagaggaagtgccttccccaagcacatgcagctagccagtggcacatccagtacttgaacccttttctctttgaatcatgctttgtactaagctgatcacggtccactgtagcagtaggtgacttatggtactaagtaccatctgatacattaatttattcagcaaacattgagtgtctgttgtatctctagtacctggcattgcaaagatgagtaaggcagtagacagataactgacataacccatgacagtgcagttgcgtaagtggcatgatctggagtgcagagtactgtggggacacccatgagggagccacaattgcctggggtagggagttggaggaggcagatgacaggaggtaatgactgagctggagctggagggatgagcaggagttaggcagattgcaaagggggtgcgggcatgtgctgggtggcatttccagacaaaatcggagggcttggaacagcagtgtgtgctcacacctggtacgtagcaggagtgagaggcaggaacagcagtttgaggcttgacagccctgtgtgcgaagcgaagcatttgaatgatgtctcattaccactgtataccacatgtccttcccctgcagctttggctgacatctgtcattctaccctactcctgttggccttactttctcccttttacccctctcaacgtttgctttaggctgtcagtgtttactgcaccccataaaaggttagatcctcccaccaggcctgatctgactactaggagagactgtctgtatctgctggagggattgagagaattggtacagaaggagttttgtggatcatgacatctagaattagcactctgagaaagagggagtaagcatggtattaggattggaaaaaggtttttttcctttcagaccattacaaaaactcatgagttcaggatgtatcagttgtgtgaataaggtggatgtttgaagaccccactagcatgtgttgagtttacagccactgtgcaagatgcatcttaaagattgatagtctgtgcacttttatcccgaggtgtgaggtactggacctctgtcataggggagagagtagaggctcagagaggttaagtaacctgcctgaagttgctccaccagtaagatatggaaccaaggattcacatgtgggctggccaacctcttcatgccctgtgcctcctatgtgtgtaggtgggtctgtcactactgccctgggtgtcctgcagaatggctgtggttcccagtccacccccttgggagccttgcctacattagctcgatttgctgacaggtgaacaaacaagcaaccagctgctctgataggcctgggaacttgtccccggagagaatgcccaagtccaggaaggttatgccaggtcatgaagcagaagtgtctggacatgtcacacagtctgctgagccagcagtgcccacttcatagccctttctgtagggcccctgtgttgactccctgcatggtactcgtcccttagcccaggagaggccccatgggaggagggagagttgcagcaacttctggaccctgagccataggaacttccccttcccaatctctgagaagatgttcacagtgacctggccagggtcactgcaagaaagaaaatggaatgctgatggggcaagggtgacagggaagccaggcattccagctgtgttcaaagcagtgacaatgactgtgggagcgggtcctgttttatatattcatcattctgaggccttcagggactattttgttagctacataagtgttgaaagggctgcgtaaaccagaaatcaaattctgtagattggcatctgctggataaatcttctgctgggattgctacaacatgttgaataaccgtgtgttttgaagaatgaaaaagataagacagttcactgagttgcaacgtttatgacacagggaatggaggactgtaattaaatctacataaaaaggccatgttttccaagtgtactttgaacttggggcaggtgttctgagtgggtgggtgcatcatctcatttccccctgcggaggaggctgctggcaacctgggaatggaggttaacaccatttgttacccctgaagtttctggatgtctagaggaggacccccttcctgcgccccgcccctccatgcaccagtccagagctgtggtctccttcctg

SEQ ID NO: 56786 - DNA, 1050 bp, Homo sapiens
caggcattttagggggacacaggcatgccaaccttagcagcaacttttcatataatttgtatcctaaaaacagtaaaactcggccgggcgcggtggctcacgcctgtaatcccagcactttgggaggccgaggcgggcggatcacgaggtccggacatcgagaccatcccggctaaaacggtgaaaccccgtctctactaaaaatacaaaaaattagccgggcgtagtggcgggcgcctgtagtcccagctacttgggaagctgaggcaggagaatggcgtgaacccaggaggcggagcttgcagtgagccgagatcccgccaccgcactccagcctgggcgacagagcgagactccgtctcaaaaaaaaaaaaaaaaaaaaaacaaaaaaaaacaacagtaaaactcaatagctctggtttattgactgtttattacatgcctgctaagataggcattccctacctggccattttacagatgaaggaactcaggttaaaggaggttaacaaccttgtccaaggtcagacagcacatctggattcagacatcagcttgtgtgacttaagcttatttttctcttcaccatgccagtcctgcctctagcaaaatacacgcagatttcatgataccacttttaatttcagcaaattatgttatcattttcaattaactgataattagctggcagtccttggaaggtagaaggagttctgatggaagccctcatcgttttttattctttcatgacttccacttgaaggtccttgcttactgaaatggaagccataagtcctctcgtcacccttggtagaagggtgctaaatcatccttgctaaatacttgacggaaaccatcagtcatctcgtttggctctcatcaatctctttgttcatatgcacaggctcttaatctctgttttccctttctttagagtaccgtagtctcagatgataaacttctctgaagctaatttcttcactgctgccctggagtgtctcttcatgctgcattctaaacaagtgaagagcaaagttgctcttggtaggg

SEQ ID NO: 56787 - DNA, 1053 bp, Homo sapiens
agatgtttgggaagtatttcaagcactgctttgtgtccttaaggaacagtgagtgaatggcccgttgcaggctgagtctgatgtcagtttttgacttccgtatagtagtacatcaggtggcagctggctgcaacccagcctccactgactttagagccagccaagtgagttctagtttcagcccacaggtcttatgttgttgccgagggacctttacaagacacttaaacccttagtttcctcttgtaaatgagaattttaaaaagttcccgacacagagagagaggccatcaataaatgttggataccttccctttcacttccctgtttatggtttttgaaatttggaaaagaagcttgtcagatctgtgtgtagaaataataaataataggacttccctgtgtagaaaagaaaaactttattttttagggattttgttaggcatttgcctacttagagatcgttctgatggtcttgttctcaactgtccccagccagatggggaacataggaaacctattatgtgcgagccaatgggtccagagaaaagagatagacagctattgtgatgtctatcagaggacactgtcttctcccgtgccaggtgccaggtgtgctgaagatctactttgcagattgaccccataaggatttatgcacttgagggctcatctctggagacacatggaaaattagcaaggcaaaagtttggagtaaagatgtctgcacagagtgggcagcttgtgtgttggagaacaagccatgttggccatttgttgtgaatggcgtgaggaaaaatgcttcagaaacatagacttttctggatctgcaagcaccagcatttttggtgttcttttttacttcagttttagatttgcagcagtattattgtttcctgattttgttaagcagatcttcagtatttcatcagcagtatgggttaagttggcattagaagctatgctgggaacctaatcctcacccgtttgtctgggaaaatgtgtttccgtgttgcacagtgagtgaactttttgatggcagtgtgtttgtaa

SEQ ID NO: 56788 - DNA, 1456 bp, Homo sapiens
aggaaccatttcaagtgacgtggaaggaggttatcaaggtaggattagaaacatgtatttattatgctgcttactatccagtcttcagttatatatgtgttattattttacagaaggcttcattggacaaaaattccttgttagtcttttttttcgagaaggagttttgctctgttgccccggctggggtgcagtggcacgatcttggctcattgcaacctccgccgtccaggttcaagccattctcctgcctcagcctcccaagtagctgggattacaggcatgtgccaccatgcttggctaatttttgtatttttagtagaggagtttcaccatgttggccaggctggtcttgacctcctgacctcaagtgatctgccagcgttgcccctcccaaagtgctgggattacaggggtgagccacctcgcctggcccctgttagtgtttagtatggtttctttttgtgtagggggagtgaattttttgtgtgtgcgtgtgcgtttgcttattgtacccatttctcatggtatggaaaaaaacaggatttcatactcttaacaggataccctgcacaaggtgggaaaatatacctcgtgttttaaagaaaaatagtttaacaaatggctttcatctgggttgtactccagacttgctgctgcttcatgcttttccaattgtgccacaggcctgatcccttagcatgtgtgcagctgtgggctagagggttgaaagcaggtcctgtgtctctttcctggtgaactccacagggacacagctgcaggtcttttgtaacgctctgtatatgcacaggaagtcccttacaacccactctgttagatctcatttcctcttcggttatttgccctctgtggtctctgggtgtcagcctggcctgccttttcagggttcaaggagctgctggattggtgccctcttgtggtctgcctttgatgtggttgggatcttgggagctgaaggcaaagaaaggacaagtgagctaccgaggagtaaggaagacatgaagttgagaagataacagagggaagttaaaaaaaaaaatctttggttgaggaaattgtttctgaatataacatgataaaatcagtttaggttaatcagtttaactgcatcaataaagaatttctttgcaaaacactacttaaaaagacagttaactagaaagaatttgtgaggcaaatgagaaatggccagtttccttaatatataaagagcttttataaatcaataagaaataaaagaccaataaatcaacagagaagtgaggacaggatatcaacaaaccagttccagaagaacagaagccttttaggcatatacatagtcttttttttttttctctttttgccggctgctctagccagtttacttattttttatttttatttctttgagacagggtcttgctcttgtcacacaggctggagtacagtggtg

SEQ ID NO: 56789 - DNA, 1044 bp, Homo sapiens
tgtgtgcccagctaaaattcaaggactgatggcttgagtccaggagttcgaggctgcagtgagctaagatgttacgacttcaaaaaagacttctgataaattttgacatttctatttaacagacatttgggagacacacccccaccccccagtccaggtgcctgagaataaaaacttagtcacactattggtccttgtgctccaaaagctcttcagttatttgattgacccatggctgctttttggtactgaagaaccttattagtaatttagtgagtttttaatttagatcctgtatgtggtggcatgggtgggtggtggtgattgtattgtagctaggagctcctagtcagcaatgcatgggctctggggccatgcatgacttcaagaatagatggcctagggcaacccacttgggtccccttccatgctgtggaagctttgttctttcgttcttcacaataaatcttgctgctgaaaaaagaaaagaatagatggctttgcagatattccagggaagcatttgagtgacacctctctattgtgccacttaatcagttggattggaagttgagccagcaggtttgaaccttgttcttagttttaaaccagggcaaattactggtgctttggttttctaatgcctgtaaattagagcttctgagccatgtggggagcaacccctacccgcaaaggagtgatgtaatgtctgggggctgcaatggttttttcctttgagatggataccatataagctagtggtgatacttactttatgatagtgacagggaaagctactgccaagagtaattgatgtgacccacacatagtcccagagccaaggagctagatgggatcttcctgcctgaggaggccaagcgtctggccttcaagcattcttctctgctgtgatgttgtttcccgtcctgaaaagcagggaggaaatgatcaatcagtgtgcctcaacctggagccgattggctgtggttgctaagttttcttccctctgagcagccctccctgtgattctgaagcagctcattc

SEQ ID NO: 56790 - DNA, 1116 bp, Homo sapiens
acttttttgtttttgttctttggaattctaggaggaattctatctactaataaaggctgcagactttatcttcctacaaccttaggacgtaagaaacgtcctaagatagatgcctgggaggaaaaggaaattgagggcctacaggtgtttaaaaacctatagtttataattgcttagagcctttgatttccccccccacccatccatctgtagcacccagagagccttggttttgtaacattttcacttttgaatctagtttatcatatgaaagttttactgttctgtgatattttggggcatgggaggatctgtggtcccaaagtccagagtagttttaaatgtttttctgtgttaatatgcaaaagtatcatgaaggcgaaataaattgtttgcaaataattgagtcaaaatattattgttcctccaaagatccttacttagtcgtgtgtcacagcttgtataacaggacgtattttgcagagctgtttagtttgcactgacttgtgcaacaggaatggccagttttccttacgctcagggcaatcaaacacaactttataagaattgtaactttaaaagatttcatatttttgttgttgttgttgttaaaatcgttgatgaaataaattcaatagtaaaacttctaagatttgagtcatcaaacctctaaatatgctgtttttctgttctgttctgttctgttcttttctcttttttctttttttttgatgcagtctcactctgttgcccaggttggagtacatggcacgatctcagctgactgcaacctttgtgtcttgggttcaggcgattttcctggctcagcctcccgagtagctgggactacaggcatgtgccaccatgcctggctaatttttgtatttttagtagaggcagggtttcaccatgttggccaggctagtctcaaactgacttcaggtgatccacccaccttggcctcttaaactgtgggattataggtgtgagctaccctgcctggcctaaatatgctgtttttcctttctatttattcggttgaccagtttctttcttcttcttttttttttttttttttttttttgagatggggtctcactgtgttgcccaggctgg

SEQ ID NO: 56791 - DNA, 1464 bp, Homo sapiens
tctgctttattgataaggaagagcagctctagggagctcaggattgacctgtggccactttgttggtttggggtagagccagaccagacagacgtcgggattctgtacttcctcacaaatgctttctcgtctgtatcctctttcccaaaacttttctttattttccctccttcccttccccttctgtcctttcctccctcctttcaattgcctcaggactggcggggaggggatggagttgttgagagaaaactgtgagtttctgtttttaaagttcagagtgttaggttccataaatgccaggccatgagagcattcctggagacgccttcagagaaaaaaagaaatcacatctgtttttgtctgcctttattcttcattcaacagcaggtttttttaattccaaggagaaggatgtctgccgtgtatttctgtttcatggtgaaagctcagaagtggtcaaaggagacctttgtcccggccgtgatcacccttggctctttggtggtggtccgagggctctgtaagaccatattagccaagtctttagcccccgcttgaagtctgtgggggcaaggaacccagaacccagcccagccagatgttctggcccttgttctctgtcccttgctagcccctgcctggcttggcccattatctgctctgtgctttgcaggaaggaggagacagttactgtctatcccgcagacgtggtgctctttgaagggatcctggccttctactcccaggaggtacgagacctgttccagatgaagctttttgtggatacagatgcggacacccggctctcacgcagaggtgcgttctaaaagcctcaggtggccctgttggtggccaccttgagggcgggggagctgggagcctgtgacaggaccccacccgcctgagtctgaagcccatgccttccctgaggcagctgtgtgtcgcatggtccagcccggctgcgtcagtccagccccaggatatcctgctgcccagacacttggtaacatttgagaagggattagtcacttactgtttgggataacgaaaggcttgtgaggtcacagagactaaataagacactgacatctggttttgcctggaaaagtttgattaaatgcttagttccttgcaatttgtttataagacatcaaaatgaagatgctctgatttggggaactaactgtaggacccccgaggataggatcccctgtgcctgaagtactgggcagctcatcctgttagcctgcttctctagccctttattttccagcaggctttatggaggcattatcactctttccagtcagctcaggagggaagtcagctgtgccctccgcaggccctactaagtgtgggcctgcctgtgctaagtccctgtgcttgtgtgctgaaggcacagcagtgccccttggtagaggagcccagcctgtgaactgagctctacagggtattcagcag

SEQ ID NO: 56792 - DNA, 1151 bp, Homo sapiens
ggacccagcaagggcagtgggtggaggcgactgaatagaggaatgaaaggtgagaaggtttgagtctccgttgtgtgacagaggcagggagacacaggaaatgacgaggttagctcctagtcacaggacacattattgacagtttcagatattataagctgtatcccagggccctctgacttcaaagtctgggtaattttctcttttcggttcatgaaacagatctgtagtttatcccatttagcaccgtaattgtaagaactattcatgagaccagtagaacctacagaaacaagtcctgagctttgcccttctaagtagtaatagatacatatgctattaagtcagtgggagctacatcttgctcccaggtggggtgagggacagttagttttgtgtgatggaaaaaagaatggaatgggaggagacttttagttctagcagagcccttcccagctagctttgtgactaggctcttgcgacaccccggcttgggtttctttatggataatacaggggagacaggcctgcttttagtgtcacgactctggctgggtaagagttgcatggtcattttggatagataattgaaccctgagcctgacaacccctcatgcttctgccccagggcctggcttgtcaccttaatccacaaactccggccctgctttggttgatctgctcagtgtccatgtcagcttgtcaaattagagaggcagtgtgatacacagggacagataaattttagagtccagcgaattgggctgagatcctggttttaccacttactagatgtgtggcaaattgtgcaaattggcaaattgtgttttaacttttttgtatctcattttcctattagaatgtggtcttatgattggtacttctgggatagttgtgaagatgagaggtagtgcaggtaaaatgcctggtggtgcattagtcaataaatatctatgtggcagatcagaaatctgcttctgctgaaggggtcggtgctgttcgttttctgaattttctgacaagactggttagatcctccaaggggatctgctccggtcatgtcctcaggagctagtgatgcccggactgatgccatcactagtccagcagtggtactcagtctcagggatgcagtgctgccgagggaggcc

SEQ ID NO: 56793 - DNA, 1563 bp, Homo sapiens
tactatagagtagcacatttcctcatcagatttttaaagtgattgacttcaccattgaggaattatctttattttgggtccctctaagtttctttcttggcttttggctaaccagaaagagcaagtctgggtttggaagggctgacgtggaagcccagcagggaatgtgggcagacttgtagcttcctgccctgtaccctgtcctctgaaaaggcctgtcctggcccagcaaatgtgctggggtcagagcagtgatggaggggctggttttgagcccctggggtttccaggttgtgccaagaccttgtttggactcagtccttggcgcggccctgtttcctgactctgcctgaggagaagggcctttcagtgcagggaactggctggccctctgttgtccttggctcagggaggcacagtctgcctgaggtgatagttctatcggaggttcttggggagcagaggtgggcaaggccttatgatgttgcatgttcccagtgtctgggcaacattctgacccattccccatttgcttttccagcgtggaagctgtagtgggactattccctatcttccttgctttttttccttcctcacgtatgttgtcctatgtgcttgtgtcctgctctcccttcccgcgtggcaacctgcctttccagctgccctgcgggactcctttttccctttgctgcccccgctcagctgggtctgacctgcttacctgaattcgaggttcccgcgctcccacggtgttgagctgctctgtcagggaggcactgccctcccaacgcgtcctcaggttctgttgtggtcgtaatcatcatagaacacatgcttattgaacatgtgctaaggtgccagctatggtgctgaagagttttatgcacatctctgtattcctgaatagtaactgtatgaggaaggtaccattattgtccctgttttatagttaaggaacttaagattcaaagaggttaaagtcacttgtcgaagttcacagaggtaggagttattggggttaggattcaggtccagggcagttttccccccagagcccatagaggtagaacaagaagcagcttttgggctacagagcagcttcactgtgatttacctcctcctcctactttctgcacgaccagtttcctctctccagtgacaaaacagctgaagccaccagatctacagaaggaagggggctgaaggcccaggctgagggcagttaggaggactacgtgacagggtgtggacgtgcactgtgtgtgcgtgcgtgcgtttgtgtgcatgtgtgtttgtgtgtgtgcacgtgtgtgtgtgtgtgtgctgggagaaggacaaagcttcctccagtgctaaagccttcagcaattgtatgaaaagcatgtgttgcaaaacaatccagcatcaggcgtttgcagggctttaagtaaaagctgcccaagcacgggtgtgtttgttttttccctagctctgatacccttttgatctggtttccttttttctttgggctttatctggagacgtgtgaagaattggaggccgcgctggctgtgtgttttggcg

SEQ ID NO: 56794 - DNA, 2176 bp, Homo sapiens
tctactaaaaatacaaaaaattagccaggcgtggtggcaggtgcctgtagtctcagctactcgggaggctgaggcaggagaatcgcttgaaccccagaggcagaggttgtagtgagctgagatcgcgccactgcactccagcctgggtgacagagtgatgagactctgtctcaaaaacaaacaaacaaaaaattagtccattgaggtggtgtgtgcctgtagtcccagctacttgggaagttgaggtgggaggatcacttgctcaagcccaggaggttgaggctgtagtgagctatgactgtgctactgcactacaacctgtgtgacagagcaagacaccttgtattaaaagaaaaaaaaattttttaaagaaaaaaaaaaaagaatggtaaaagcccctggataaaactgaccgggggaagaaggtagaagacagaagatggtgagtttgttgtcaatttgggcttcatctcagccccagcccaccattctctaggccatggttttcttatctttcactgagtgatttttttttttttttttttttttttttggcaaacctctgtgcatgaggtaggtggaaatggttaaccatggctgggtcctcagcctggcctgggctccatgctgcagagggggcatgggtgggagctgggagcagtgagctgatgcctgatcagtgggtcgctggacttctgaacgcaggtaagtgcatgcaaggaggcagcgtgcagcccagccctctcggggcccagattgcttcttgttaacagtgagctctccaggagtgccctgcttttttaaaaaattcacactgaaattttgtttggagcaaatgttgcttgaaacaagaaggctgttggcctccatggacagccttttgtttcaaagagcattgtgtcattgccaagtttgaccattgtaagatgtcagaatgtaacttgtcttttccgaagccgctgctgatctgctcttggtcaagcctctcaggattccagcttgagaatcatctagagtaattgtggagcctgtgggagctaggtccaccccatgaagggcgggtgtgtgctggctcctacaccgttttttgattcttgttttcccttctcttacagtattaagggacatcagcgagagaggcagggatcttgagcagattttatctcagtacattacgttcgtcaagcctgcctttgaggaattctgcttgccagtgagttgtgttcttggtttgtttttgttgaatgtagaatttaaaatttgatgatataaacgaaggtgtgcaagtttgtggagctcccctgcctgaatctcactcctctctctgagtgatcctctgtcctgaagtcctaagagagggcagcccttggtccttgtgtcctctgtgttctccaggagccctgtcctgctgttctttctttgggtagccctgtagggtcctgccagtccttaggcaggtcatttaattcccagctagttctaggtttcttgcttggtggggtcatggtgtgagaccgtttactgagggtgtatcatatccaaggagagtcctcagccatttggatctctgaagggtctgcaatgggtgacgtatggatgcactgggtgctgtgccccgagatgttcccctctgagcctctcctgccatcaccactgagccctgctttgagcttgtctttagctcccatttggagactgtcatgccttactggaataagcttccttcccttcacccttgcagactcaccagtccttcctgtggcagctaggaattctctagtgaggtggctttcagagaaggaagaacacagagagttggccctcagcccaggaaagacaggaaggggcatgttgagggaaggctaccagagacaagaggtgtggtgtgctggggctgcagaaggagaagtatttaactcaggagaatcctactgagtcaatgagtcttctccagcttggccaaaccatggtctggctcctgaattatttatagttaagctctgagaccgggaggaagggaaggaagagcttgggacttaacctggtcttggttgagatacactgggaaggctggaatctctgaagacattgaagatttagagtaaggctgggtattggaatttccctatttattctaacaataaacttcattctttttcttctgggaaaatatctc

SEQ ID NO: 56795 - DNA, 1903 bp, Homo sapiens
tgcagtcattaaattcaagacatttaccattgatatgacctcttttaacctggagatgttccctatcttttgttttttaagacatttttgaggcgtacaggcccattgtttggtagaatggtcctcaatttgggtttgtcttttattttcttatgattggtttcatgagcttatacagtctgaaggaattatcccaggagagatgtggcgtggtcctctttgtgtatcacatcagaaagcatttgatgtgtattccatttttggtgatgttaaattgacctcttggttgaggtatataatttatttctaatgctaataaaagatagctctctgcattatattttttggagggaaagagggccttccatagggatgctctgtcttaggatggaaaactggaaggttccctggtggaaaggtctcatagctaattgacgtgtcagaaccatggctggttaccacgtctgcagactttggcccgagtgcttcatccagtggtgactgatcatctcctgataagaagcccattcattaagggcttactctgtggtaggcattgtctatcttactccttagagccctcctgtgaaggaggaggatcatattagctcaggcagagccactgggaagttggatgacttgcctgcaagtggcagagccacttccctggaagtctttctactgtggttcctgcatgcccttcccccagacagactcccacactcacccctgcacccatgcctgcacccgtaacgctctgctggtctctgccccacagtggccatcaacctcatcgtgcagcacatccaggacatcctgaatggagggccctccaaacggcagaccaatggctgtctcaacggctacaccccttcacgcaagaggcaggcatcggagtccagcagcaggccgcattgacccgtctccatcggaccccagcccctatctccaagagacagaggaggggtcaggaggcactgctcatctgtacatactgtttcctatgacattactgtatttaagaaaacaccatggagatgaaatgcctttgattttttttttctttttgtactttggaacgacaaaatgaaacagaacttgaccctgagcttaaataacaaaactgtgccaactactactggtgatgcctaattatgaatccaacgtgtaaccagttataaatacatatatatataaaaaaggatctatttttgtgtaaatgtacaaatactgtaaagctgtttgccataagtattttgcaggagggtctgtacttgagtgttttaggactggagctggaatttcaccaaggggaaattgcctgttgtgtcccagggtggggaggctcgggcatctgtgagagacagggagggtggctaaggtccagttgcttttgagtgccccgtggaacttgatgggaatggggttggaaaaccttgattgcctcctctgtcacatgccactcttggagctggagcttagtgatatgtcaatgagagatactcttgtcttttttttttttcttttcttttttttttttgagttgaaattaggtaaaatctcaactcaaaaatcaaactcagggaagaggcccactgaggagaacaagtcttctgcattttcttcctgccctgctcccaccttctcgcctctggctgcttggatagcttggtgactccttcctcaccctcctgcttctctgtctctccaagaagccagagctgcctctttccttccctggaagagattttatgggatcgcttcctgatagaagatgggaaggagagggcagaactttgcctgctgtcatatctgaagaatcactggttctttctgcatcccaggggcgtaactgatctgactccttgggctttttcctgtattgtggaatatagagtggacc

SEQ ID NO: 56796 - DNA, 1473 bp, Homo sapiens
agcccaagtgagcctgaaggagttctgattatagagtcccgagcctcagtttctgactgcagaagagccagagatgttcatttcattgttgaccaccctagtgcttggtggactgtgcccttagctatcccactgtggctgccattgccagaaacattttggagaaccttttcttcccattgctctcagagcctgttcgagccattcaggtaaattggtctccattattacctggtcacaccagattttcccccagactcagcaccatccagtctgattccccgtttctgggctcagtttgactctaaatctgttttgctattttaaaaagtcaaacctggtccccagcagagcttgccacccggagactttcaggagaccgtgcaggctctgaagggagctcccagtcacagcagccgcctacttggagcaagggaaggctcccaagatgcctcctttgaaagccggtgctcaccaagatcagttcaggatcaatcattatccttgtagtcatgccttgatcagttctgagatgaagcagggaatgcaggcctgggttagtatcctgaggacacagggcccctggccttgatggcactgggctgtgctcaggtgaagcccacccgtgtctgggagagccttggcttttcagtgggcagcatgctcaactttacttgaagctcccaggtgccaaaccatttagtgccttggctgtttatcccactgccttggaagatggactcctctcatctctgagcctttacctagctgcttcctcatctacctgtggtgttgggaccaagcctccaatatctctgaatagcccactcctagcttggaaacagctataagggctgccctgccccttgtcaaatgatcaccaattcttggtggcttggctggggacaatgaacagtgtctgctggggtctgtgacacactgtttctggaacaaggaagggatggaaggctctacccctccgtggcagcccagcatttggccaactctgtatctgaacttgagctttctatggaacaaacaatggtcttagttttttaagagcctctgggtctctgattccatggagagtcaggagtagaattagtggaccagaaaccatgacatttgccatctaggtactctgctgttcagggtggaggcacagatgagcagagtggggtgatgttggttgtatgtgcatagaagtcccctggctccagagccatccagtggtgcttggttctctcttcctgcccaggtattgtgtgtggaccaagtgtttaggaaacaagcatagaagcattatgtcacaggaaggcctggcctctcactccttcacactaatgagccttctactgacccaagtttctttttctcgggcagcctgggaccactatgagcagagagatgggagtctgtgtaagaaggatgcaagtatcctttgatttggagtggacagagcaggtccttgca

SEQ ID NO: 56797 - DNA, 1028 bp, Homo sapiens
atttagcaaccttgacctgcactggccctcacagctgttggagggaagtagcctcttgcagggaaatattttcccctgccctggaatctcctatgtgcctgttaaagattccagggccaagaactcggcaggctgaggagcagctaggtaggtgggttatgcggttcaggactgcttctggaagggactgcctgtacttctgtaccaccgttgccctttacactttgctcagggcggggtgggggaagcattcaaacaaaacaaggaagggaactgtctggcaaagcataagtggatgcatccagagctcagtcccctttaatcttttgtctctgggcgttctgctgccttcctcataccggggactggcattccaggtcagcttggctgtggtcttagaggcagggagtgcctacccagtcctgcctcaggagcagggtgagtagctaaatacagacttaggcttttttttccccccttttaagatgcttgctcctctcccttttctttttaccaccctacctttattgttagtggttacaaagtgaccacatattatgtactttgctgtaaataaagacagacaaaaaggctctcgccttctgtgtgatgcttggcccagagcagcgaccgaatcctggctgtgtggcccaagtggctcaggaagggccatgctgtgcatgtgtggtgtagatgtcactgggcctgctgtcacgaagcctcatgatcctggggtgtatgtggggcagaccccaggcctcacctgggctcagatactggttcaggttagtggacttgcagttcttgtcaagtgggaagcccgggccagggtttctgggagcctttggttcttaggacaacctggcgctatgttcccctgattccatccagtttacctggcctctgccccattgccttccttaggctggtgacccagccccttccttgctcaaacaaacccttttaaagtaaacttttttgagggagatgggtggaagatgaggaaagtttacattataacaacacaa

SEQ ID NO: 56798 - DNA, 1068 bp, Homo sapiens
cacccatgccccgcccctgctcctgggcccggccctgaccagtgctacttctcagctttgttcctttgcttagcctctcactccttttgagagctgactccttacatccttcaacactcagctccagtgctgctctgcttagggattcttcgccctcaacccaggctggcttacgtggccctcttagggttcccatagacgccatcattgcccagagctgcaacatgttcagatgatcggcttgtgctggtccctctgtactgtcaggtctctgaggcaaggaactctgtatgtttgcattcctggtggatacacagtaagtgcttaatcggtgtacgttggatgaagaaatgcaggtaggaccctctaaagcaggtgcctctataatatatgcacaacattctgggattagggattgaagagaaggactttgcaaatttttcttcaagttttcatgatattcaacagatgtctctgctccggccatattctggccggtcagagggccctgggaacaagctcaaaagtgagaaaggcttcctggatgtgatgagaggcaatggtgaatagtggcctataggcctgggggctgggagacctgcattctcatcgaactcatcctttacctgggtctcaagagacttcaggaggggataaactagttcagcggttctcaaagtgcagtctccatatctcaaagtgctgtctccagatcagcagcatcagcactgactcagaacttgttggaaatgcaaattctcagaccccaccctagaccttctggatccgaaactctacaggtggggcctggcaatctgtgttttaacaagttgtctaggtaacgctgatacacacacacattaaagtctgaaaaccatgggactagcccagtgctcctgaaactgtaatgtgtataagaattattcagggaacctatttaaatgaagatccttggaccctaccccagaaattctagtttggaaagtcagacgaaagcccaggaatctgcaccttgaacagatttgccctgggagattcagaagcaggtctacagatggtattttcatc

SEQ ID NO: 56799 - DNA, 1008 bp, Homo sapiens
gcttgggcaaaggcctgacgagaacagcacagcatgtgcacagaacttagttctgtctacacatccacagtctttccaatattctgagtgtcctataattacttttccttattttttcccttccttcctttcttgaataagagttctgaactcattacctccattgaggacctaggaactactagtttgaagtatcttcatggggaaattggctatccagccagaacatccccgtttctgaagaaaacctgtgggatgtgtcatttcaaactcagaagggcactcaaatgagcccctggcaagctgaaccttaaggataaggcctattccactccagccacactgagcctctacagctcttgatgagatcaggctcgatccagcctcaggtcctttgcagggctcatttcctcttcctggtaagtgccttctctaggtatctgcatgactcttcatctaagtctgtgtttcatctgctaccttctcttaccaccctattttaagctcctcaacaaactgcattcttatttcctgccttattttccttcacagcacttacactaacacgacatatagtttatgtactaatattcttcatcactccctaactcccaattagaatgctagctcctgaaggttttgtttgctttgttcactcctgtgtcctctgcacctagagcagtgcctgtcacataagtgttacgtaggtgtgccctacataggtgtgccctacataggtgtgccctacataggtgtatgtgtatatgtaggtgtgccttacatatttgttgaataaataataaatgaatatttatgagggctgaataatggaaatgaagagaggtaattgggcccattcttcgcgtctacttggttgtggaccacaagagaaattactgggaaactcctcagcttggttttcaagcccctgctccgtcgactctaagacccactctcctctttcctagaggcctcatgtccctctaccagacttaggtcataggcatc

SEQ ID NO: 56800 - DNA, 1079 bp, Homo sapiens
tggccagatggcttttgctgctgcccctgatgacatgtctctgtccccaaatatcccacattgtattgaagtgatctgctctaattctgtcccagaattagagcagggacaccatttcatgagtcttgttgtcgcctgcacccaggacagtaccaagcacatggcaggtggtgaagaaatcattcgaactgatggctcatgagccatatctctgaggtggcttttattactgactttgattgggactgcattcccttcaaaggggttagttttacccatgaaaggaccgagttaatagcctgtgaccttggagagctctcattccattgtccttggagtggcctcctcctttggttcctgacacctacttcccctgttttgtttttttcagcctagtcttcctgttgagtaagggttcagtttcagtgaggcattgctctgcctgtccggaacctgagaaggttcatgtgtcagtgtgtggacagatgattgtgatgaccaggcttagaaaatgttgtatgtttgtttgtgtttacgtgctcagaagccctaaaaagtgttgcatgggggattggacttttcatttcttagttttcacatggacatcttttgacctgtactggagttcagggccagaaagtagacactgggaagaagattacagggctctgggaggacaggagcagcattgtataactgacctgggtaggaacctcaggacctcacttttattttgaaagagctatttctgcaagaggcaattattggcttcctgtttggctttcgatcctcccctgcctctgctgttcaactttataattgctgccaggagggcgaagagccccagtgtggctcagggacagtgggagctgagtctcgaggagtctgtgcagcgctgccagccacagggctctgtaccactgagggaaagctgctctttaacccccaccgcggttatgttaacagagttcccttttccctggagagagctccctcctactgagtccaagggatactggtgacatctggagtgcagggccaccccataacacagggacataggcaccatcggtaccctc

SEQ ID NO: 56801 - DNA, 1040 bp, Homo sapiens
ggttagagactcctcaagcaccagatcctgagtcccctggaaggaagttggactctccatgtaatagagacaaaaagggaggtggtcttccacagtcgtaggtaaacccttctgctcaaagtctggagaaagacttaattccaagctccctcctggactggtggtgattggggtggaggcagccaatatatatgcagtctctgtctagggcagaattgaacttggagatggattgtcagtgattgcagctgccaaaagctggggaagtggtaggaaatgaaagaggaactgcaagcacttttcaaagcccttggacatgcatacatttcaatcttcacaaccctgtaaagcaggagtgattttctccattgttcaggtgaggatactgacattcagaaagtttaacattatatgtcacccagtaagagagagaaagacccagccttcagcctcaaaatcttttattccttctaccataacagaatcaggtgagatctcttggattccttccagatcacaaatatctgagtcttaggtcctactgtgcctaagttggttgacaggggaagataccatgaaacatcttggtttccatgtgttagcgttaggatgcacacataagctctgaactgagaccacctgggtgcattcccagctccaatacttggttatgtcaccttggacaagatatgtaatattcctttgcctcagtttcctcatctataaaatgggactaatattggtactcaatattgtagcctacataatgcaataattatcatgtattattgtgtatattacaccccatatgatgtggcccctcattgtctgtcatcctcatcttctccatcatcactccttcccagcctcacgtgccctcttaccactccctgagcaccccagcatgctctcacttttagacctttgcccagaatgcccctcccccagatggccaactccctcacctccatcaaatttttgctcagttatcgtcttctcagtgaggcctacctggaccattccctggcactcccagtctc

SEQ ID NO: 56802 - DNA, 1026 bp, Homo sapiens
agaaagagcacaggtctgggagtcagggaaccggggcttaggcctgtatctcccacttaaatagttgttctatcttgggcaatccacctcacttgtttgtcagttttttcaacttgattaataatacttattttaattaataagtattcagggtttctcaatagcagtactattgacattttggcctggttagttctttgttggagtggcagcagagggctgtcctctgtattgtaggatgttagcagcatacctagcctctacccactaaatgccagtagtaccttccagctgtgacaaccaaaagtgttcccagacatagccaggtgtcctctgaagggcagaattgtccccagttgagaaccactgcattaactcataggattagcaggatacattaaataactgtgtgaaaatataagacatcatggttgtcttcctccttctctggcattccagtcttctctgattgtctatacttacgtagaagcagaaagaagaaacagcatattctatccacatccctatgtggtccagcaagtgacttgttacgtccatgctttcacatcatgcgattcaggtaagtttgtccttttctaatgggcttgatatttactgtgtgtgaagagccacagaggtgagtagcagtgcctgttttcatggatgacacattctcatgggaggaatatttaagcacagaaatgactaagaccagaaaggcatgctcaggtgtcagagaggaagcacttcacagaggaggtgatgtttgggtttcagtagacagagataggctggtatagcctgaaggggcttgaatcagagggagcagtgacccagggtagaaagcacataggattagatgagaaggtagcaagagataagaccttgtgatcagtctacggaggcttggaatgccaaatgtgttcattgtccctaatttagcagtgacatggcatggccatagctgtgttgaagagggtcatgtggcaatggattagagtaaggagaggccagcacaaggtggct

SEQ ID NO: 56803 - DNA, 1547 bp, Homo sapiens
gaggaattgttctcagagttttggactttgaaaacaaaagaatgtgctttcaagatgtcattgctgttatactttatagtttatacattcctgcccactggtcttgctttttttcactttttcttctgaggcagttataagccgtgttgatacagctgtttagagaaaattcctatggaagtagttctagctggaagtcatctggggaaaattaacctctgtaggtggactgaactttttcagggaacgtgtagggacctcacaattgacctaattaatgtgtttgcatagtaacatacctgttttcattgtacatttaattagcttctttaaaaataattcttcaggtgaaagatgttaaaggcttctcatcctgccctgctgagcagagccaaagagcttgatagttttaggacaaataaaaggaagcagtactttacgctgtaggtagtaaatgtgtgaaaatcattactcctagaaacagtatgtgttgaaattatcaatagattctagacacgaacctttagagagcatcatggatgacagatataaattgagttattaaagggacattagagagcattttctaatcgttttaagttatcgttacgaatggatcccccatattctccggtgagccttgtgacaccacaatcaggaacagaatgttaggtggatgaatgctggtctgacctactgaggtattattaaattcatatgctccagtcaaaatttttaagccagtttaacctttttacctatttatgctccagtctttttaggtcagtttaaccttatacttattattattattattattattattactactttaatgttctggtgtctttcaaatggccacttcttcagaactctctcaaatgatttggaaaagctagggggtactcagcccaaccataagatgggaaacctgagctgcagtcctgcctctgccactagctagttgcttgactaggggcaacactgcacttctgcttcatttttctgcaaagaaagggagttggattaaatgccttccaaggccccattggcagcaaaatactgtggatcagtaaataaatattatatgcacactcattcagggagtccctagaataaaagaatagtggggtcgggggtgggatgggggactgctttgccttattttccaaaaaggataaagtagagcatttctcccttctgacaggagaaactgaatgttgtagggacagtgcagaaaaacccctgacagcatggggaaaccccccaaactttcttttctctgaacctgaggagggaggtagtggggagaacatacggtgggagttaggcaggtctgggctcagtcactcactgactctcagtctcccgttggtaaaatggaggtaagtacatgtaacctttggggtgatgaggatgaaatgagacaagtggcatgaagttatctcacttagttcctcgtataaagtaagggctcaataaataataatgtttagagaaaggagatgggagttccaaaacacggcaattataatggtaagcacctc

SEQ ID NO: 56804 - DNA, 1172 bp, Homo sapiens
cccagaattatggaaaaccattttgtaaacttcaagtcacttcctctccatagtacagatcaatggtagaccagtgatcagggaggatacaaatcatacccccaaaaaaggcttctttgttgtattttgcctcaagtgttttcttagagaacctcaacaaaccacactattttctagtaatcagccacttatcccaccatttgcagtaaggaaaactgaggcacgccttgatggcttattcagcatcagcagcctcacaaaagacagaagtctcctttggattagctttatcatctttcccttaagcagagatgatggtgcctttctcgctgctctggctcagttaagaagtcaagtctgatttattggtcatcctaactatcgtttcctgaaggcccgaagccctgtaatgctgttgtctggcttcccagatttatgaccatggtttctggcccccaacaatatctggagttcggtttacatattcacttccaccatccaatccaaatcctcccaggcagcaatcaagctggggctgattcctcatccatttgtgggctcactttttctggcaagtcagccttcattctccaggacgcttagaagccgcatgttggcggtggattgtgctacgggaaagagtgaatgtgtagcctgcacatttgaagccttgctggggtagagagcaacgctactgctcctggaatgtccaggccactgttagaaaggccatcttattccttagaagagtctagccctgctgcaggcttcagaaacgtgtgctctaagctcgttcctgctcatttgaagcagtcttctgaaaaggtctgcagaaacctgcctttaccctctccctcatcctgcgtggcctttgtcacatccttcctccaaggttcctctggtggtggtagtagggaggctgccacctggctttgcatgtgggaaagcccagcctcttccctccaacctcacagcaggacagccaaacttggattttttcatgaggaagcaactcttatgagctctctggttcagctctctggttaaaagaccatactgtgctgtttctggggcagcacagacctggttgatcgtgtccacaggaagaacagcctttgggattcattagtctggttaagaccagccctgcagcctcctctgccagctataga

SEQ ID NO: 56805 - DNA, 1317 bp, Homo sapiens
tgagagataacctctatgatacacagtcacctccagtccagatgtgtgtgtgtcttcgcacaatgatgacatgacacaatgaaagacatctcaagcttagggtatccagacccgaactctcgatccccactatagctcccactctaaatctgcacctttgccattcttcatcttagtaaacaacacctccactctttgagttgctcaagcgaaaccatctgtatgtcaccctagatacttccccacacatccagcccatcattaaatcctactgatcccatctccagaatatgtgtgtaatccagccaccactctctctgtctactgctaccatctcaggacatgtcaccattaactgtcacctgttcttgtagagactttctaactgaacctgtcaccaccattcttgtccccctccagtctgcctcccacatagcagccagagtgatgtattaaaaatgtagatgttattagtttcttgcttaaaccttttaataacttaccattgcaattggaataaaatgggaaaatctcttgcatgggaggccgaggcaggtggatcacttgagcccaggagttcaagaccagcctgaccaatatggtgaaaccccatctctactaaaaattccaaaaagtagctgggcatggtggcacacgcctgtaaacccatttactctggtggctgaggcacgagaattgcttgagcctgggaggtggaggttgcagtgaaccaagattgcacactccagcctggctgacagagcgagagtctgtttcaaaaaaaaaaaaagaaagaaaatctctttctgttctctgattttctgttcttaagccttgtcagccttcttccagtctttcaaaagaaccaactttatcccaactcagaacgtttccatatgccgctctccatctgaaatgtgcttcctccctgcactgctctagctacttcctgcccctcattccggtctcagccgctatctcctctgagaggctatccctgatctcacagttgaaattgggatcctcctgttcttttccttcaagatgcgctgttcttatactggttaccattactaagaatataattagtgagaatataattgtttacttaatttctgacttgtccattacagtgtaaatttcatgaaagcagatgtcatgtccatcttgtttatgaacagtgcatggcccatagcagatgttcaagaaacatttgatacaaaataaacgaataaactatttttctgacctcaaatagtctgtcctcttcaacaaataatgtctcttcaaagttagcttttcatgttaaacctaagc

SEQ ID NO: 56806 - DNA, 2559 bp, Homo sapiens
agaaaacctgggcaataccatcctagatataggaatgagcaaagatttcatgacaaagacaccaaaagcaattgcaacaaaagcaaaaattgacaagtgggatctaattaaacttaagagcttctgcacagcaaaagaaactatcaacaaagcaaatcgtcaacctacagaatgggagaaaacttttgcaacctatgcatttaacaaaggtctaacatccagcaactataaggaacttaaagaaatttacaagaaaaaaaacaaacacccctattaaaaagtgggaaaggacatgaacaggcactacaaaagaagacatacatgtggccaagaaacatatgaaaaaaagttgaatatcactgatcattagagaaatgcaaatcaaaaccacaccagtcagaatgactattattaaaaagtcaataaacaacagatggggacgttgagagaacgaggaggaaggagagaaaatggcatccatggattacagtacctatagccaagctgcagcgcagcagggctacagtgcttacaacacccagcccactcaaggatatgcacagaccacccaggcatatgggcaacaaagctatggaacctatggacagcccattgatgtcagctatacccaggctcagaccactgcaatctatgggcagaccgcctatgcaacttcttatggacagcctcccactggttatactactccaactgccccccaggcatacagccagcctgtccaggggtatggcactggtgcttatgataccaccactgctacagtcaccaccacccaggcctcctatgcagctcaatctgcatatggcactcagcctgcttatccagcttatgggcagcagccagtagccactgcacctacaagactgcagaatggaaacaagcccactgagactagtcaacctcaatctagcacagggggttacaaccagcccagcctaggatatggacagagtaactgcagttatccccaggtacctgggagctactccatgcagccagtcaccgcacctccatcctaccctcctaccagctattcctctacacagccaactagttatgatcagagcagttactctcagcagaacacctatgggaaaccgagcagctatggacagcagagtagctatggtcaacaaagcagctatgggcagctgcctcccactagttacccaccccaaacttgatcctacagccaagctccaagtcagtatagctaacagagcagcagctacgggcagcagagttcattctgacaggaccaccccagtagcatgggtgtttatgggcaggagtctggaggattttccggactaggagagaaccggagcatgagtggccctgataactggggcaggggaagagggggatttgatcgtggaggcatgagcagaggtgggcggggaggaggatgcggtggaatgggcagcgctggagagcaagttggcttcaataagcctggtggacccatggatgaaggaccagatcttgatctaggcccacctgtagatccagatgaagactctgacaacagtgcaatttatgtacaaggattaaatgacaatgtgactctagatgatctggtagacttctttaagcagtgtggggttgttaagatgaacaagagaactgagcaacccatgatccacacctacctggacaaggaaacaagaaagcccaaaggtgatgccacagtgtcctgtgaagactcacctactgccaaagctgccgtggaatggtttgatgggaaagattttcaagggagcaaacttaaagtctctcttgctcggaagaggcctccagtgaacagtatgcagggtggtatgccaccccatgagggcagagggatgccaccaccactctgcggaggtccaggaggcccaggaagtcctgggggacccatgggtcacatgggaggccgtggaggagatagaggaggcctccctccaagaggaccccagggttcccgagggaacacctctggaggaggaaacgtccagcaccaagctggagacaggcagtgtcccaatccgggttgtggaaaccagaacttcgcctggagaacagagagcaacaagtgtaaggctccaaagcctgaaggcttcctcccgccacccttcccacccccgggtggtgatcatggcagaggtggccctggtggcatgtggggaggaagaggtggcctcatggatcatggtggtcccggtggaatgttcagaggtggctgtggtagagacagaagtggcttctgtggtggctgggcatggaccgaggtggctttggtggaggaagacaaggtggccctggggggcccccggacctttgatgtaaccaatgggaggaagaagaggaggacgtgaaggacctggaaaaacggataaaggcgagcactgtcaggagcgcagagatcagccctactagatgcagagaacccgcagagctgcattgactaccagatttattttttaaaccagaaaatgttttaaatttataattccatatttataatgttggccacaacattatgattattctttctct

SEQ ID NO: 56807 - DNA, 1099 bp, Homo sapiens
gggaaggttaaacattaaaatgggtagaattttcctgttcctatgggcatgagctactctgtagctcaattctaaagcctttgcagtataaagtagtgcttcaaaaccggactatgcctcagcatcacctggaaagcttgttaaaaatgtggaatcttgggtctcaccctaggacactctgactcacagggactggtgtgaggagcagaagtgtttttaaggacttcttcaggtggtttggaggcagccactggttaatggatatctatccatgacagagcaactttgcataagcagcgcaaagcacagccattgcatggtgttgtggaatgacactggctctggatcagaggactgcgtccaaatgctagtgcgatcaattcttgcagcgtgaacttggcaaaatcaatggacactggggaaaactggagagcttgaagaggttaaacttttcaaccaatttaggtcgtacagggcatgagaccactccccaaaggacagaagagaaccgaatggggtgaactagaattgggaggaggcaagagttttgtttgggagtttggaaaaggtggagattggggatcttcgtggtactgtgagattttaggaagacaggtacagggagtttctgctgtatgttttacaatgtaattgacttcactaaagacctacacaatttcttaatgttgttgggtttggatttgtatttattttggatgtgacactatgctgagactgacctataggcagcccaattttactaagattataaatgtaaaaatgctacccttgcaggactgttgtgaggattttagaaaccctattttaaaacgtcttttaaatactagatgctcaaaaagtggtagccattattggaaaattagtaattatgaagtacctactatatactatatgttgtgttaggcactgaggatacagaaggcgaataaggagcacacagtccaagtgagtccattaacttttaattcaagaaaggaaaggaaatatttaatttaattttaaagtaagtatgtgttccagaaagttctgtgtatgatttacatattgccaggtaactgactgcataagctttgagtag

SEQ ID NO: 56808 - DNA, 1056 bp, Homo sapiens
cttattttacccacttcagctatataagtccatctgtgtttcaaagagtgacttatgtctcctgccttgcttccaaattaaattgtactcatattgctgaatcccattgtaattctgggatccctggaattacaatggagcaagaagttcttactattacattcaaaatcaccaaaattgcttttttttcccccttgggtcctccttgctttgagaaaccccatgaatccagcctcccttttctgctgacccttatattgcctgcattggatatcaaactgaattacattgagtttccatcttttcttcatttaccttttgcttttccctctccttgttagataacatttttgtgcacttttaatttcctaagctccttaccacctcagggacatgattaaaaacttccagaagaggaaaggagaaaaagctatgctaagttgcatttatgaatgttggcctgtaatattggtcatgagcttttgctcttctagtctgccacaattctctctgcagctcctgaggaagtgatgggagtagacagattcacagtgaacaagagatttgggagaccaagtgggcataaaactacgtcttggcctctatttggaaatctgaatgatggaattattatgtttgttaaaagttataccaaaaagccaagggttaattcatttaggttctctctgttttccagcaaatggaactctgatttaaacagctggggatgaaattcctcaagatgattattcctgaaagtgtggatgcgctggatgcgcagggaacatcaggaaaaggccacggggctctgaacagccccggtccagacagcagcctgtacatccatcccaggacacagcccagcccctccccacaccatacaaggtatcagaaaagtctaggacctatcatttcatcagagacatgatcagaaaagaaactgcttctgccccatttcttgttttggagattactccatctgtccatcaaaagaaacctgtaaatatgaaagaacaaaggttatttcctggagaaaagacaatttattcaacacca

SEQ ID NO: 56809 - DNA, 1028 bp, Homo sapiens
gggatttacatgtgtgagccatagcacctggctaaaagttgttttcttttaagaggagaaactcattataatccaaatagttgtcttcagttaatagactaagcttttcagaaaggttatttatggcataactcttctggttgatctgatgttttgtcaacaggggaatggtttttaaggaaagaaatgaaattgagaatcctatagattaaagtcacttgtttttgctgtgatacagcactgaagagtattagtcttggcatctgaacagcagaattcttgtctctgctcatgatttcatttgtccattcattttattcatttagttacttgacaaaactaatttgatggggtctataatgcacgagtatggtcaggtgacattggattttcaattctctgagccctattttcttcatctgtacttcaaaaataataacagttgtcccatgaagttataaacattaaatgaattctgcgtgcaaaccaatttaaatagtacaataatgtcttgatataagtggattttccttggtataattgaaacaccctgcctgatgctggctcccctattaataatggtagcctgggacgagttctgtcactctattttcacaggcttcctcaaccttttcttatatacttggctctcatgaaagtgaagagaaatcaagtacctaatttattttgtgcttatttcctatatatctgttgtttatgtggcttttgagagagccaaggttcttttcacgcaaggattttggttccaataatatcagatcttaaaactttttgtcctattttaaacaaagtttcagcatagtttgtctctttttaaaaagtcatttttgctcatgcctgtaatcccagcactttgggaggctgagatgggcgggtcacctgaggtcagaagttcgagaccagcctggccaacatggtgaaaccttgcctctactaaaaataaaaaattagccaggcttggtggtgggcacctgtaatcccaactacttgggaggctgaggcaggag

SEQ ID NO: 56810 - DNA, 1071 bp, Homo sapiens
cttttattttctatccatgtcacctctcctagcaatatgggtgaaccttcagaaccacttccttattggggtactctaacacataggtcttttgttctcgttttgtagtgaaagtaccgggagccccagataacctgggtgctctggtagcccagtgggtgatattagttcacaggatagattagtgtttatggttgtagtgttatttctgccgctgccctctccttgccttaaacatttgggaatcctggtaatctttatcttcattgccatgcccttaaaatgaacctaaaattttatctggcaatcaaaagattgcttagcagtaataacctgttttattatatgtattgctatttatttatatgtcttctctgaatctccaaatttattttttcccagtttataacagtacctcagatgctttctttttgttagagattttaaaatacaaatacttttagttgaattaaattagattctgatagtgagatttttatttcttttaaaggtactgcatcagtaattctctggccactctctttggaatccagctcacagaggctcatgtaccactacaagattatgaggccagcaatagtgtgacacccaaaatggttgtattggatgcagggcgttaccaggtaaggaactgacttttaagagctgctggtctctttagctgttctactcaatgtgattctggccaacagaaacaaaagatcagcctttgtttggttctttccctccccttaaacattattttgaagtacttcatggaatgtcaaacagttcctaatccagttgtgtcttgtgtaaaattcttttttctctggtatatttcctaccaatttaacaaagttttaagaaagttaaaactggtatttaatctttatgtaaaacatttccaaagatttattccaaaaattaaatatctgaatgtaagtaatataaatattctaaacatctacctcaaaaatatttaagacctgatttaggatttgattaaaagctatctaatttctctaccaccttccttccctccctgccgtttacttattagtaggcctc

SEQ ID NO: 56811 - DNA, 1015 bp, Homo sapiens
cgcccatcctagtgggcacttaagcttaattggggaaactgctttgattggttgtgccttcccttctctggtctccttgagatgatcgtagacacagggatgattcccacccaaacccacgtattcattcagtgagttaaacacgaattgatttaaagtgaacacacacaagggagcttgcttgcagatggtctgagttcttgtgtcctggtaattcctctccaggccagaataattggcatgtctcctcaacccacatggggttcctggttgttcctgcatcccgatacctcagccctggccctgcccagcccatttgggctctggttttctggtggggctgtcctgctgccctcccacagcctccttctgtttgtcgagcatttcttctactcttgagagctcaggcagcgttagggctgcttaggtctcatggaccagtggctggtctcacccaactgcagtttactattgctatcttttctggatgatcagaaaaataattccataaatctattgtctacttgcgattttttaaaaaatgtatatttttatatatattgttaaatcctttgcttcattccaaatgctttcagtaataataaaattgtgggtggaaattcttatttcttttttaatgtggattttgtttgcagtaagataaagcttgggtctcatggatcatctctactcaccatagcactcttctgcttcctaggggaggtgagacaaggtaacagatttgagaatcctggggtccctctgcttgtggccgcagtagggtcaggcagtgcctctagtggttgctgggaataggacagattcctgcctgctggtggaggtatattccaggagtctgcagtgtcaggacaccaggaggcctgggtgtcggtccacgtgcttgaaggaagatggtggagatgctctagccagttctgcttcctatgatgccccttctgagaaaggggcggggcagtcctcttgttctgtcacagagaactgtgacgcttcctcc

SEQ ID NO: 56812 - DNA, 1240 bp, Homo sapiens
tcttctacttgcagcaccccttggggtatatcacccccattttgtgctgatgaaacaatgacctgtccaagccataaaatgtgcattgcagccccaggacctgcctcccagtcctgtggttttccagtctgggagctcagggccgggcttcctgtggcatgactagagccaagtgtggcctggagcccctgtcacggggccagttcctcctgggctggtaaagccagcctgttcctgtaaccccctcagctcatgcgtggaacaagtctgtggcacctttactctcagcccagcctttcagcccagtgtcctctgcagctggtgggtggggaggaggtctggaggctgctcttcctgtaatgcacatgaggcccagctcccttgagggtccacctgagagcaaatccttcccctctgtcccctgctgccctgcaggaaccgggaagcctatgaggagccaccagagcagctaagagaactttccagagagagggaggaggaggatgactacaggcaagaagagcagaggagcactgggcgtgaatccccggaccacctcgaccagtgacaggccagcagcagagggcggcggaggaagggttaggggttcattctcccgcttcctggcctcccttctcctttctaagccctgttctcctgtccctccatcccagacattgatggggacatttcttccccagtgtcagctgtggggaacatggctggcctggtaagggggtccctgtgctgatcctgctgacctcactgtcctgtgaagtaacccctcctggctgtgacacctggtgcgggcctggccctcactcaagaccaggctgcagcctccacttccctcgtagttggcaggagctcctggaagcacagcgctgagcatggggcgctcccactcagaactctccagggaggcgatgccagccttggggggtgggggctgtcctgctcacctgtgtgcccagcacctggaggggcaccaggtggagggtttgcactccacacatctttcttgaatgaatgaaagaataagtgagtatgcttgggccctgcattggcctggcctccagctcccactccctttccaacctcacttcccgtagctgccagtatgttccaaaccctcctgggaaggccacctcccactcctgctgcacaggccctggggagcttttgcccacacactttccatctctgcctgtcaatatcgtacctgtccctccaggcccat

SEQ ID NO: 56813 - DNA, 1060 bp, Homo sapiens
accacatacatcacacactacacacacactacacacaccacacacccaccacacaccagacacatcacacactcaccgtaccacacacactacacacaccacacacatcacacactcaccacacacactacacacaccacatacacacataccacacatatgccacacacaccacataccatacacacactactctcacagagcacagcacacacacgctgcacatcactgacacaccacacaccacacacactgacacaccacacacactgacacaccacacacaccacataacacacagacacacacacacacatacaccccacacacctctctcatggcagaaatccagagatcagagtttttgatttccaaaggcttctttcatatgagtctaagctaagagatttggtttctgaagatcataaaagtaataatatcttctgattagaaagcattttcatgtaatacataatgtgcattatgtttcctgagcacttactacatatcaggcattctgttgtgggcttatatttattattagtacctcattttatgcttgcaagtaccctgtgaggcaggtactattatttctgattttagatgaggaaatggaggttgaatgaagctgagttacttgctaaagacaaattaataagtggcagagccaggtgtcaaacccagggtgcctgactgaattctgagcacttcacattgtgggccctgcctggtttaagcgtcctgcagccctggaggtggacatggggctccggcctgaagaagctcagtggcagaggttgtgcttcccaaggagtccagacctcccattcctggctgtctccactccactgtagtgcctctcttcaccctgactcttcttcccctgcagcctcaggtcagcctgtctccctgaagaatatctccacagacacatcgggttactacatctgtacctccagcaatgaggaggggacgcagttctgcaacatcacggtggccgtcagatctcgtaagagcagcctgcggggggagggctgacaaacgccacaggataactggt

SEQ ID NO: 56814 - DNA, 1048 bp, Homo sapiens
agttctagacctgaaacaggatttttgttcctgttttataatttcttaattttgtgaccttgagcagttcacttaacttctttaagcctccagttaactccatgaattggagattgaaatattgaggattgctggaaggatgaaaggacatcacatttgaggatgtgtactgagcagcacatccggagaaggaaaatcttgagatgcaatcttgcaggaaagtgacggtggggcggagagaggacaactcccctggttttgcccctagcaccaagtggcaagaggcaaagctggtatgattgacagggccagatctgtgacctgaagcttggacttgttactgaggattacgtctagtggttgctgggcagcccctgaaatgtctgaacagagcagtgacaggatcgtatttacaatttagagcgtctcttagggatggcgtgtaaccacctggtggcagcagggatcaggcaaggctggctctgcagcaaaattagaggaggtaggtctccagctcctctcaaaatagcagttataacaaagcatcttggatggcaggacatatacatatgcccaagcacaaagctcttgctttcaagatgaagaaattcataggatgatagattgaggggaaaggtcttccatgagatattctggtccgttctcttcgattcaggaggatcaggtgttttcactcctgctttccgaaggaagcctacagctcaaagaagttaaatggcttgctcaagtggcggcagatgtagaggaagagtctagacagtctgcctccgtcccaccccaacagcacacacattcaccaccccccataccacacacactacacatgcaacacacaccacacatcacacaccacacacattacacccaccacacaccacacatcacacactgcacaccacacatactacacacgccacacacaccacacacagtacacaccacacacaccacatgcagcacacacactacacacaccacacacaccacacaccacacacacaccacacacattacacactcaccacac

SEQ ID NO: 56815 - DNA, 1506 bp, Homo sapiens
caattgtggaataaagcctttgcttccgattcaaggcattcctgggaaaaggctgaatggtttggatgcgtggagagggatgctcccgtacctctgaaaagctcaagagataaagcttggctcagcaagcccatcctaggggtcctctgggaagtggtgttcaccttctcttgttccccggggacctgcttgttggctgctggtaagagtggtccttaagccgcagactccccctccccacactgctccagtcccagggtctggtgcaggatagatgaggcccggccttgaactttggacctcttatgtttaggaaccatccaagggaaagtgacaatcagggagggcctctaatttccctcatgctcgccccacacctggccagccctcactatggcagcaggagatgttgggcacacccaacaatagcctggctctttccaagaggaaatactgtggctgctgggctagaggggagtggtgtgtgtggaagggtttctctcagcagctgccgggtggggccgagatcagaatgcactcctgatgctcagcgaccgtgcacctggattatagaatgggcagcactgtttattgagcgagcaagccatccaaggggatgtgaaaagaaagacgcagaggagacaggcttgccacctagggattccaggagcaaccctctccactgtgtgtcctccccttctcacctccaaggacacgacctgaagtctcaagcatgcttcatgctgcttcttgcctctgagcctttgcacatgctgttcactctgcctggagtaccatcacctctttctccgaccaccactcccacctccaccactggccttgtttactgtcatgcttccttcacgtcacagctgatcttgggtttggggctgttttaggccttatctgccccagcagccttgcctcctgtctggtcattgttcagctacttgtcttttgcccccactagattccttgacccacccactgtgtcctccaagtgcccagcattgtcagacacacagtaggcacccagtgaggtttgtagaatgaacccagctccacaatggtatcttgacaatgctgagtgaaaggcacaggcttaagcttcccagaaatccagggaatcgggttggggttgtgagatgagggtggctgccgttctgggtaacctccagtctatgggcttccctctccttacctctgcgccctctgcctgctcgagtcccctcagtcctcatccttcaccctgcacataactttactgctgcctgtgggtccgcccatcatcccgtgcttatggcaactgcttccgcccatcatcccgtgcttatggcaactgcacgttatctgcaaagcacaggaggaggatggtgctgaacccagaaagaacattactaagaagttaagagtggaaggcttcagagatcacttagttcaggggtaggcaaactaggaccaaatccagcccacagactgtttttacatttctaacatactatttaa

SEQ ID NO: 56816 - DNA, 1808 bp, Homo sapiens
aaatacggcccctcaaggagattattgtgacaggtcctagcaggtcttctagcctggcggaggtccagggagggaggcttaggatatctttgatgggaggagggttagtgggcagagggtcctgggcagagccagtcagcatcagaaaagagcagaattgggaaggaccggtatccatggactgatccacagcccgagacacctttgcatctcccatcttgtttctccctcgcttgtcagctaagcttcctgaaagagctgtctgcctcaacctggtctgttgcctgtggttgggtagattgcaccctgcacaaggatatgtgcttcattagccaagccatgtatcccagcacaggctgtagagccccttattctaatgttgcacaaagcgcactgcacgcacaggtgtcagacttgacatcgggtctccacattctctgtccatcatggtctcgcttctatacctaatgctctacagaaatcaacagcaacctcttttttcgctcaattcagtacacttcattcagccatcttatttcatctctcattagcatttcacaccagcagccactttccaaccttggagtcttcttgtcttgactttctggaagtcttgtcttggcttttcctcttagctctctgacctctccttgacccttcaaatgaagtaacttggtgacttgccatttctctacttatttatcccgggtggcttcatctagcccatgtctcagtgaacatcgacatgtcattggctcccaaaccttcatccccagttgcactaaactgacctgtctggctcttactgactcctccacctagatggatctcccaccgacactccagataccccacacgtaaagagaacacattgtttattcataaaacattcccttcctttgtgtttcctctcttggaaatgacatcaccaaatatccaagccaaaaaactcttaccctggaagtctgccgttcccttactctgtccatcggatcttctcctggcttcatggtctcattggtgcccccactttcatactcctcaaattcatttcattctttccatctgcattgccacaaccttatctgaggacccatcattttttacctgaattgttaaactggtttcttaaccagtcccttttctccttccaagtcactttccatcctgtgttgagagctgacttcctaaatacatggctctctagcacttcagggtaaatgcaaactgtttagtcccatatacacgatgtctgagacctggcattgtagaatctccggacttcaggctctggagccacaatgcccggtttgaacctcagcgctgtcgtttacttaaacatcatgtgaacttgggggaggcctttaacttcttggtgccttggcttcctcatttgtaaaatgagtgtaatcatatacctactttaggggtgttgtgaagattccatgagataatacataccaagtgcataggctagtacctagcacatagcatacactcaataaatagcagctatgatctttattgctacctgcccaagctcaccctctcaccagtccctcactcacacacttacctccattcatactgaatgactggggttgatatgttgcttcccacatctaattctttctctgtggttcttcttttgcctgaaatgcccaacacctttatcctactccaacacttactctcccaatacccccagccctttgcctggctaattcttagttgtttttaggattcaaggcaactgtcacctctcctaggaagcctcccctgacttaccactctggaagtgatatttt

SEQ ID NO: 56817 - DNA, 1098 bp, Homo sapiens
tttaccacatacaaatgttccataaatacttgttaaatgagagaatacatcatcatcacaaccaaaacgatggcaggtaatgtttattgagagttttctatgcgccagggagtaataaaaatacttacacatggtatctccattaattttcccaataaatcaaggaaataagtattagagctcctattttattgatgagaaaactgacgctcagacaagttgacacagctggtaagaagtagggctgaggttcagggccaggcaattcatcatgctgtggggtggagtcaggtggaccaaggcccatgtgtttgtcctcatcgcagtcttggaggagaagctggttgccagggccaaggtggccaagatggctctagctgtggctggaggtgcaagaacagccctggacattccctcagtggtcctgtgggcagtgagtgggtatgtctgtccgtgtcgcttacttttcccttccactgcctactttctttccagtcagggtgaccgtcgatgccatctctgtggaaactccgcaggacgttcttcgggcttcgcagggaaagagtgtcaccctgccctgcacctaccacacttccacctccagtcgagagggacttattcaatgggataagctcctcctcactcatacggtaaggatactttacaagttcaggcaacatgggaatgattatcacctgaccaggacctcttagaaggcaagcactatgaagtctttccataaatggtagaataaacactagcacccaggctggagtgggtggggagggagcagtgaatgttgggctcatggagggccagagtatgtcacctttattttgaaaatgtcacctgcccctaaaatatctttctggtggccaatctcaaatgacctaaattgtatcatgcgagtcagtcactccttttgattagcatagcccttgctctgaggccaaattttatgggttttttttcctgtttggattcttttgggaagtgtggaggagttttgttttttttttctatttctatttttaaatagataatataatctcatggtttgaaaatcaaaacctcataaaaagtgtgcattgagaaggc

SEQ ID NO: 56818 - DNA, 1649 bp, Homo sapiens
tgagtagctgggactacaggcatgcaccaccacagtcgctaattttttgtatttttagtagaggcagggttttaccatgttggccaggctggtcttgaactcctgacctcaggtgatccatccacctcggcctcccaaagtgctgggattacaggcacgagccactgcgccctgccagcaaatgttttctgatagacgaaggtggtggaaagacaccagtcacatggagggtcatttgataagtcttggccactttggaatcaccttctggagcagcatcagtgacttgggaagccaacatttgaacaaattttcaggggcttctggcactggcatcaccatgaggaaaatatgcaaatgccaaagaggggaaacctgtttttttgacatcttcctgtctctcattcccaatatccaatactcccggatattataaactcaccccaggagctcacatggccctcactgtacagtgcccattccaggagggtggctgactttcaccttatgaaatactgcttaatgaagtatgaacaacccgaatgcttccctgtttcccaggagcgatttgcattttgaaagagaagtgtgttaatccagctggaatttgcctggatagtggagtcttcccagctgggcggggggacggtcttcagcaggacattttccttctttatgctgcagcctcatcatgggaacattcagtaagaacttgctcacccttctaccaccaaatctaccagcccacttgcacctttagccacatcctgttacagtgggtagacagcccggcatctcttctaaggcctgtcctcccataacaccgtacccccagccccatttgccctacaaggacatcatttctgtccccattctctcttggctcattctcatcatcaacaaacagtgtaaaagtattattttttaaatcatcatacacatattttgggaaaaagggcgtaaactcctcttgaccctatagcctcctttagctgctacagtctccctgctctcttccctttccagcaaacactgtctgcttcctcttgtcccatcagctcttgaactcactcctttcaggctccatccccaccaccccactgcatccactaatgccaaggccacctccatgtggccacatccaatgaccatctctctgccctcaggtccctggttgaacatgtcagcagcatttgagtagctgacctcctttgctttcaagaaacttttcctgctcttggttctcttcctgtctccctagccagattttcctacttctcccttactgattcctcctaatttcctccatcatgaagcactggagtgtcccagggttcagtcccacatgtctttcctgtcttcatgcacttccttagtgatcctcaacatcctctgaccttaactgatggagagccggtgactcccaaagttgtgtctccattccgtgcctctgtggcactccagacttacataactgcctcattgccacctccaccagggtgtctaaggagcatctcaaactttgcaagtcctcaaacaaactcctgatctgccccctgaaacttcctccttccttaactgttgtcatttcagtaaacgacaactccattcttccagttgctgaggccaaatccttctgtctattcctg

SEQ ID NO: 56819 - DNA, 1091 bp, Homo sapiens
tctaaaattgatctattctttagttataatcattagcaattactattcttttttgacagctcacccatggtgatggtgagtgctgcctcttgtgattaacttctaccaaggatgcacctccacaacagagtatgagacaaggaagcagaagtggctcaatatgaaaaatatatgtaatagtaactatcatttattgattatgagttaggaactattctaaacaaagtacccatttcatgtcacttaattctcacacggcccgtttctcaaaggaaaactgtgtggcacagaggtcttaagtaaactgctcatggttatatgtatagtaaagaaaggaaccagagttccaacaggggcattctagttctagaatctgtgcattcaaattctatgccatgctgcctcctgaaatggccatggagaagttgtgcgatacagagcggtacacgctccgggattaaagtatcgaagggatgtttctgaaccagaagaaagggagagttgggagacagaatgaacgagtggtaggagtggttgatgggagtatattgccctccttggaaggggatgttcagagaatctgaatacagccaattcggccattccatttggcagagtctcgcctctcacaaggatgtgaggctcctgagaactgtgaggtgctagagaatagtgggtgttgtttctatgcagttgccagccctagttcttttcctacataaaggtcacactgagttctcttctataagcaaatactgtacttagcatttggttaagaggatctaagtgtatgtgtgaagctagtctatgtccattaatttgccagggtaagaagatgactttgtgggcatctatcttatctccctgagtagagcagggggctggttttatatgctaggcacatattaaatacttgttggttgactgaagaaagcagaagagtttctgtgacaagattgaggggtgtgatgtggtcaaggaacaaaataggaaataggttctgttgacagccaaggaaaacaccatcctcctgtccctgcaggcaaaaattagcacttttccctgactgttgggcagcagccctataccct

SEQ ID NO: 56820 - DNA, 1100 bp, Homo sapiens
ttaggacaatgcatgtgctatcatgcaagagattgttatgattccttccttgcaggtaaaggcgcttgcacttctaacctgtatacccctggaggttaacacattgatacattattagttagtaacaccttacagtaaattagcttatccgatggatgctcttcttgagcatcagaagagctcagccttgacaaggagagtaggggagagaggatggaagaaagaaaatgtctagagcatgacgggcacagggcaaagggagtgactggatgggagagccacagctactgggaggagggtgggctctgggcaactggagacctgatattcaatgccaacctatacaaggaagcggaaagtgaggtagctggaagactctaaaaatgagcttcacttctcaacttcctaatcccagcttagatgtcctacctggtgctttggtctcattcactgagtacggatgcaaagacccccaggagagaaaatgagggatgcagtgctaataaggataaagcctgtggaaaaaagtaaaagaaactggatttattccagatggaggtgaaaaagctggtgattgcaaacatcagaagcctctaaagctacaatggcgaattattaaaaagtccagccagatgtcttcattgccagtaatgtcagaacaagaggatattgactgaatgggtggaaaggatttaggctagctatgaaggattcccaagatggctgttggcataaagttcttaaacacggaataacttctcgtctcaaattatggaaaatgtaagtgtgcctcagggcacaggatgagctttttaagatgcttctcaggtttacaaagaacattgaaagagtgctccacattttccacatttgtgcaagttttcttttttttctttttttttttttttttggagacggagtctcgctctgtcgcccaggctgtggtgtgatctcggctcactgcaacctccacctcctgggttaaagcaattctcctccctcagtctcctgagtttttgtaactacaggtgcatgctgccacacctggctaatttttgtagtttagtagagacagggtttcaccttgttactcaggctgg

SEQ ID NO: 56821 - DNA, 2110 bp, Homo sapiens
ataagcgccaggcccagcccacatttctggctgcactggccatgtatggtgtgatttgagttgcttgtaagaggatcttggtgggggcaggcaatctggctgaaagggtggatagcaggatttgtcctcaactacttggatgagacaaggatgctgtttttacttgtcctgtatttggacaagtttatttggattgacagtgggaggctaaaggatatcatatggggaatcatacacccccaagaaacctccctggtgccatagctacacactggtttgtgttagtttctggaacatgcctcgccttctgccaccccctgacctctgcatgatgcccttccctcacatctcttctcctattttctcaaggttcactcctgcttatatttcaatctcagctcaaaaggcccttcctcagggcaccctctctgttatatcctcccatcatatgcatgacactcgttactatggtggttttacatttatttctatgattatttatttattaccatctgacttccctggaacagtgaacgccgtgagagcagcaactgcatctgtccctgccccacgttgtatccccagagtctggcatagtgcccaggacacaggcacccagcagccgtttgctggataggtgttagtgaatgggtgccgacccttctgaacctcccctagcagcaggctgactggcttcaccatttcctatcctgcctttcctgcttttcttcctcctccaggctgcccctgcttgtctccaacctctgtgttcctaatctcacttgcttctctcaaaatgttcctgtctcacattcctttcctgggtttgatagataaggggcactagctagttagggagatggattactccacaggttaaagtgacttagagaaagtcacttagtgtgtcttccctgcctctcagacatcacctgcattttagcaggagcttctgtgccttctgtcaatggtggaagtttcagtattgcaagagctggtggaggacatagtggacttggggggaagttcagttgcccctcaagccaccccgggttggcagcactcaggttttgccctccatcgtcttctctctgcctgctctgtggggcttgtctctgttcccagatcaccctgtcccctttctgcctggggcaccaaccgtcaagcttggaacccgcctccttcctgaggtgtttccctctcctctcctacccagtgacctttggactgcttcctcattttctgccctggtgagtcagggatgccataaacaccaggcatgggcagaacatggcgacagacagacgcttcccattagggccgtcacaaagttcactgggagaggagcataaaacgtatatctgttggctagagctcacgccctgcacgtgtccaccaatgtatctccatctgcatttggggaacaggtgacacttgccgtgagcaaagctggctttccaactgtgccctggcccttcccctcctctcgggtcccctcccaggctaaggtcttgctccatctggtgtctgctgcactttcagactcttccttgctggcagcaccttccctataacctacaaacccacctccatttctccttcttcaatcccaaaggggctaaagaaatctgctcaggatcctctgtgcccctctggtctcagctttctcatcttccagtgttaggtgagctcctgacaaaataggctgccctcactgtctctactttttcacctcctagttggctttattgttaaaagagggctgtatgtttgttgcagagcatttgggaaataaaagtacacatagaagaaatctcagattgccccacgatctcagaatccacaggtaactgttattaatactgtattttggtgtattttcttctagaaatattctctctctctctctgtctgtgattgtgtaggactgggacactgttgtatgcacagttttgcatcctgctttattcccttatatatgcagtccaacaccgtgaattgaatccctcgggttctacctcctcaataagccttcccattaaatctcttttcctggttttaactcagctcctcccctacacacctcactcccttaacacttccactttaa

SEQ ID NO: 56822 - DNA, 1040 bp, Homo sapiens
tggatgaaccctaagttatcaccaaaaaagccgccatgcgctgccccctccacaaggctgttagagaaaatgctccaatgtgtgcacaaaatcaaggcacttccattccaggattttttttcagccaccagacttcatgaaagatttgatgtgctgcaatgtgccgctgcatgaaaagggatgcataaagaggcaagctccaggagacaaaagtcactgaacagctctgctcagagccagtgaaacctttgaagacccaatctctcacacacacacacacacttacttacacaccccaccttcctagaatgagaggaagcttccttgtttttctaagttaaatgagaaaaactcaggagaactttaacctgggaaaggtgtaaaagctttcttctctctagaaaaaaatgttttttctccccccatataaaaaagtttcagaaaacccacaggtgcttgatccatgaagagtttttgaagggaaccaagtttgcaagttgctgacattttgaggctgattgtgccattttagaacccttccctggcatctttgttagaggcacaatcccagcaggaagatttttcctaaatgtggtgccctacacttgtctgctctgaagtgccatgttcgtgtggatcacacaggtgtgggttggtccctggggtctgccctatcacgatggcctatctgagcccagtgtcacatgtctaagctctgtgcagtggcctagcctaagatatgtggtttaggggcttagcctcagatgtgcacttctgatgagaccctggacctcaagagggtagtatttgggccagagccggggtggtgtcagcccgcaaatgcaactgcaagataagcggcccgcccaccatctgctctgtggccctgggtcctgttgccattccaatcctaaattagcctggctccccgctggggcctgggccccacctgctggcacctgagcacaagtcagaagccagtgcttgtaggaagagctcatgcacctggaatgaatcacattgcctccctgtcagagacg

SEQ ID NO: 56823 - DNA, 2739 bp, Homo sapiens
atctcttgcgcactgtggggtggaggctgtagaagaggagagaagtagagaaacagatcacattgtgtcttgaagtgtttcagcaaatatgggcaacacccttcttttactagcttggaaccctacctctgagtgcatttccctttttattatttatttcctgtcagttataagagaggcctacccctttgtgagcagtctaggactttgtacacttgttaagtagggagaaggcaggggaggtggctggtttaaggggaacttgagggaagtagggaagactcctcttgggacctttggagtaggtgacacatgagcccagccccagctcacctgccaatccagctgaggagctcacctgccaatccagctgaggctgggcagaggtgggtgagaagagggaaaattgcagggacctccagttgggccaggccagaagctgctgtagctttaaccagacagctcagacctgtctggaggctgccagtgacaggttaggtttagggcagagaagaagcaagaccatggtggggaagatgtggcctgtgttgtggacactctgtgcaggtgagtaggccccttttctctccagtgcccaggggtgggtgagacatggggacctagggctgaaggagaggctctgtcagagccttcccaggaagggcctccagcaacacagctgcgttcctgctgggccagaattacacattccggaccagtgcccagaatcagaatggtttttatttacatattagtaaataacattctagcccactgctgaaatgaagaattcaaagtactctcaagaccatattttcttatcccaaattagattataggatcagacacaggatttgacaatgtggacaaagtatttgaaatcggagttgtcctagaaaatccaggatgtgtggatctagatatgttcattatctagtatattaacgtttgtgttaaaaccagagaaagagacaggaaactgaggcagaagagacaatgcaacttatcccgtatcattcacagagcaagagaagattcaaaccctaaaaacaaacaacaaactagatgggtcttttccaaaggccaaagctccttgccacttctgggaccctggtcattgaaaattctgggactctgagcatttccctctgggagggaaacctcccagaacaaaatcagacattcatgagtatatggttgaatccacatcaagtgcttaatagcacagtgttctgtggggacctatggagtgtctaagggttagaatgaaagtcttggcattaaggtaccaaccattttgctgggcattggaaggaaatagaatggagagaaggaagttgagagacgcagggtttggcaaagtttaggaatatctttggtttagtgtatttggccatcaccttgcaattcagacactgttgagggcttccaggatccagctgcaacggggaggagaagagctataccaggaaactcaggagcaccaagcctggggaagtggaaaccaggagactggtttagagctcactttttagcatacacaggaaagccccgggccacggggcctacagctcattctggttctcccaggccctagacatgcttttctctcaacacctggccttggggctctcgagggaagggcagcctgctgctggggaagggctggatcacacggtttggaggaagatctgggtaagatcattctctcaggctggctcaagttcatctgactgaaggcagaaagcccctcatcatccaccaagatggactggttggctcattcctttatccaaacaactctttactgagcacatagtttgtgcaggtgccatagaagtgaggagtctggaatgattagtcataagtgggcctatctcagccatcagattcaggcagggaggatgctccagggcctgagagagggaggctgaaggaaatacccatccttccctggctgggccagtgattctcccatcttctcctggtaagccagaagctcctccatgcctgcaccaccccaacccccaacacatatccccacacttgtagactggctgcgacccatgcatgaataaaaataagaaattttggcttagaaaaacgatcttaaaacaagatgctcacccagcttggagggaaaagtggccgtaactctgaattgcctggagcaggacattttgcttcttcctatgagaaggcaagtgacccctggggaactcacccagcagaacgagtcttgggcatgttttcagacacactgatgaagtgtcttctacctccgccccatccctcccaccacagcctgcccagcacagaatcacgtgcccaccaacttttcttcctccatatcttacattaagaggaagaaggggccagagcagtggggcaggagaagccaggcttggtggtcgacttgaggtatataaacagagtttaccaaatagtgaaatagccattgccactgcaggtgagcaaggaagaccttcaaaggtcgaccaaaagcaaccaggcggccctccccaccatgcctcatgagaggataccacctcttcctttgcgcaggtaagggagacccagttaggagcagggacattaggaaaggcttcctggaggaggtggagcttgacttgggttccagaggacttactgggcttttctcttctttctcttcccatctgacctttccgaggaattgattctgctaagacctgggcagggaagcactgcactgatgaa

SEQ ID NO: 56824 - DNA, 1028 bp, Homo sapiens
tataaaaggaggaagaggaaatactgctgtcatatcattaatgaacatgttgacccaggatgtgaggagtcctcctagatttgaccttgatttgtctctctgagagaaatacccttgtctattgttctctttgacctctagctctgccctcctagctgtcttgcttgtccattatcctccatagccacgttgaagacatgtcttccttgaaggctgtatagcttttgcagactgtgtcctgtttatgaaaatttggtggctctgggactgttttaaggtttatgccatgcaaaagcttttggaagttcctggtttctttgaaaatacgaccctttcaaaaactcaataggtttatgatctatgtagattagacaaatccatgtgttactaaccacactcaaagttctttcctagatatagttttcaatcctgattcattcatttgcctttttgtctccgtttaatgatagttatcttgggaggttatctgaaactgtaaatttgggtgtggagtccaagatgcatgttgtaatttgtagtgtaattgttagaaagttttgcagtggagtgtatagctaacaagctcatgaagggtggataaaataataaaatataatcaatctaaaaggagaaaagaaagtagagaaaaagaatacagaaaaagaacaactgtctccacaagaaactataggttaaaaaaaaaagaaagaaaaagaataataagaaaatagtaggatggtagatttaagctcaaatatataaataactacattaaatgtaaatagactaaatactccaattaaaagacaaagatggtcaaactcaatttttttaaaaaggctacatgctgtttacaagagacacaccttaaaaataacgatataggtttgtcatggtagctcatgcctgtaattctagcacttttggaggctgaggtaggatgattgcttgaggccccgagtttcagacaagactaggcaatatagtgaggccctgtctctacaaacttttttttttttttttttttt

SEQ ID NO: 56825 - DNA, 1069 bp, Homo sapiens
gctgcagtgagctatgaccatgccactgcattccagcctgggtgtgaaagtgaggccctgtctcaaaaaataaaataaggatatacaaaagttaacaaagaataaaaaatttatactacactgtttcagttactactgctcataacttcaaattttagtggcataaaataccattttattatgttcataatcaggagcctggatgaggcacagtggggttagcctgtctttgctccatgatgtccaaggtctcagctagagagatttgaagactggagatgccttaaggctgagggtgactcacagaggcatcttcacgtttggcagtttatgttgaaatttacctgggcttttggccggaatacctaagatagtccctctatgtgggttactttgggctttctctaagcatggtagctaaattccaagagttgcatccaagagaataagatagatgtgtattaattttcatgagctagcctcaggagttacatagcaccacttctgctgtactctgctgacacaaatgtccatgaagtttcaaggggaggcaacataaacttcatcactccatcagagaagtaccaaggtgatattgtaaagtaagcaaaagcaagccagtgaagcagattttaaagtaatcattactagatacaaagagacaaaaagagacacttcataatgatcaaaggttcaattcaccaaaaagataaaataattttcaatttctatgtttaataacacagcctcaaaatatataaggcaaaaaactgacagaactgaatgaaaaattaaaagccacaatctccctcaactgtatgtatattttttaaaactatctcagcaactgataaaataaaaaaaatcaaaagaatcatttttaataagaatatcaaaaattatcaagaatatttggataaaacaataaataaaattaacctaatgagcatttatagaacatgcacccaacaagtacaggatacacattcttaccatgtacacatggagcatttgtcaaaatagatcatatactgggccatacatatatcaaccaatgtttagtgattga

SEQ ID NO: 56826 - DNA, 1018 bp, Homo sapiens
ccaaagactctagggaagactccttccttgtctcttgctcgtttctgttggctacgggcgtttcttgcattgtggcagcataattccaatctctgccactccttcaaaaggccgtctgctctgtcttctcttctcttataaggacacttgccactggctttagagtccatcctaatttagggttatctcatctcaaaagctttaacttaattactcctgcaatgatcctttttccaaaaaagattacattcccaggttttggaagacataccattttggagggcaccgttcaactcactacagccctatatccagcccctaggaaacagaattttactctttcctgtggaactagaacagagccttgcaaaacttcacccagtgatccaaacagccactagcagccagccaaaattagcagggatgtaccctgcttgctgtcctggcagggagtcttaacatttcaagtctcatctgtaaatctcatcctagggtgaattaagaatctgagaaaggggtgtagaaaatggatggggtatcaaatcttcatttttgcctgagttaggcactaacttcaaacaccttaaattcaaacctagccactatgagtcactctctggaagaaaatgggcggttagagattcatccatctcacagctaggcaaatttccctaagtgattcatgagttgacactgaaatttaaaaccccctgtcagtgggggagcttggtggggacttctcccttacctatagtctccgtcaggccttcccagtcacctaaacaaatacagcctaagaagtaagtgcacagccgggcgcggtggctcacgcctgtaaccccagccctttgggaggccgaggtaggcggatcacaaggtcaggagatcgagaccatcctggctaacacggtgaaaccccgtctctactaaaaatagaaaaattagcctggtgtggtggtgggcgcctgtaatcccagctgctcaggaggctgagacaggtgaatggcatgaatcggga

SEQ ID NO: 56827 - DNA, 1013 bp, Homo sapiens
cagggaaagtcctggtcagcagcgaaatgggcatcagccggtcagcagtgctggtggtcgcctacctgatgatcttccacaacatggccatcctggaggctttgatgaccgtgcgtaagaagcgggccatctaccccaatgagggcttcctgaagcagctgcgggagctcaatgagaagttgatggaggagagagaagaggactatggccgggaggggggatcagctgaggctgaggagggcgagggcactgggagcatgctcggggccagagtgcacgccctgacggtggaagaggaggacgacagcgccagccacctgagtggctcctccctggggaaggccacccaggcctccaagcccctcaccctcatagacgaggaggaggaggagaaactgtacgagcagtggaagaaggggcagggcctcctctcagacaaggtcccccaggatggaggtggctggcgctcagcctcctctggccagggtggggaggagctcgaggacgaggacgtggagaggatcatccaggagtggcagagccgaaacgagaggtaccaagcagaagggtaccggaggtggggaagggaggaggagaaggaggaggagagcgacgctggctcctcggtggggaggcggcggcgcaccctgagcgagagcagcgcctgggagagcgtgagcagccacgacatctgggtcctgaagcagcagctggagctgaaccgcccggaccacggcaggaggcgccgcgcagactcgatgtcctcggagagcacctgggacgcatggaacgagaggctgctggagattgagaaggaggcttcccggaggtaccacgccaagagcaagagagaggaggcggcagacaggagctcagaagcagggagcagggtgcgggaggatgatgaggacagcgtgggctctgaggccagttccttctacaacttctgcagcaggaacaaggacaagctcactgccctggaaagatggaagatcaagagaatccaatttgga

SEQ ID NO: 56828 - DNA, 1050 bp, Homo sapiens
gttacaagttttccaaatcccagtcagaggaacaggacacctcctcctaccacgaggcaaatggcaactctgtaagaagcacttcacggttctcatcttcctccaccagggagggcagagagatgcacaagttctccaggtccacgtacaacgagacctcaagttcccgagaggagagcccagagccctacttcttccgccggaccccagagtcctcagaaagggaagagtccccagaaccacagcgcccaaattgggccaggtccagggactgggaagatgtggaagagtcatccaagtcagacttctctgaatttggagccaagaggaagttcacccagagctttatgaggtctgaagaagagggagagaaagagaggacagaaaacagagaagaagggaggtttgcatctggacggcggtcccagtatcggagaagcactgacagggaggaagaggaagaaatggacgatgaagccatcattgctgcttggagacgccggcaagaagaaaccaggaccaagctgcagaaaaggagggaggactgagctggggaaaatctgagaacactgaaagaaaccactcacgttagcatagggctcagggcacacgttgccaccactcatcgcaggatgaggatacagagaggatcttccagaggggcagagccaaaatgagaggtaccaagcataagggcagcagaggtggagtagggaggaggcaaggagggggagaaccatcaatacgaatacgaggtccgaatgcggaccaactgataccattttctgttgctcagcgccctctaagctttggtgtttcacttaatgtatttggcagtgttcatcacaggctagagaggtgagcttggaaaagcactgtagtttgtcagagactccagtttacatccagaaaggccatgaacataggacacgcttctgtctgtagaggcttcatatgagacccagaaagtctatcctatggcaagtctgacctctcctggcaatgctcagttctgatttttttttttttaatgttttgagtctccattaa

SEQ ID NO: 56829 - DNA, 1051 bp, Homo sapiens
agttaatttagagtccacagtctaagatagaagcacatcagcttcttgaagaattttcctagtgcagagtctatgcaacttagtataaaatggtaagagaaaattagtaactatgcaaatgcaagcagtgacatatagatgcttttgggaatgatagtaaaatccaccagattgttaaggcttattcagagtaaaaaccattgcaaagaattttacagactataaaatctttgcagtgagacttataaagaatagctatgcagcggagagactgtactgtccccagtgtaggtcacgggttcagatactatggtcacactctccttggtcagcagtgttatctttgaatacaaaagacaagaaggtacatattatgtagtcagctgtgaccatcaaaggccaaacagctttttcttccagctggagccatctgcctgactacacaatacccaggacccagggcagtctggtggcaggataccccaccccactacttagcccgagtcacctctgagagagcagacagggatttcttacagctttacacactgcctttgttggttgtttccaaggtgacaaagtgttctaccctttgctgtaaataaagacaggagcagagggatctaaccctttcctcctcctctatcagcctctgtcacgttcagttgcatgcttcttgtaaggctgtatacagtgaaagccccgtttcccagattcacacctgccttgggtttttttgtttgttttatgtgcatgtggaactttgctgtcggtcacagagccttgtggctggcattcaaggccctctggtttttactcctacctcactccaaaatgttttctcatcaggagaggaataaattcaaatactgttgaagattgtattatgtatttccaattagtcactgaatctctctgtgattatgttttcccaggccactgacatcaggtttggcatataacatgctttggccagatgtgctgtcagtggaagtaacatgtgccatgtctgacaaaggttttaagagtcattctcacagttctgccatta

SEQ ID NO: 56830 - DNA, 1061 bp, Homo sapiens
atgtttagtaattcagacctttaataacagccactcacagcccaacgccgtgtttatattttacattcgccccatgtgcttttgtggttcgatatgattttttttttccttggcaatccgcagggctctgagatcaaacccaggccgtgctgggaagagaggggggaagctgggccttggcttctctagcagttgcctaggcctcatgttctctgctgcttgatttatttactaataaccaaaatgactacctccaccaacttccacacactttcccctcctctgcgggcaaaacaaactctcttggggctttactagcattaaaacaggtcctagctaagtatcaactctgtgatggtttgttttctcttaaaaagactttcttatactttgcagtagtattgggcctagggggaaaaatctgtcctgtattttattttcagagcctatgaaatctattttggtttaatccaaatcactttgttttggggatgggtaccccggttgctccccacccccatgttaaatactttaaggctttgtaaaggtctgtagtatttgtaaaactgacactttttttttcctctaggagttgtggagtagctaaatattagaaattccaattaacaacagtttcataatttcttggtgtggtgctacctttctgacatcttcattctaatttaaaatggagctgacgttaattttgtgctatcattgtcatagacttgcttattttaattgtagcactactgaaaacaaaaaaatggggttatgttttctttgagtatttgtgtcatgattaaatgagtgaaaagagaagaataaacataggcattgcgtttaccctgatcttggaacttattctcctcccagcacacccgcccctcctctttaagttgtcagaattgatgttatgttttatctagacttaggacagttggcttgtgagaggcagattaacttttactgtttagaggaaacagtaattttgatttttggtctttcctgtggtaaaattttcttttaacatttttattttgtgtaggggtgtgtgtgag

SEQ ID NO: 56831 - DNA, 3175 bp, Homo sapiens
gctcttctcaagccaccaaagatgtttaatagacccttgaatatcttaggcaggtggttctgaaataacagaagtggaaatttgaatgttatctttaagtattttctattaaaaattgaaatatttgacctgcttcttgaatctgtattgcttcatcttgaatttatttgtgttttttaagttggtcactcattttcatgaatgtttcctttgtacttggaagactgtaatattatgtagtagtgattgccttgttgttatcggttatttttgttttgttttttaattttgaaaccccatagttgtaatctttgcatattagtctttcaagcaccattaaaaataatgttgtgtgactcattaatttgcctttatataattgtgttaattacacagtttttgtgattagtaaagacttgctatgaagcctgattttaagcaggaatgtgtttttcctaatgaaagtgattgcatttgaatttagaactattcaggtaatttgcgtttagggaacagaccaagtcacaaacaaaacatgcccccttttggttatccatgttcttgtttctgatccctccttaaatgctaaatgcctgagcaaatgtacttactatttcttgggcgttagagttgaaagttgttgatttgattcagtgacatatctgctttgaatttctgtaccctttctgcatgaattttttccttttcctttttttggggtaactttgagtcaccattttgcttacttcttactgtgttgcttaaaggatgtaaatatccttttgagtggttgaaagggataataattaaggttcacagagaatagcagtttccttatgcatctttcgctggacatttttgtgcattattgacatttcataagtaaagagaattgaataactgtagattttaattcttcttaggaataaattggtttgttttgtaccgaagtatttctgtgttctaaacaggtgatgagctcttataaactgtttcagcagtaataacaatggaaacaaaaatagcctgagtagagctattgcctgacttacttgatccgtttacagtatgtttagaatttggaatatgagaattgtcttgagtttcagaagttctgatttgaagatgctccttgcatacagtgcatgtggttatggggttctgtgtgtttttactatggggtgtgaattttttgagcattggtatctttgtatactcagtgactaatagagctcttttgtttttgggttttatttatttatttatttatttccaattaagcaagcactcaagatttcagtgttgcctacatttgctgacaggactagtaattgagcaaaagaagaatcagcaaacctctagatttatcagattatcttttattcatttattttctcttatttttaattttttttaagagatggggtcttgctatgttgcctaggctagtctaaaactcctgggcttaagcagtcctactgtggcctccccaagtgctgggactacaggcatgagctaccacacctggcccagatttcttttaaactgctggaactcctggacatttatccggagaggatacattatactaacttttttttaacagccaatgttcacattccacaaagctaagtgtttgtagtagctttactaagtcttcaatattgaaagtcatagcaagtgcagtttatcacattatttatttcataattctttgtaactttatgctttttatgttggaatatagaaatggtatatgaaattaaatcaataataataattattatggcaggtttccccccctctgttgaactttctctttgcaatagaagatataaacaggaatggctggaaaatgaacaatatgctgtgtgttaaacgactcatttgtgcttaaacatatgattaccttaatggagttgcactgataccttaaagggaatatatttttatatggaaaagtgacttaggtgttttcttgttttagtacacttattttagtggtctgcttaatgaaaaatacagccttttttggctgattcatactgcagcaagcaatattataattaatgttttaaagtagttaccatcctagtctataaaaggtatctgctatgtacctggtcctatgcctgtagtctttgggaataacaaggaaatatgactgctgcggaggagttggtatgtttacttaagcaggaaaaattgaaaaacagtgtatataattacatattaaaatatgtaacagataatgaagattggagaatagatcagagtgtgtccaagtttgaaagagccagagcatcctagaatatattatagctggaaggtaatttagatataatctttgctaaaggttttgcttcacagatgaggaaatattttcacaatggtttagtgacttgctcacagtcacttaactattcagtaacagataagaacacaagacttctaactttctcccacctcccagtctctcctcctgccccattgctgtcagtcagagaaggctttatgtagaaggcgagacttttaaaccgagctttaaagggcaaaaagaatttagaggaatgggaatacagagaaggccattgaaggggagattgtgttcaacattgtgatgtataggtaaagaatgaggaagcatttgttctatctgcaggaaagctgttggaggattttgaaatagggactgatgtgataaaaatggtgtgttaggagtaatgtggtgtgcaggatggtttgaaataggaagggagagattagatccatagaaaccagtgtatagaggtatttggtttattaactaattactgtaggtgctactagagatacaaacataatttaaaaattacttgacctcaagagacttccagtctaatttatgaaatagataagtcgtgataaaggtgttgaggatattgtccaattacattacatggaataaggacgtttgggagaaattcttacctggcctttacagtagaaactatttgtttttagtcttatggacactgaattgtctaattgacttagtttccttttcaaatcaaactacagtttgatttggtcaaatttaggtcagattattaacctgagaagcacatgcataggcaattacgtttgcatttcttagcctgattagtagatcaattttttgtccatgcatttgttt

SEQ ID NO: 56832 - DNA, 1064 bp, Homo sapiens
actatacccattttatagtcgagtaaaataaaacttagattaagtgactttctcaaggtcctgtgtttttataagcattaagtgtgggtaatagcaagacttccagcttagttgttatttaggctgtgtattaaggcactttggggctctattgtggagagctctgaatcctttgtgttggtgtaagagtttggattttatttgctaggcagtaggaagtcactgaattttttttttttaatttttttttgttatggacagtgccatgatcagagcccttaaagtttagcagctaattagatgcaaagagattatcaaggttttgagtttaggttatccagaaaagagcattaccataagcagatgtagggatgttgggaaaaggagccatttggggagtaagtcagtgaattcactttgacatgtcatttgagacatgtttgggtgggtcttattgggttgtagattccttgtgaaaattgaaaattttttagtgaattaaatgtttgataaacattaatactagggttgaaatttatgctcatgccactgtgcgtgtggactgagtattgaatctgaacgttgtaaattctagatatctcattttggctttggcactgtcttctaaggttatttccttcaacaatacgatggtgataataccagtgttagagggatgctgtggggagtatcaaattgatagcagaagcatttttaaagtaactctgtaatagtttttcttacatgagcacaggagtaaaatcaggaattttattacttgtgctgctgtagagaagcagaagctttagcagccgatggattctgtggggcacctgactgtaggttgttcattttttggtgcagccagcatcttaggaggaatggacactcctaatactcttctgaaaactttatacagtggaggtgttgcattgtagcaaatacaacttaccttgatttcagggcattctgttatctagcccctacccttgcctatgcattattatctttactacttccttaaatagcatgactcaacaattccatcaaggaagttcccttat

SEQ ID NO: 56833 - DNA, 1003 bp, Homo sapiens
catgacttgaaaacttttgtccttatttatcttaagggacctgtctgtccatttctttatctccacaaatagccatctgtcaaatctgagctcctgtcatactttctctgaaattagcacttaatttgtgttcagttacccaattcagcacttcattatacacagtcctattttcttctctaattgattatgtaagtaaatcttgtcctaagagccttgagtgcaggaacatactggtagggacagagtaggcctagacatttaacaaataatgaatgcttggttgatggacttagtggttctcaatctttgtcaccatggggtgacccatggaactttttcaacataagaaggcccaacttctaatacagtagaggtctgaaaatccatactttaaaaaagctctacaggtgatttgataacattaaatgattacttgttgcacttcaagattatttattgcttagcataccttgaataatggttttcagttaatgcaccagaaaggccctatactggaaagacagactgagaattaggagacttggatccttattctgcttttagcattaacgataatagctttctgatcctgaataaatcactaaatttttccaacccataggattcttattgataaaattatgggctgagctaggtgaatagttttcatactttttttttcctttttaaactggaattattcagaaacatcttttgggtgaagaccagtaaatataacatatatttttatcagttcggctttcatctgggtacctgaatatttattaaaaatatagaacatggtaagcttggtcctgtcctagtaggagagctaaattgtatgcagtaggtagtactgaagatgggatttagactttaaacttgaaacatcctattagaatgcgaatgaacaaaggtagtaagcttatcaataattgtggtactcagtgtgaataaaaactagattatgatgaaccaatatggccagtctttctgcatt

SEQ ID NO: 56834 - DNA, 1202 bp, Homo sapiens
agttggttgtatgcaaactgctgatcctggtaacccatacattctcaacattttgggtttttgttaagaattgtattttagggtaggtttggtggcttatgcttgtaatcccagcactttgggaggctgaggtgggaggattgcttgagaccatgagtttgaaactggcctgggcaacatagcgagaccttctctctgcaaaaaaatttaaaataatagccaagcatgttggtacttgcctatagtcctaactattctggatgccgaagcaggaggacctcttgagcccagcagttccaggctgtgatggactgtgattgtgccactgttctccagccaggatgacagagcaataccatgtctgttaaaacaaatatatatgaaactgaagctaattacacatgttaaccttgggataattttcatctggagcagcatttatatttttttgtgacccagttggtgaaatagaaaattaggatttaccctgtttacatgttattttgataaaaacataatttaaactatttcagtgttgtcaaatgagttgtgacttaaaattaatatgcaagcaaattatgcaaaaaggtggatttgtttaccactttttaccaaccacttcctttctcccataccaagctgttactaaactagggctgtagctttcagttgaggaaacatgacggttgattattgtttctaataatagctattattagaagtcagctatttcatggcattggtttccagtcattcacacctcatttaatcatgccctgcatcaccttgttgagttgttaatgctgtttatttctcaatttttcttttacactacattgctaagtccccccatcttcctcttcatagtgctttccctaccctctgagtacttgcttcttcatgctctggccaaggagagtggtgttttggcagactgttttatacatgtacacttatatgccaatcatcattagttagaaaggaattggtgaaaatgctcttatgttatgagagacatgttcaacatcacaatagtctgagaagatgaattaacaatttatgagtgttgctggaaagtatgatttcaggcgattagactataggggcaaagccattgccggcttatgctgttggaatcacatcttagtagttacataatgccatcaggaccagtacgagactggtttggtgattgagcccat

SEQ ID NO: 56835 - DNA, 1335 bp, Homo sapiens
ctgggatttgttcctatgtattgcagacagatgtccacgcttaggtgtgcatgctcctgtcatgcatgtacacataatttttaaaaaaggagtcatagtgcatatcctattatatacttgctgtttttcccccattgctctctattctttagttcactcatttaaataagataaacattttaatgaaatcatattctttgcagtaacttggatggagccagaagccataatcctaagtgaattaatgcaggaacagaaaaccaaagactggtttggtctgttctgctgagacctagtggaggaggctagtccaaaatagtagtctcccataaactttctttaacagaatatacacacttaaaaattttgtacatgtcgtcaggttgcttttagtaccactctatattttttatctacagtatttaatagtgtcagtttctcctgcactgttaactattagtcttttaaatttttcctaggttgatgaaaaacacttcattgctttaattttaatgtttttactctaatttggacatctttttttttttagacagacgattgctctgtctcccaggctggagtgcagtggtgtgatctcggctccctgcagcctccacctcccaggttcaagcaattctctgcctcagcctcctgaggagctgggattacaggcgcctgccaccatgcctggccaatttttgtatttttagtagagatggagtttcaccatcttggccaggcaggtgttgaactcctgacctcatgatccacctgccttggcctcccaaagtgctgggattacagacatgagccaccgcgcccggccgacatcttcttattaaatttttattaaattaaatcttactaaattttattaaatataaaatcttttatcattagttttcaaatgtacaacaatgatttatttttcctgttttggccgtttcagaatacttgtagttttcctgaaaatttatgacttcttaaatattctctttcgacgtgtgcctgccccacctccttccccgcagctaattcctatacctctttggagaagtagcttagggatgcaggtggagcttggatcagtctacctgttagtcacatgctttacttgcatcccactattagctgttcatttatagaaaggggatggttgcagagtctgggcagggatgggtcagctgtggcactgtggtcctggagagtcataccctactcttggacaaaaatgtttctcttagcagagaactggagtgagcatattttttttactctgctttctctaaaggcaattttaatttttaagtcaaatatatgggaggtagggataaa

SEQ ID NO: 56836 - DNA, 1400 bp, Homo sapiens
tatttagttttggggatggaaaggcttttttttttttctttaagctatgaataggactttatggaaaggcttttttgacatgacacacaactcaaatgccataaaaggaaaagatggatagatttaactatataaaatatttatggttctgccttctgaaagactctacaaataaaattaacataatatatggtagaaaagtattagcctgtatggaacatagagggataatttttcttactatatcaagttctcttagacattagtagtacataacaaataccccagtagtcgaagtgtatgaatagtcaattcatgtagaataagggctgtgaagatatgaaccctgactagaagcctctgctgtaaagacagaaccttctttaagtccgatataaaacaaaaggatgaagaattacaaaatgtatgctttggtagggcagtgaagaaattaaaatattagaaaaaagagtaagagttgaatactggccattgttttagaggtaattgaggaagcgtattttatatactcgtgggtaattttactactttaaaggtggaaaaaatatttaaaataatgaaataaatagagaagggattcctgctgttcctgatttaacacacaggacaacagataaatgattatgagcttatacttagcctaagtttgtgtggaaactgttagtttcttccaagataagtgtttcctagataactgaaaatctactattgttttaattcactttttcttgtgcttctgcataaacatatttaatatatgcctttggtgtcccaatgaagttcaccttttacagttggtttgaagcccttccctagaggtttgccaacgttatttctatgtggaaatccattcagaacccagcttctgaaacctttgctttggggacaccttgttctgtaatgaaattatctgaaaaggccgggcgcggtggctcatgcctgtaatcccagcacattgggaggcctaggtgggcggattacctgaggttgggagttcgagactagcctgaccaacatggagagaccccgtctctgctaaaaatacaaaattagcctgatgtggtggtgcgtgcctgtaatcccagctactcgggaggctgaggcgggagaatcacttgaacccgggaggcggaggttgccgtgagccaagatcgcaccattgcactccagcctgggcaacaagagtgaaacgccatctaaaaataaataaataaataaataaatagtctgaaaaagttctcacccaggagataactctcctctcctattttacacatctccctttgatttgccagtgtaaagcaataaccttagcagaatgatgtcttctgtcataatctatttgtcttcataagggcatgactcaaagaggtctgtag

SEQ ID NO: 56837 - DNA, 1077 bp, Homo sapiens
cttgaattaagtttcaggattgacagccttcattataacatgtcccatgtaattagcatcatgaccactatcacaaacatactgataaatatagtacaggacccagatttcagcacctgttacatagagccatttgtttttttcccctcttatccgtagctgccctccacaaatatggataatggaccgagagtagactgtgctgtgtctgcccatactctgaatcatattgccaatctcctactcatcctgcctcttgagaatcctgagcacaggacacctgagatagcaaaaggtccttcctgtagtaaaaggcttacagagtcaaatggctggagcggtgtgagaatatggactcaggaactttggaattgggagtacattttagattagaagatagcatgtaaaggaagaaggagagaatttttgtgggtcaggcatctgggcatggctcaggtgggtcctcacaaggttgcaattaagatattggtcagagctacagcctcatctgaaggttcaactggggaagcatatgctgccaagctcactcacacagttgttgactggactcagttccttactggtggtcgaaccgaggaccctggtttcttcctggcagttggccagaggctgttctccattccttgccatgtggacttctctggcttgcttcagagcaagcacatgagaagagccagatagtgttccagctggaaaggagtattagcaagacagagtcacagcttttgtaacctaattgcagaagtgacatctcatccctttttcagtattctgtttattagaagcaagtcacttggtccaccccacactcaaggggaaggggctacacaagggtacaaatagcaggagttcatgaatcattggatggccatcttacaaatccacctatcacctacctactgaaagccttcagtaagctttaagagcatacaggagccctgacacccaaaaattagagaactgctgatctaaatgtatgttacattggtggaacatgtatgggagatataataccttccttaaaaagttcttctctaggataagatcttgggcctt

SEQ ID NO: 56838 - DNA, 1098 bp, Homo sapiens
ataataggtaacatttaatatacagtgcttattatgtgccaattgctattccaagtgctttgtattttccatgtattaactcctttaattttcataacaactttattatgtaggtattataattatccccattttacagatgaggaaactgaggtacagaaagagaaaataacttgtctaggatcacatgatgagaaagtagaagaactaggatttaaacccatgttgtctcatttcggagttttggcttttattatgagaaaagttaaactctggattgcaccggagataagtacctggggtgagaaaaccttttcaattaattcttcttactgaaacacatatattattttcttaaaatctgaagcagtggatcctatccatttttttctgcctctgtaagaatgtttggcatcctttatcttctcatctccaagctttccctagtaaccagccctcttaaacttcagcattctcgaacttctcccttctgttttctctagataccagccttttgcttccccttatctccagacttctttgtaaactcctctaaactccctgcctctgctatataactttcattccctcctcatcccattgaaatctgggttctaaagagagatttatgaggaaacttgctaggcagtgtagggttatgccttctttttgtttttctaatagtgcttgacaggtcaaggtgtagaagtaggagtggagatggcagccctccaggattggggtctttgttaggatgtggaacagaaggacaggggagcaagggagtggaaagtcttgacaggaatgtcattcatggaccctgtggtctcagtagaatttagaaggaagtgaagacgggagtgaattgatggtctaggggaaaatggaagagcaggaggtcaggtgaattgcagaaaagctctttaatgggagtaaaagagccagaggtctgggagtattgaggtagtattgggagagtttaaagttttagaggaggaactgtcctgagtgatacatttcaagatctggtggtcattggtgtgaatgactgaagtgacagtcgtgagagttcatgctgactcacctacagtgaggatg

SEQ ID NO: 56839 - DNA, 2771 bp, Homo sapiens
atgactagtttatagcttttgatcttatgtgtaatgacactgggaagaaaacatgtatccctctaaggtagcatttctgttatttctatgcccaaagactgtgctgaccgccattttgccagaagctttgaacactgttgactgattgatgtgtacatctaattcagatttacataatctaattggacccttgggttcttaaaaaatggccttcttttatcaccatatgtgttcattacaatgcatattttaaaatgagatggcccaaagagcatgctatgatgaatttactgttgaaatacttgtgaaacttggataaacctaattatcaagggacagtttcacttaagagggcaaaagtttcacttcaaagaaaagcctactgctcttgcttttaatggtttgaattatgtttttatctttcatcagcccaagagtttgtacttcagggtcagaaacaaaacttggagcctctgtgaatcctgtaatcatttactaactctcttgtagaacaagatgtcattttttcctactattctgtttcattctttatttttctgcccccccccccccaaacacacaggagagtggaacttgggattataattggttaatgggttttttgggtttttttggtcttactctgtcacccgggctggagtgcagtggtgctatcttggctcactgcaacctgtgcctctcaggctcaggcgatcttcccacctcagcctcctgaatagctgggaccacaggtgcctgccaccacgcctggttaattttttgtatttttggtagagacagggtttcaccatgttgcccaggctggtctcaaattcttgagctcaagtgatccgccggccttgacctcccaaagtgctgggattataagcctgagccaccacgtccagccagaattttttattttttaagaaagaaagtttatcttaggtcctccttcccccataccccattttaatttggtgccaggtttgcctgtctctgtggagaaaagaatagaaatgttggctgagggaaagtttttatgtctcctctaatacgtatttcatttttttctatttgctccttgcttttctaatacaggtaggataaagaggcaacttcaggaatacccagactttagctccatctaggaatttttattggtttgttttttgactagagtgtagaatggaagctcttttggctgggttgggtccttgggcaaaatatttcagactcctgtattatatggtgaattaaattgcttcactggcactttttcttttttaaagcctgttcacactttatacagtttttgaagaggaaaactttggatagtgctctttcaaaccaggcaaatgcctcggtttcttttaaaaaatctttgtaaaataataatattagtctgacttaaaggttatgatggaatacatataaaacatttgggagtctcaattctatttaatgtaggttcgatcaatgttactaatgtgctttagctgcaatatattaatatttgtttcttagcatcctgaggctagccacttgcctcttgttcaccttactagtacaactaaactagtgtctggccctgaaggtgggcagaaaatattcattaaattgaattttgatgtagggataattctgtttctttgtgtcttgcctaagtttaattcatgtcatagtcatgtttcacatgtatcttaattcttactgcataaaatgttcatgcaaaaggcagtattaattttactcattgttaacaatcagcaagtactattcagagtctgactcataaccatagagtatcttgatgctataatcagaaacatttattatccctggctttagcagttgaacttacaggataatgtttagttctcattatcagagaaaaaggtgattcaggtaatttcttcatttgttcgtttctctatccctctaccccagtgtcttgaaaaaatatttagctagaatgctcaaaaatggtgtgttagcattcattttcttccattaggtgatttttgttgactatcattaatagcaatatgtaagacttactattcatttgcctatttattcattctacaacatttattgtttttctactgccaggaacaatttgaagtgctggatatatttagtgggaattggttttcttaggcagattatcatctgtttgtgaagctttttcacagtgtacgtgcctggccccaaatctaggagattcttgtttggtatatttggtgtggtgtaagttcaggcatctgtatttttacagagcttttcaaatgactctaatgcacgtttgcttttgagtaccataggaataaaacaagtctcattcaataggtactcaaaataggtaaatgcagtaaagtttcatagatgctgtaagagaaactgttggtatagtgtgggcacaaagcaagaagtcctactaggtacctcaggaaaggtttcctaagaatagaaatgcctagctgaatcttgttctcctaagtgttttagagtaggtggaacccatgaatctatagattagcctaagtaaattccagtatgcagggcaatgtgaacaaaaagagagaggtgtgaaacagcttacagcattttggaaattgcaagtagttggcatgattgaattactagatgaggatggttaaaaataagatagtttttatggtgctgaaaacaagcatacattaaagaatatgaagaaaggagaataagagtagacttgaactttagaaagatgacagtgatggtatgaa

SEQ ID NO: 56840 - DNA, 1035 bp, Homo sapiens
gagaagagagagggaaaagggagaagtatcaggttgtgaaggcattgcctgagtgtcagaaatgaactctacttctggctattctagttccttgagacaataaatttcttcttttttttttttttttgctgagtttgtgttgggttttctgttctttgagattgatagggtcctaactggtatagaaatgataataattgttgttgaagcaggagactagatgatggagataacataactttttagatgaagaattgttgaggatattcacaccaaataactttgaatttcaacttgagaataactgaggttaagtgagtaactgaaagtcatgcagctgagagtagaattcagatctcagaatcttcagcttagtgagtttataccatatcatctcacttacgccacccgaaaagttacgaaatgatagtctttggatgtgttgcctttgaataagggagagtaatttatttatttattttttccccttggtggttgtatttggaaaactttgggatgtagcagtacaatgactttcctgctctgaagagcctgagtgaatgcctattgatatattagagtctgggtgcactggttataactacacaaatctttattttgaggcagtcataattttgagttgcttcagggagagagatacttataaagcagtaaaaacctgtccgaatgtgactgtaccttttcactgtctggatgtgcttgtggaaaatgtctccctaggacctttaattttgttcctaaatttacaacagagccacttcttgatgctatctattgctcaaggtactgttggcgataagattgttattaagttgggtaggtgagctgtagactgtgtcctgcagggaaccatttattgttttgtacaagaataggtagtggtgaggaatcaggtctcattttgggcatcaaatggtctctcactttaaaatctgacattggcactactttttctttgatttaaacagaaagaccagcagatgttcatgtgagcatgaggataacttaaaaaca

SEQ ID NO: 56841 - DNA, 1032 bp, Homo sapiens
ttcttcctcctcagcctcctgagtagctgggactacaggtgcgtgccatcatgcctggataattttttttttttaatttattttctgtagagacagggtctcactatgtttccaggctagaggtagatgtttttaacttccattttacaaaagaggagtcttgagatttaggtaaaataatttgcccaaggttccaaagctaagctgtgattgtcatgtgtgtcaccgctgagatgtaaacataggcaagctgattctcatgcccccactttaaacaatatgttatagctccagatgaatgaatatgctcttacctctagttatattgtgactccagaagtgactgcgggtaacattttgcttcattttctactgtttcttatagcttgtgagcatctccatattttggagggagtgactgaaagacacaagaattagcaactttcttcatatttcttccccttctgaatgtgccacactgtatgcgatccttagcaattgtttgacaaccagttattatcaaacttgatcctttatttccttcatagcacttacaaattgcaaaaaaattataattgcattaatttgttttgctttcttctttactaataatatccagcacatacctaatggccaggtctatttgtctatcagtcagtgagattatatagatatatgtgtgtgtctgtatacacatgtgtacacaggaggacctgtgtaagctgttaatcagaggttggcaaatcttttctttgaagggtcagatagtaaatatttcaggctttgtaggccaagaggcaaaatcatggatactatgtagatacttatataacaagagagagaacaaattaccatgtactttaaattcagaaaattcaaaatataaacgaatagaatagtaattgagttaaaaactcttgcaatacaggtctactaatgagaagaatagaattatttggggaggacaacattttgcctaattggggtccaagtttagtgtttcttatcaaaacttttgcaaatgttcttctg

SEQ ID NO: 56842 - DNA, 1049 bp, Homo sapiens
tcagtgtactttgttcagcgaattgcgggaaacacaagatgaatcagaaaccgtatctgccctcaaagggactaagttcttaaacagtttaagttataaatatagttgcttgcttctgtgtacatacgtaccctcttagtttcacagagggagctagaagttgtttataatttaattgaggagatcaaacatatgaagaaaaatcattcaatgtagaatgtggtgagtcacaaagcccctggggatggattttgtacttgaggtgggttgaagaaagatgcttagagtggcagtaacaagggagctgggccctcaataaagaaggtaggattttgacaggtgggttaaggatggagggtggggttgcatttaagaaagaaaaaaacagtgtgaagcaaggtctggtagaggcagaaaaagctggccatgtttggagcaaaagtagttcaatttggctagaatataggagagaaaagtacataaattggggccagtttatgtagagtcttaaatatcaggctaaggtgtttggacttaattcagtagacagtggggagccactgaagtgttttgagtaatatgatctgagccatacttttggaagattaatctggttgcattgtcagtaatgaatgagaaaatgaaagtgttttccattgttggaacacttttttgttttctttataaacataactaaaacaaatgtaagcttagtgtagctatcaaataacactaaaaacctttattaatgaaaatgtaagaaaagatatgtttttgtatatccagctattttaaaaaacatgtcggccgagtgtggtggctcatgcctgtaatcccagcactttgggaggccgaggcgagtggatcacctgaggtcaggagtttgagatcagcctgaccaatatgatgaaaccctgtttctactaaaaatgcaaaaattagccgggcgtggtagcatatgcctgtaatcccagctactcagggggttgagacagaattgcttgaacccgggaggcagaggttgcagtgcgccaagatcgggccattgc

SEQ ID NO: 56843 - DNA, 1024 bp, Homo sapiens
atcttgactcactgcaagctccgcctcccaggttcatgccattctcctgcttcagcctccctagtagctgggactacaggtgcctgccaccaggcctggctaatttttggtatttttagtagagatgggttttactgtgttagccaggatggtcttgatctcctgacctcatgatctgcctgcctcgagcctcccaaagtgctgggattacaggtgtgagccaccgtgcccggcctactgtgtcttttttaaaatcttgggctttgaaataccagtgtggtaaactgctaatctgtgtttaccctgcaggtggcgctggtggttttgtggtgttcttcagcgtgactcaagtaaaattcccttcagctgggaaatcacttagatattggttctgcttgtagaatgttatctttcatgtaatctgttgaatatcagacattttcttactattatttcaagaaatacatgtagcaggaaaaaatctactaacaaattattaggatataattatattttataccttatttatctactttattattcattacaatttctgggaaaattaaatttatttcagcagttcattactttccaactcccttaaaattccaaaacttcatcaaaaaactggcagtagaactaattttttcaaattaattctctttgaagtctttcattttcctttctgtttgtgtgtctgactccccctttctttctctcagtctgtcaagttcaagagcagctcagatgccatgaattaagtggagcacaaaagggggaaaggagacccttttgaagaacaaaggcctcccattaggctgccatgttcttttttgaccaaaagtgcaccctacatggtttctattgttgtccacatgccctgcacataaggtaaatacagcagatcctcattacctcacgttttcctcctcttcctcctatgccacacacaaccagtgaagctttgggtctttgatgtctttaggcattcttatacagttgctttatctccttttaaaaacct

SEQ ID NO: 56844 - DNA, 1511 bp, Homo sapiens
tttggtgtcatggagatggctttactgtaggtttgttgtgttgcattacttttcattgggattgaactgagaaataacaaacaagctttaagtgggaaattaaaaaaaagaagtaacctatgtagatccaaacttaaaatgtgagaaattattgaaatttcattttctacaaacttgaaattagcctgctaattgtaaagttgttttaataatgctgacaaatgtcagttacgtttgcaaaggagtgtatggttctaggtatttgcctactgttaaccgttgagaaaaacattgtcaggttagcaagtctattgaaatagagacctccttagtttacagcaaagaataaatagctgatgactggagattgggactaaggttttatttatttatattctttgaaagaaatcggacagttaataagtggtttgtggtagagttgaaggatgtctgagagatggaaagagagtgacaaaggaggagaaggaatagtatttcttttttagtattgttttgaaattaaaactctgttattttaatatggtaaagagcaagagttgggttgggcgcggtgactcacgcctataatcccagcactttgggaggccgtggtgggcagatcacctgagattaggagtttgagaccagcctggccaacatggcgaaaccttgtctctactaaaaatacaaaaattagccaggtgtggtggcacatgcctataaatcccagctatttgggaggctgagacaggagaagcacttgaacctgggtgacagaggttgcagtgagccgagatcccgccactgcactccaacctggacaacagtgtgagtctctgtctcaaaaaaaaaaaaaaaagagtaagagtcgaacttaggacaacgtatgttttcttttttttctgacgttgagctaatggtgggcaatttgtgacttaacatttagtgaccaccttgaactctccctgagtttgtgggtctgcccttttaggattatagaggtgattcagtggtgttaaaaacaacattaaagggattaaagaagtaattcctttgtaggaacagtagtaacattttattttgaaaatttcatgaggaaatttttagtattcctatttttttccccatatgttcttcaaataaatatacatagcacattcaacatttttggtcctaagaatttcttatattaaaatctgactagcatagctgaagttaaaaaaaaaaggcctgttaactacttgaggaaatgttttgactctttatggaccctgaatattgcttttcaggaagtattccttgttttgtttttttgggtacagcagtctgcaagaagcctttggtttatgtacttggcagcaaaataaaaggcaaagagcttcttgctgtgtgttatgtaggaaattaccattcctgttgtctgtgtaggatgttctaaagatgtagccaggaatctcagaggagagagagaagagacagagagagagagacagacagagagtcagacttgt

SEQ ID NO: 56845 - DNA, 1116 bp, Homo sapiens
aatattaatacaataatagtcattagacaaatagtaaattttaaaaagaataaaaattaaaaagaacacctaactgggaaagtgggagagaagccatttaaaacaataaactgaaactcttttcctgagtttccttagaagccatttggacaattaatggagagattttaaacattaaatgtatttgtgactaaaacttgccttttcaacaagacacccgaactgccaagacttcacaggggtctcattgtagagaattaaaattcaatgatggttgaaagagaaaaggcataataagattggtcagacttctatatttattcaaagattgagcatgaaaagatttggagctttacagtatttcaaggaagtaggatgtgtaaaaagttgagatgggtggcttattttctgacatgagtagattttgatttaaaacattcaagctgtgccctggggagagggatgtgtaaggagggaaggaatctgatgaaatgaggacctcagagagtttctgtggaaggcttagaactggaagtggtgaattagtgaaccatcaagaaagagaatatttttatagacatttataaatttttatttccacaaacattggaaataatgtaggaataggcaaacaatggtcctcaggtcaaattcgtgttttctgtttttgtatggcccttgagctaagaatgatttctacatttttttgtgggggaaaataaaaagcataatatttcatgacattataattatatgaaattgaaacatcaatattcataaacttttattgggatataaccatacccatttgtttatgcattgtctctgtaatatctatagctgcttttatgctgcaacagcagagttgaatagttgtggcagagaccatgtgtcccataaacactaaaatgtttactttctgactttttacacgacaggtttgctgtccacagaaataaaagaatgtccgcagtatgttagaatgaacagtatacagttttttgtaagactaggaatacttgccattaataaattcattttctgtattcttatatttgcttatcaggaataaatgctttttttggtgaatggttttcattctgaaaaatgtcaaaa

SEQ ID NO: 56846 - DNA, 1054 bp, Homo sapiens
tcatatccgggcagcactgatgcaaggggtggtctcccaggtcctgaggcatctctgcccctgtggctctacagggtacagcccctcggctgtctttacaggctgtcgttgagtgcatgtggcttttccaggtacacagaacaagccgtcagtagatctaccattctggggtctggaggacggtggccctcttgtcacagctccagtaggcactgcctctgtggcgactgtgtgtgggggctccaaccccactcccctctacactgccctcgtagaggttttgcatgaggcctctgctcctgcagcagagtcctgcctggagtttccatacatcctctgaaatctaggcaggagctcccaagcctcaactcttgccctctgtgcacccgcaggcttaccaccacgtggaagctgccaaggcttacaacttgccccatctggagcagcagcctgagacgtatctgggccccttttagccacaaagaattttctttctcttggcctcaggccagtaccttttatgccttgcctattatgtctggcagaagtgtggcagttgttgggaaagtaactgggagctctcataggcttctgtatgaaaagctaggataaccacgttatgagtagtgtatggacaagaacttgaacttgtggtctttcccctctcatcagcttcatattgcttaagatagaaaaataagggatttcaaaatgtaagagtgaaagaaattagagtttgacaaagatataaaagccatagtttaaaataaatgtgttttattttcttcctgaataattgagcctgaaccaggagcatactgttcatgtttaatctctatgtgaaaaaacaagggtagtaattgtagagcaaactcttgatttattctgaatgaccaccagttactaactaaaaatacgattttccccaactaggttttcttattccttataatagttgaagagtaataaggttgagattttctttttgtgtgtttctttgctcacattaagaaggttactctatgcagaactttttgactacttttattagtta

SEQ ID NO: 56847 - DNA, 1098 bp, Homo sapiens
tttcattctacgacccagcaattatatctatcccaatggcctcagttactactcgctgatgccgcatgccatcctctggtgtcccacatgtcagtgaatagcatcaccttttttattccagttttccaagttaaagacttaggagtaattcctaataccccctctccctcacttcccaaattcttactgtactaaggcctgtctatttgacatcctttaataattttcaaatccatattctctgctgtcttagtctgagtaggattatctcccccttgcagcacaatagtagccctccatatccttgttaaatttgttctgtacactgaagctagggtactgtatcctatgaaaacacaaatccagtcatgtcattctcctccatagcattatttcctgctactcttaggataaagactaacattccccaggcctacttctccacctcccctcttatttttcaaaccctctgcacttgagccactgagacttttgttcagattctcacaggtaccatgctctgaccttttacttctctgcttagtcaatttccatttcattcttcacgtctcaacacaaagactgtttctatagaaaaagtgattattgatatatggtcttgtaagattctgttcttttgcttatagcatttatcataatttgttattatgtatctctgagactgaaaactcccaagagggatgggaccttgtctgctttactcactgctgtatctccagcacctggcacatggtagggatttcatagataatggttaaatgacttgagtttgtcctttctctagatctagggtatttgtcatttgtccataaattttgcttcaggaaattttagggctcagcataatctgattaggcttcaacgatgaagataatgttacatttatcattcgacacagtttaggaactaaaggtcaggtaaaatcagctaattcctgagctgtggaattgaatctgttcagattgtctgggaactttatttttacctgtcctgacaagtcttctaaaaaaagatacgttgacttagctcacttttcagcaagcgtttcagtgcttacaatacgccagacattttgca

SEQ ID NO: 56848 - DNA, 1049 bp, Homo sapiens
gaggaaaagaaatcattatatgaaaaagacgcctacacatgcatgtttattgcagcccaattcacagttgcaaagatatggaaccaacctgagtgtccattgactaatgagtggataaagaaaatgtgatatgtatacaccgtggaatactactcagccataaaaaggaacaaaataatgtcttttgcagcaacttggttggagctgcaggccattattctaagtgaagtaactcaggaatggaaaaccaaatactatatgttctcacttataagtgggaactaagctatgaatatgcaagtgcatacagtgatataatagacataggagacagacgtgggaagagagtgccagataaaaaaactacataatggttacaacatcactattcagatgacaggtgcattaaaatctcagaattcaccactatataatccatccatgtaaccaaagctattgaaattttaaaagacattttagccgttatttttgtggagccatgaacatgattcagaggctaaattgtaataaaagatttctcttaatgttctactaagttggttgcttggtgttatcataaccagtgtaaagtgaatgggccatagaaggccttcttctataccagggagaatagggaacctcttaagggtcgttgtaaattttttgttgtaattgcaggatgagtgactttgaacatgaaaaaagtaagagtctgtgaatagatgtgttatggagctgctgtttttaattcagaaagggagggtgtatagtaactgctttaatatgtaaaaatctttaaaatttttatttggtctaaaaagcattacaagtagaaaacttttttttttttagtttctgtacagttaagtcgtgagttggacaaagaatttttactgaaggaaatagattattggtggagactcaaagtagtaagggcagcattttggagttcatccattgagcctttttgcattcaggtaaaatgagagctaaactcaggccaaatggagagatggtcagaaagaatccagttttatgttacttctaag

SEQ ID NO: 56849 - DNA, 1075 bp, Homo sapiens
ggagttcgagaccagcctgaccaacatgagcaaactccgtctctactaaaaatacaaaattagctgggcatggtggcaggtgcctgtaatcccagcttctcgggaagctgaggcaggagaatcacttgaacctgggaggcggaggttatggtgagccgatatcgcaccattgcactccagcctggacaacaagagtgaaacgccatctcaaaaaaaaaaaaaaaaaaaaagaattatggaaagaaaagaaatatggaaggagttgtgattggatatactgaggttaaaggataaaatgaaaagtgtatcttgtagtatatatgaaggcagtgtggttagttactaggaagaactgcatccttgtatgttttttaaaaaaatcttacaagtagtgttgttaaaatgtatgactcaaacttcatactcatctttacatacatatttaatatgttgaaaaaattattcttctaaaaggaataaatggttaggtttgctgccctgtgtgggaagacatcagtgattggagattgattgtgattagtaatacattatgaatggtagtggattgaatgttctacgtgcaaggaccctcctgtccttgagtgattataaacaaacacttgattttcgcttggtgctttacatgtgtaggaatgacagacacactgaactactgtttatctctgcatatcttttagacggtgagatattagccaacagactcaattcaggagaccagagttttttttttttcattttattttgctgctgttcctcacctagttccaaagagtgggataaagcattgcattttctatttcatatttgcctcctctgaagtttgacactgtaagtcagtggttcagggtcttctaggggtttgttaaaacccagattgttgggcccccacctccagaggttctgatacagtaggtgtgaggtaggggccaaaaaagtgcatttctaataagtttccaggtgatgctatgatactgatccgggtactgccctttaagagtagctactgtgcactgttcacaatagcaaagccatggtattaaccaaggtgcccatt

SEQ ID NO: 56850 - DNA, 1046 bp, Homo sapiens
atgggtttaccacttactagcttgtgactttaggcaatttccccaatctttttgagacttaatttattcaattacaaaatgaggataatatatttcaggttattgtgagtattaaaggagatgatatatgtggcatgttaagcaaaatgccagctacacagtaactattcagtaaaatgttttttcttacagatgttaatcaaaatagtaaattttatctgccctacctttgctataaattatattaaaagttatgatagtaagtagttatagacacatacccatttctaatacattcttttatttggtaatttaaaaaaattatacttcattaaaccttttatcaagagaaaattatcatataaatgagaatactgaggccccatgagagaaaggtaaatctgtaaaggatggtttgtctccacggctcatactcttgagtcagtatattgcttagaggatgtaagactatgtatctttatcatctgccagagaggatacagggacttccctggtttctggtaaaggtataaatcaaaatatgaaaccaaataagaagacagttatgggcaaggatgaacagaaagtacttgcttctaaaaactaggtttttcgcttgcagagagggatcccttttgacttatcattttaaaaatgcttaaccatgggcaatggtaagagtgagaggcactcttaatttgtggtaaatggctgagttggactaatgtagcagttttcctgcctgtatgtcttttgctgtaaactctcctatacctggagatgcttatgttaatctctaaactgtacatacctctttatgtgaaactgagctgtggggcttccatgttcacccctgttgtatttaacacacttcatagtactcttactgaggctagccaagtagacttctgtagtatctcttaagaagggaaagggcagcattgtattctgtctgaattgtcagccagtctcctttttgttacttctctgtcccctgtttggactccatctttctttcttgttcagcactggttcctatgccagtg

SEQ ID NO: 56851 - DNA, 1024 bp, Homo sapiens
gttaaaatattggtttggaaggtctaatgtagaggtgaattgaaaatatattcttccctttaccccctatttctagagttgaggaattgggggctatgaaaaaaatctataaatttgtgggggatgactttatttttaaaaattgtaatagcagctttgctggcattagaattaacaagtttaaaaacttggtatgtgaaactaggaaaatacaaataaaagaaaggaggtaaaccagaactcatgactgaataagctcatgttttaaatgattcctaaaagatggggttttaagtacatttcttttaatcaaccatttgcaatcttttatttcctacccaccccacctcagtctaaatctaatgaagaatcgggggattcgcagcagccaagccagccttcccagcagccttcagtgcaggcagccattccccagacccagcttatgctagctggaggacagataactggggtaagtgttcactgagagaattataacaaactttttctgtgtcagaactgccattggccaatagctgattagaattgttcaccatagctggtagtaacatggctatgcctggcactattgtgtctttaaggaacttcctacactgtaggtagtaagttgctctgaaaaaggaattatctttgtcgtaagttttcaggatatcttttattagaattgtggatgctctggataaattaaaaaccttattaaacccctgtttcaggtgttgcttcatcatgcaatggagtaattatcatatggttgagatcattacactgaaaatggcagttatccatttggcattaagacatcactgcagggtagaagttaaagaatggattagtacctgcaaaagaaaaacatttttctttaagttactgtgtaatgatctaaaataaagcatgtggcttcatatcctagctctgcaacttaccgtatggcctaattacttcatttccctctacctgttttccttctgttaaatggagatactaataatacctatctcacatt

SEQ ID NO: 56852 - DNA, 1049 bp, Homo sapiens
ttctttctttctttttttcccagttaagtgtgttttgtcagtggacaactgttttaagaactgttgcaaaattgttcacaaaatcccatgagtagagatgtatgtatatatatattatgtaaaaattaaaaatatatctatactttatatacacacatatcccttgaagggtattgagtttttgaatggtttggttttgagccttatgtttctaatgcacaaattgtgtttgattcttttagaggaggttgtggcactaagtgactgtacatatacttcagaaaattatggttccatcttgtttgatcaatcagaacttgtcaccaaaagaaaagtagaacacatttactactttaagtgtgtttgaaataagttgcattatgaaaacaactttaaatatgctctaaatacatttcctactttactatttgggtcttgtttttggtgactagtgtctacaatagtaagagggagttgggattctaggttcctttggctggagcttctgttaaacctgggcattagggttcatttgcatgtaaagagaacggctatcaccacctgtttcatagagataatgtgttggaaaggagatgtaaagttgcagagactcagtgctttcaataacagaaaagattgtgttagggaggggcctgtagggagacttggaaaagaaacaaatggagctcatattctttagtcatatctttggacttaatggaaatgatggaatatggcagggattcatgctaatgggaagcagctgggccttatcagttctttccttggttatatccagcatccttgttcctcattcatctgactaatcacttgctgtttggttgtgtgtaaatgtattttcatatcttgtcagtggtgattcttttttttttttcttgcttactagttaattacttttttgcccaaaccctagggccctggacaagcttgaatgattaagtccatagtggggaccaccattttaatttaaatgttctgctagtaatggtagtttgatcactgatgaacattttagctgtctgctaagc

SEQ ID NO: 56853 - DNA, 1021 bp, Homo sapiens
tcccagcactttgggaggccgaggcgggcggatcactaggtcaggagttcgagaccatactggctaacacggtgaaaccccatctctactaaaaatacaaaaaattagccaggtgtggtggcaggtgcctgtaatcccagctacgcgggaggttgaggcaggagaatagcgtgaacccaggaggtggagcttgcagtgagccgagatcgcgccactaaaaaaaaaaaaaattaagaagcatacacaatagtaccaaggaggaaaataaataaaatctttaatctcaagaagaggaaaaaggtataagtagatatatcagtaaaatatatgaagagttattatgagtctaattgttagacagctgtctttatccgtctcagaaaagactcagaaatggacttaacttgtagcaagagtttgactaaccatttaaaaagaactaattaactgtaagagtagagaataaatatcagactagtctttatacaatctttatcaagataatgttttgattttggccactttctcatcaccaaataaatgtttttagtgcctaagctgtgagaccctatattaacattagtctaaataagataacgttcatgaaaacactttgaaaattataaaacagtaggccaatgtaaggtgctattgttgttagggattaaatttttatatggatagctatttttggttttaaaaaattgaatactttagaacatgtggaaaagggcaaaaaaattgaatactgatttttcagttgagttagataagctgttgtcaaatgtcataagtcattataggccctttattgatggaaattcagacataacacgatcaatttttatttaagagaaagatcaatcaaatatttaaaaactgttttctcacttgatttttaaaacccatattggtctttacatgataaaaaacagaagtatatttgttctgagggaattttaaagaaacattgaaaattaggcttatcataacaatatatgtcagtccacaaaaatagtca

SEQ ID NO: 56854 - DNA, 1109 bp, Homo sapiens
cttacattgattcccctccttggctgggtccaaatacagttggctctctgtattcatggattccacatctgtggattcaactagtccaaaatatttgggacgggggacgaaaaaggatggtcatgtctgtactgaacatgtatagacttttttcttgccattatttcctaaacaatacaacaatttacatagcatttacattatattaagtattataagtaacgtagagatgatttagagtatatgggaggatacacgtatgttatatacaaatatacattttataatttggaggacttgagcatcagtggattttggtatccaagggaggtcccgaaaccaatcccctgtgcatactgagggacaactgtatttgctttacatgtccaaagaggcttctaagatacaatatgttcctcagccatgttgttttttggttttaaactgcacctttttgttagccttttcctgcatttttaatgtatggtttaatgttagtctagaagctttatgatttctttcagaacacaggcctctgaaatcataattatatcactaaattgtgaagactttaaaagattgtatggaggattttgttatttgaagaatatctggtggtagacctcagtacttcatatgtaagattgagagagtaaagattacggggtgtattatattagctaaaaggggaaaagtttagaaggcttatttaaaaacagttttttgtagtgggggcagtagctctaatctgtaatcccagcactttgggagactgaggtgggaggattgcttgagcccaggagatggagaccagcctgatctctggtgggaccctgtctctccaaaaagtaaataaataaaaaatttaactgggtgtggtgacgcatgcctgtagtccaagctatcaggaggctgaggtgggaggattgcttgagcccgggaggtcgaggctgcagtgagccatgattgctccattgcactccagcctgggtgacagagcaagacactgtctctaaaaagtaaaaattaataaaaattaaaaataaaaataactttttggaagagagagggtgatggagacaggcatgcaagcacaggcacgcatactc

SEQ ID NO: 56855 - DNA, 1041 bp, Homo sapiens
aaaactttctgtgatgatggggtgttctgtacattggacatgggatgtccaatacaatagccactgtctacttatggctattgagcacttggaagggctagtgatgctgaagaactgaatttttaatttattgggttttaattaatttaaatagccacttgtggctggtggctatatgggaaggcagaggatatcaatcacttgaagttcaggtattctgggtgcctcattttgtcttacatttcaatatttctcatctgttaaactttttatcagaagttgctcaccaaaaagaaaatggggttttaaaaatatgttacttttttaacccaactaccacctaataaaaaatgtagtattcaatgtgctaataaaaaatgtagtgttcaaaagatggatttaggggtaggggggaatcaaaagactgggataatcccagttcaaacaagtgttgccaggatagttgagagttggctgtctcatagtaggattagttgtatagtactttggaccagaaatgatgttgcctttctgccctgtcactaaactaattgaaatgaatgggtgaatcatttaaactccgtgagcctctgtttcctgtatataaagcaactatcttacgcttttttcccagtttgatcaagagagattcagcaagaagaaaagctctgtatacatttcaaaggttataggcttatagagaaagacatcttttgtaatatattcagggcatcattgttctattgctataaggttactaagtttccattgcccatgaaggtttgactaaatgggtcaaacctctctactgtgaatttctatttctatgatggttacaaaagtagtcttttagaatacctgttttttgtaactaactttgaaatccaaactaggagtgaaaatagatttttttttcactgcgtccagaaatacttgatagggaaaagaagaaaagagatgatttctaatttttaaagtgatttttgggaagtttgattagttcgtaaatatcttgggttatctagagagttatacataata

SEQ ID NO: 56856 - DNA, 1413 bp, Homo sapiens
tagttgaaattttggtatctccatgattacataaggtggcaagaagagattcaaaatgggaaagtatgtgggacagtattgaacattgtaacgatcaggcctaaaagagtcctcacagtaacactgtgactggcttagggatggagtttatgtgggaccccgtaagtggaataattactgactccttgtctaaagcagttattggagcaacaccccagagtgaaggctttaagcactggtgagataactctgtctttcctctcctcttctcctgctctgtattgtgtgtagggtgatgttgggctcgctatggggaaactatatggaaatgacttcagccaaactaccatctctcgatttgaagccttgaacctcagctttaagaacatgtgcaagttgaagccacttttagagaagtggctaaatgatgcaggtaagtgactgtataagacatttctttgtcattcattggaattttacatggggattgttatataaattggggtttatatttcttactctatttttgttgttacagaaccttgaagcttactaatcctgggaggatcattataaattatggtgatataaatcagaaagctgattcatttaaatattctagtaattacagtataaataattagccgtaatttttagcctgaaatactcttgtatttgagccaggattaggaacacacacacacacacacacacagttgaaggaataggataagtaaggcttttgtatttagataagcttgaagtagaagcttattgtttcttccttgatgaattatcatagaacttgttcttgcaatagttctgcttttgttatttcaaatgaccacacatttcattcagaaaagttggactactagctttgtcttacgtttttttgtgctgagagttccttttggaagattggaattttgagtcacaggatcatagactatgaaagctgtaggagtcatgtagatcccttaaactatggttcttattgtagatatgaacaaaaattaggcctttggaaaagacaaacctgaaacacgcatccttggacagttttattcagtagctatgggtgaggcctaggcatctgtttcccaagtccacagataagaaccactggtttactgtttccatcttattttacgtgtagcagaaacaaactcagatgtgtatgacatgcccaaggttattaaactgtgaaattatagaaccctgtgatttaacttcagagaatttataaatatttcatttgtttcttttctttttaccctagattataccaataaaatgagaggccatttacaagataaatattaaacgttcagtaatttctaagaaactttcttccttttatccccagaacttataaacaaacagaactggagacatagagctgagtttaag

SEQ ID NO: 56857 - DNA, 1077 bp, Homo sapiens
atcctagcagaaagaatgccaataagggcagcagaaatatccatggtagtaaatatatatatattggggggatgggtggtgggtagggggagacatggtctcactctgttgtccaggctggagtgcagtggcaccatctcaggtcactgcagcctccacctcccaggttcaagtgattctcctgcctcagcctcccaagtaactgggaccacaggcgcacgccactgtgcccagctaatttttgtatttttggtagagatggggtttcaccatttagccaggctggtcttgaactcctgacctcaagtgatcctcccgcctcagcctcccaaagtgctgggattacaggtgtgaaccaccatgcccggccaataagcaatattgtaatgtaggttatgtgaaaaccttttcatacttggatgtagcttattttgtcagttttgttgttaatatgcatattatgcacatgaatcactgtgctcagctaattttatttctgtattttcttcattcttacagagaacctctcatctgattcgtccctctccagcccaagtgccctgaattctccaggaattgagggcttgagccgtaggaggaagaaacgcaccagcatagagaccaacatccgtgtggccttagagaagagtttcttggaggtcagtgaggattttacttttctgtacatgggattgtctgtgtagtacttaacattagtacttagtagaaactgtaggtggtaaaagatgacatgtcagcctctgctcttatggatgattataaataggtgaagtaagtaagttactaacataggagacagaaccagagttctgcagggttcaggagagactagaatcacatccatgcaagcactcagtatgagagaggtggcagcttaccataggatacataggaattaattccacagactagaaaaggtggggggaaagtactttaagcagaggaaatgcatgagcgtttccccctcagagtgggggagaaacactggagtgagggaaaccatagggtgtatgaggagacactctagtagattggttggttaaattgtagtgtctg

SEQ ID NO: 56858 - DNA, 5322 bp, Homo sapiens
tgagaatctaatgccgccactgatctaacaggaggcaggcctcaggctgtaatgcccaccactcacctcctgttgttaatgctttaatcacttcagctagtttgtcctttgaacagaggtagtttaaaatcagcagtcttcattaaagacaaaattattggatttatcaaatatgtctaggtaaatgaaataaactggtgatttcaagacacgaacatgactctaattcattagacagttattagctgtcttctacccctgcttgtgcccattaaattagacatttcagtcttttaggctcttcaaaattaaaaataaactacaattggtatcaatatagcactgtgtttgaggaaaaaaattcagtgaagggctatactttttcctggtgggttgtaggaaaatgatagacttttgatgtgttatttggcttctccaggatgatgttaatgttttcattcctgcctgttttggggggtttttgtctgtagctcttgcttctggtggctctcttccaataacatcacttgatgcaactgggaacctggtatttgccaatgcgggaggagcccccaacatcgtgactgcccctctgttcctgaaccctcagaacctctctctgctcaccagcaaccctgttagcttggtctctgccgccgcagcatctgcagggaactctgcacctgtagccagccttcacgccacctccacctctgctgagtccatccagaactctctcttcacagtggcctctgccagcggggctgcgtccaccaccaccaccgcctccaaggcacagtgagctgggcagagctgggctgccagaagcctttttcactctgcagtgtgattggactgccagccaggttaataaactgaaaaatgtgattggcttcctctcgccgtgttgtgagggcaaaggagagaagggagaaaaaaaaaaaaaaaccacacacacccatacacacataccagaaaaagaaagaaaggatggagacggaacatttgcctaattttgtaataaaacactgtcttttcaggattgcttcatggattggagaactttctaaccaaaaattaaaaaaaaaaaaaaaaaaagaaacaaaaaaatcaaaaacaaacaaaaataagtgaaaggactacttatcatttccagcagtcatgatgacaagttaaggtgggttaccaattccaatataggaaggggatttcttgtttgtctaaatttctttttttcttaaaaaaaaaaaatcatttttatgggtctgttgtacaggccattaagtcataacaaggtgtttataatcgtatcaattgtgttgggggttcctttcttaactggtacaatttaggcaggcctgtattactgtattattattgttgttgttgttattgttttatatatatagtttggacatgtttattatctcttgctcctggatcctatttcagtgagctcccacactgtggggagggagggttttggggtaaggggagacttctgttcttaactgtggggaatgttcttgctggtttccttatccttgatgactcttacagaggtgctagaaaattattttcttttgccacttatgcaagaggcttggtgcagaagctgaaggcagtgtgtgcaaacactcccattccacacacgccccttcccctccccacatcaggtggtgcctttggagcacttttgtgtaggaaggaattcctgctgaactgtagctctcactcacccccaaatcattgaatgaccctgaggcccagttcctgtggtgcaacagtgctgctttctgctactttcaatgggaacagctgtacatgttgcagggcaggatttggttcccaagagcaaagactactgcagacacctgacttggtggttctcctgatttcttatctcctgaaaaatgctcctgctgttggtgtgtttgtttgtttgttccattttgtggaagtttttcatccaaactttaactaacttggcaaagaaaaaaaactgacttactgaaattgggaaacttttcccttcttttattttctaaaggaattctactagactattttccattgataatatatacaaaagaggtgtgatgagaagggtataaggttaccaccttttcctctagagagccacagacttcctttccactggatggtttataaattcctctaaccctgagattcttcttggttctctgactaaaggaggcacttattagccgggctgggatctgtagaacctttgaagaaggactttgagcaggaactttgcacacaccttaagtgtctccttggtttgttcatgatgctcctgctaggtaggtctaaatggcaatacacatctctttattcaatgtagaaagtaattagctctgtaattattttcagggtgtttgtagactatataaatgagcccattgaaaaggaagagtttgtgaaagtggatgaagaggaataagggtaacttggagattaaattcctttttttgtcagtgtactgttgttatgccatctgtaccaaaaaattttccaaaagactggatcactgcagtgcagctcatctaagttccccttcttattggagttaaaggttcccatttggtggctgtgggtgcttgcttaaatctctggtggtcccaagactgcactttttctccctttcgagctggggatgtagagagaacttacaggtgatttttattctgattgcttttgtttgtgtccacaagggagcttggattctgtgtacttgtctctttcccattgtccagtaaggcagtaaatacagacacaatgtgtacttttgtgtgtgattcaagtgggagacagtctgttaaaaggtcagaaacattttagtcccctttaaaatatttcttttagtttatttctatcgtgttttatttcacagatatttaattaccacccctaaatttcctcctcttacccttcaccttccctaaaatccttccaaaatcagtgaactgcaagcagggaaactaacaaatgtccattcaccctttttgtgtggtgtgtttttttatgttttgttttgttttttaactaagcttgaaccaaagtcaatttttagcaagctgctgtactaatggactagttgataacgtgcagttcagacacatcgaggagatagatgctactgacaatttctttttcatttgtctttattaattttatatgaaagttgctgcttgtttttaatcttttatgttggtaaattgtgatatcctctgggcagacattaacttgatgtttaactagtttattaggttggtgtgtaaatagaatgacaatgtcaattactaatttctctcctctccattcactttttctctgttgtagttaaatttaatcttctatcctgacttgacatctctacctttagtctgtggaaatgattttagggctatcagtaatgctgtagctgcccataataatgagtccctcccttgggagtggtgaaacttagaaggaaggattcagggagggaaatgctggtacccagtatactggattagaagttatagcattaatttctcaaaattgctaccaaaggaagtgtggagtcccaagggactcaagctcagtgaggtaagacaaagggcaaggaaaggctgtttgggtggtttttttttccccacatatggtttagaaaatgatccctttcccaaacaaaactcaccaacagactttaatattagaaaagatactaagctttaaatgtcaatacagtggtcttttattccctgccctgtctatattttctactcaatttgggataaggggattttatgtgaagcacttgatgagggtagaccagcataaaaaatctgtttaaaagaagaaataatctttaggaaaagataaatctttagataaaaataaatttttttctctttttttacttatttaaaaataagttgtgaaatgaaaggtacatttacacatgtacacacgaaacactaatatagctttttggtggttgtttagtttaaaatcaactccctatccatcatccctagatattctacttatcgtattgcttcatgaacaccttagtcattttttactttacgtatatatttttttatcatctcaagaaatgcattttgaattgaatgaactatcttctaagctaagatactcaaatttaacttttagccaccttatatgggagagcctggaaactaaaggggaccagggaccatttgaccaaaagaggtgtttggtggagtttctgcatttcaaagaagaaaggccagataggtcatcacaattcattgtattattctttttttttccccttaatgtttatgcaaattttattttatatttctgaatttggttagcacatactaagccaaagactattctaaatgcatttatagtgaatactatgtatgcccatggtaatgggtcctccctaaggagtggtgaatgtaattgtgtgaatcctgcttatcacaagtggtgcaatttggtcataaactttatttataccctgtatacatctgaataacagagcagaaagacctaaaaaagggcttctcacaggaacaatattactatgttgttctaagaaaaaataagttgagtgctgtattagtttaagtgtttctaaagttctataggcagcattttagaattaagaattgtgtatatccattaactgatataattcacatgtccttttatttgttatcagaaagatcaatactatcccaatttattcaacttgttacccaagaaatggaaccaaaggaatccaactttcattttgtgtagaatcatacctacttatacttaatgctagcactgtaagaaataagtcttttttgtttaaaaaagggaagataagattaaagattcttagtgagatcatcttgccaatttgttgtacatctctcattcattgttgggggaaaaaaaagcacaactatacctctttaatgttattttcttccattatccctcatttatttggaaagataagggaaaccttgtctgtattatccagaagcacagatatttgcttgacacaatatttaaattcagcccaatctttaacattaaaaaattttctttttaacttgctggaaaagttggatacattggcaaatatagggaattcatgtcttttttttttttttttttctggtcttgctctgttgcctaggctagagtgcaacggcatgatctcggctcactgcaacctctgcctcccgggttcaagcaattctcctgcttcagcctcccaagtagctgggattacaggcgcccaccaccgcacccggctaa

SEQ ID NO: 56859 - DNA, 3588 bp, Homo sapiens
acaggtatgagccactgtgcccatcctcatgtcaatttttaaagtgataaatcctgatattatacattgcaattagtgtagaataaacgcttggcttatagaactctctgttcttagtctaaagctgttcccaaaccaggtcatcctcacgaaacattcttgaccaagaaaaaagataaggtcattgagataggaagacagaggaaaagcctcttgctgttgtttcttcccaagaaaggagaagccctgccagggagaagtcagtagtattgctgactcactgtatcactgagtgtagggtgtggtagcaaggaggaggcaggggattcacgctgacaggtggctctggcctggctcttggggggccttctgaagaccagtctgcagtttgaggaagggccccaacaattcatttggagagcttggccaaatactttctcattaaatcagcacctaaacttgatgaacttaaagtttgtttattagagttgaaaacattaaaagatgactgatactaatgggagaaaaatactaaagacccaaaatttaaaattttccaaaatggacaagaattgatgggttaatttgctcataactgatatgagtttgcttttatgtgtgtgtggaaagcatttaatgtgtgatgctgttcatagtcctggctatttgatgtcattttcagttttacaacattttgaggatgacactttataaaatggtaaatctttctcagcgtttacaaacttggcttttgagaagggaaaaatcctctttgctatttctgtaagaagaataactgagatcagctattatataggtttgcatggatggtgtccacaatacaaatgtaaacttggacaggaataggataaataaattgctttcatcataaaggccaatcatccatttcttagtccaaggagattaaatataaataggacacccctgagatttccagtaaggtatttgaaaggattccactgggagggcagggaatatattttttctcagagcatccagtttgtacccagttttctatatggtttgtgaactgtagcttttaaaaaaaaattttgtagttttcttctaaccttattcattaagtagttccttgttttggcccttctactcttggccttagctaaaagcagtaaatgtgagtgaattttatgttgattatgtcacctggatctcctttccttcccttctttttctcattgaatggtggtaccttaatttgggtaacagctagcttctggcaccttcataaaatacctcagaatagcttagcattgttgcaaaactggttttaaactaaaaaccaaataaataagtgaaaaaattttataaatagtggaaataattctagctgtagcatttagttgaactaatgtttattatgatcgataaacaagattgatgctgtatgtatttgggatcctgtttataggttacaatttatagggttagggagggttgggtgggggaagaggagatgttgattatgttagaaggaaaacattgctcgtgtgtgtgtttgttttttcttatatctgtcttgccaaaggaaacttgattttccctgtgattggctttggcctctgtggtctggtctgcagcagtgtgtggtggcatgcaggtaacatatggggtgtccagtaggttcagggaccctgagggtgcatttacatcccttcctatggttgcccatgccccccagaccctgccaacctctcctaatgattcattacctctgtacatagcaaaagcataggcaaaggatgaatgcgtgaatgcctggatgtgcagttgagaaacagaggcagacatagacatgcaccaattaatttggagccaagaggtgagtgattgatgtatcttaaatctaggaaagttaaagtgaaacaggttctttgtgttgccctctgtcaagttactgaatgttgtgctaataacacaacactttaaaaccttacttacttttctcataccaaggctagttctttctagaccaaaaacacaaacaggataaaaagcaaaccaagaagttgaaagctaacctgcccacctcacccctgtgatacaaagtgtgaaccttaaggattagttggtgggattgaggagagaattattcttggtgggaacatgaatgagaaatgatgctggcttaggaaaaatcacaagccctttctgcccatactctgggacaaactttcttggctccctgagttcggatatagactgtatctctagaaaggctatttttttaaataaatgatcccacagaacttaagtgggatttggtttagataccaaagacactgctaatgtcattgcttatccttaagttttcaaaacaggcagagggaataggagcaaaaagccaaaatttggaaaagctttactttatctctttccttcccttttccccttttcccagtcccctgctttttgaaggaagtcttcttggttatcctggctttggaaaagagatttattttgttttgctctgctggctctttaaagatggatagttgctcaatctagcagtgatgttcttggaattgctgagaaatttggggagggcaaaagataggggtagaattttttcattatttccctttatctaatacttttaaatagaaccaacacagcctatatgagttcagacaatatttagatgtggtatctccatctgtctcctgtaaaagataagaattttcaagaacaggattacgtggaaaaccaaaagatcttcccttactctcctataaatgttttgttccaaatgtttttatatatgggctctagggagtcaggtagttcattgtttcggtgtactattgataggacacagaaagggagagagggtaaagaaatgtatcactctctgaatattgcatcaaaaatgattaggttgcagaacttcatgaaagctttactaataatcttattgttctgacattatgtaaaggtggtattaatattgtatgacttgtcaaagtgctagataggtttataagtaggtaatagggatgttgaagattagagcacttgaaacagaagttctgggaaaacaaggtgtgtgtaatggaacaccactttgagcacagaaacaaaggtcccttggacctggtagggaagatgtgatttatgattgtttctgtgtccctgtatctgcccaccctgcacagggctccaccacccagggccaccttctggtttaaacccaggacactgtcaaaaagttaagaccccaaaactaatttactgtaaaaaacattgaggactgctgcaaagttttcccttgttttctttgtgtacttgttcatcattgtataagttagccacagcttcacaagagcagcttaaggcttctttcataaattggcagtggcattgagttctcaaacattatatcccaaagtctgcaggcagacagctggatacagcgctgtgtataaatgagacgtccaaacacttgagtttcttaagattgggatctctttcaaatgaaaaaggacagagccaagtagagaaaagactttgtgctcccacccagccttaatgagtctcatggtctaaaag

SEQ ID NO: 56860 - DNA, 3671 bp, Homo sapiens
ctgtagttgtaggcagtcggggatgccatgtccttggttccattcctgcgtgagtctgcagaaggcacacactttgtaagagtagagtggactagtgccagcctgaataggtttaaaactgcaaacagttggagaacatggaacaggttggtgcaggaagcctaagattttgcaatcatattataacattggcttttgacaacataaatgttgtatcttccctaaggtcaggtcggggaaagaaagacttccagcttcttacctctgcgtgcatgggcacgtgtgcattgctcagtccgcaggaggtctcactccgcaggaaacgctctcctcccgcataagtctgtacttccatcccctcatctgtggtagtagtgaaggctaggtgagtaagcgtgggctgttctacccaccagaagtccaggagctgttgtatacctcatttctaactcgtgaccgagtgacttgctttaactttctcgaaatcctacagagttgccaagtctgccctccctcctcagtcatgttaaactctggcctatagcatcatgggacctgtagcctagggtgggaccccctaaagcctctgaatgtcgctgcttaaaagctactgcaaactgagggcaaattgcaatcttctattcctttttgttgcaaggggtcttcacaggtctcttaacatctgctttccctgccaccctgcctttaggggctggccagctatccacacccctaacccaccctgtgtttctgacagctggccacacgtcaacttctgtacttgccttttccttggtggggtagaggccaaccccttctcctctgaggcctcagggttctgtttcttttcaggactttgggtagaagggaagacaccaaaggctcctttaagctgactgctgcatacacatttcactttttttcctttgacatgaccaaaaatatccaaatatttaagtttattattattattattattatttgacaatcttatatccaatgggctctctagaagctgcatccccagccctttcaccttttctttgaatgtagttcccaaccttcaattcccacccctaatgctgacaaaaagcttagccaggtcatgatactgctgctataagccaggggagggtggtttctttgttttgttttgttttgttttgtttttcaaatttccagccaaaaccaaagatttcttaatgattgtataaactcaaaacaaacaaaagaaccaaagaaaagggaagtcttcagcatcagtccagtctgtggtgtcctggcacttagaagagtgaggccagggaaggtggggcggggggaccctctgactggatcagaaagggcaggcaagctgcttaccaccttccagggtccagcacaggtgcatgcccctagctttggccctcacaaacttgtgagcatgccctgaaacaaattggcatttcagattttccaaaacaaaagtcaaaaaaccccatcaccaccatcatccaccctacaccaaccagggtcactatggggacttagcacagggcctagggagggtgggagctgctgctggactggcccgaggactccacagagtgggggacgttgaagacactggcgcacgattggctgctctgctgggtgctttaacctctggggctgggcgaatgcacgccacggtgcccttctgagcctttttttcttttcctgtactggaactgcttggaagtggctgtcctgtttgtgagaaaacatgcagaaagattatcaagcttttcatttctctttattgtagttttctttcctttttgcagcaccactgtgcaactatgcattgtacttcacaaccttttgtgctaggtagatgcctgtgactttttaacttggggggtggggggattgcaaatgaaggaactttttacatggatctttttaatctcagttggttgggggaggggggtacttggttcttgggtcacacaagctctatcccaaagcaaaatccaaatgttaataatattagcctgatgcagataccaaagataatttctttcctgcagaaccttagactcgtgtattaagtacgattacccagcacttgcattagtctaacctcagtaattccaaagcttagatgtatattttggtatatttctgggatattaaaaaaaaaatgtcgtttaacttcttgtttgtttcagtgtaatgctcttaaagtcatagcatgaaaataattgaactgtcctattcttagtagtttgaaataatagtatttttgtatgttttgggtgtgtctatgtatgtattaacataacagttttcactgcctaggtgttcataataaaaaagaaaatgaaaaaagttctgagtgtacataatattcaataataatctcccaccaggtgtcaatttagattgcatattcctcattactgttcccaactgggattttgttttcttttaaagagacagtgatcgtgtttttctaaagatgttttctttctctctttcaatatcttaactcactttttttttcttccttttttgtcttaattattaattcaggggtgtttgtccactgttgtcaaaggaggggcacaaggggaattggcccccggcctcctagaactttttgttttatgtactttaaaatgtgagtttgagttcttctttgtggaaacttaagatgtggtgtaaatgattctttccaaaattgtccagcagcttgaatgaggcagtgacaattctgaggtggtttattgggagtccttctacatttctcttagataactctgcactctgggtggctattgtgtagccttactgccccagagtgcctgttagccaaatatttcccctctgataggaatattttctaagaatcagctgataacttgcgtgctggaccttgttatctgtgcccctgggagacacacgttttcttggttttgaaaacctgaaacacaggcaactttacattttggggaattagctgatgcctcctgaagcctgaggaggtggcggggaatatgagcggtgctgtctctctcaaaagtgccctttagatgattccccctcctagggctgcctgcaggggctgtaggcttgggaaagattgtgtaggtgacagtgaatcagaatgaagtggtagattttgtgtagatgcatttgtctgctgtaattttttatatatatattaaacttactgtaactgtacagttcatttctgttgtaaaacatcattaaaccatcttccaagtgttttcacattgttggagtttctttgaaattgctgtgttggtattctggatgcttcacatacagattctcagacttcgcataattcagcttccaaattgttttttccaagtgctctcaggaaccccagaatcaccataagcaccctggttcctgccccactccacccttcctcctgcactccaggaggagctatggccactgcatttctccctcccagaccctcagtgtggtttcgtgggaccctgagtagcagtagtctccctcaggcccaagtactttgtgtgatcaaacacgcaggcccatgattgatcctgcaagggagctcttcaaagctccatctcactgtgtatttgactgcagaactgggaccgaactcaactttttccaaatgtattgtttaaactgcactgcccctctag

SEQ ID NO: 56861 - DNA, 1037 bp, Homo sapiens
tctgcccacaccatgaccagccccacgaagaaatccagggtctgcaaggcaccaagtgaaaaacccacgctctggtcagctccccagttacagatgaggaaagggccttttcaagagaaaggctaacatggccttcattcacacttggaaagaaggacctctgcctgagtgtaagcccctttgtcaccagtagcatcgccttccctgggacactctgatgtgcacacatttgtacggcttgtcatggaggtgcctagcaccaggctctccctcctaccctgtccatctcagccagacactgccacctcctcctcagcccactcaaggcacacacttggctggtccttgctttgctcctggataccaagccccaggcaccacccgagcttgagaccttccaagaccaaggcccctctgaacatccatcaagtgggggaccccgtgccctcctcccaaagcccagtggtacccaccttcactctcaggaacaaggcagtgagaatgacaccatagatgaagaggattccatccagcaggtagcagagtttgggatccagcaggccaaagctctgtgcctctgtgccaagagataaagctggtcagccaggcccaaggtgacgagaacacatccccattaccccagggtggcactaggactgactgaccaaataaatcatgacacggagactatatccaatccccatgcctcagcctgatcacaaccctctccctccctcccacctcaaccagctcctggaaaacctattggcaccaacggcagatgtggccgctgtggggccaaagaacctggggcaatgggaggggaggtggaaacaaggcgagcagatgaggctgttctctgtgcacagagctcctgccactgcagcagaagcccagccatgttagccccggtgtgaaccaagaactctggaagcctcgggaagatgttcacgtctggatgaatggtactcctggcctgaggtgtgtggctctgaggcctacccacagggagacaataggtcaaatgatggtcaaat

SEQ ID NO: 56862 - DNA, 1078 bp, Homo sapiens
ggtgaaaccccgtctctactaaaaaatacaaaaaaattagccgggcgtggtggcaggcacctgtggtcccagctgctcaggaggctgaggcaggagaatggtgtgaacccaggaggtggagcttgcagtaagcggagattacgccactacactccagcctggacaacagagtgggactccgtctcaaaaaaaataaaaagagataatgggtgtgtacaaagtgcctggcacacagtgggagctcagtagtgtgtagactttctgagaactcctcacttcacaaaatgataatgatgtaacacatgcatgaagcatacagtttagagagctctttgcacttgcatgatctggcttaatcctcagaacaaccttgcacaatacgggcagaattattaccaattctattttgcagataatgacgttgcagctccaataggtcacatggctagagattttctgagtgcatctgatgcaaagtcccttctcaatctaccttatcccagtgcctctggggttcctgtcatatagagagcttcccacctctttcaggagtttcttctttggtaggcacttctggcctctgcttgaatatctctggtgacaggaagctcagcacccagcaatcactggtggagagctctaattttcagagttaaaaaaaaaactttgaacctagttctgccttcagaagcacaaatcacacagatcctccaatttctatagggcagcctttcaaacctcacccccgtccagcttgtttccactttgataggaagcacggcaggtaagaatgaatcctacgaaggcgacaactgcaatccaagtcctggtgttgctactgtgtaatcactgagtaatcacagcgacctcccagggtgtgtgacactcaaatgggaagggcttggtacctggtaagcgctcagtttgtaggcactgatggaatcaatatgaatcacagtagctcatgatccaggtaggagtggccagctttctactcgccaaccttccttcctttgagtccccaactttgagccctgagtcctgctgctgccagctccacccccaggctcaggcacaa

SEQ ID NO: 56863 - DNA, 1575 bp, Homo sapiens
tctcaactatttttgtcttttaagccttcagatactcttaaatgagataacaacagcagccacggcagtggcctgcttcttgctacatcctagtagcgtttatcagtgtgtcagaatcatacttggagaggagggttattgctaaaatgaggattcctaggccccaccctcaacctattgaaaccgaaactcaggagtctgcattttaacaaacccaagtggttatttagtatattctagtggttgaaatgaactgaaaatcttaatttagatcagaaattttatctagtccttccctagaatgaattaatttttaagatttgttaacccagtttaacaaaataattcttctctgttcccctttctaggtgaagcagactgtggtgaatttagcaacacttatgaagtttcttaaagtggctcatacacacttaaaaggcttaatgtttctctggaaagcgtcccagaatattagccagttttctgtcacatgctggtttgtttgcttgcttgtttacttgcttgtttaccaatagagttgacctgttattggatttcctggaagatgtggtagctacttttttcctattttgaagccattttcgtagagaaatatccttcactataatcaaataagttttgtcccatcaattccaaagatgtttccagtggtgctcttgaagaggaatgagtaccagttttaaattgcccattggcatttgaaggtagttgagtatgtgttctttattcctagaagccactgtgcttggtagagtgcatcactcaccacagctgcctcctgagctgcctgagcctggtgcaaaaggattggcccccattatggtgcttctgaataaatcttgccaagatagacaaacaatgatgaaactcagatggagcttcctactcacgttgatttatgtctcacaatcctgggtattgttaattcaacatagggtgaaactatttctgataaagaacttttgaaaaactttttatactctaaagtgatactcagaacaaaagaaagtcataaaactcctgaatttaatttccccacctaagtcgaaacagtattatcaaaacacatgtgcacacagattattttttggctccaaaactggattgcaaaagaaagaggagaagaatattttgtgtgttcctggtattcttttataagtaaagtttacccaggcatggaccagcttcagccagggacaaaatcccctcccaaaccactctccacagctttttaaaaatacttctactcttaacaattacctaaggcttcctcaactgccccaaatctcttaatagcttctagtgctgctacaatctaagtcaggtcaccagagggaagagaacatggcattaaaagaatcacatcttcagaagagaagacactaatattattacccatatacatgatttcagaagatgacataagattcctcttaaagaggaaatgtcaggaatcaagccactgaatccttaaagagaaaagttgaatatgagtcattgtgtctgaaaactgcaaagtgaacttaactgagatccagcaaacaggttctgttt

SEQ ID NO: 56864 - DNA, 1541 bp, Homo sapiens
ccccaggttccctgaagaggccaagatgcaccccaggacaccatttattctcatgtaccatttgtcaccaagacacacagagtaagtcagtgatgctggaaatggccagttcgtttctgccttgttacaggaggcctacataaccacttggtttgaataagattttttacatgtccagtcccggagacattaggtttttgtcttttgtcaccatggtggcagcatttcttacacagacttcgaactccccctgcacttcccctcctcacgtctagtctgaaaatgggaggatttgggcagcagtttgtctgagaaagtccatcctgcctttccctggctcttgtggtctacaaaaacaaaggatgcttccctccagcagcgagcttactcccttgtacacacacacacacacacacacacacacacacacacacacactcttccatggccctccttttgtgctaaaagtggtgtctctgagctttcttatttgggtgctccctccaaagtaaataactttagtcattctaagatgctgtccccttggagcaagggaggggcagatctcctcacctcccagccacttccagcagggaagttaagttaatggggcaaagttttgagaagaaggctttgacaggccggacatggtggctcacgcctgtaatcccagcactttgggaggccgaggcagttgatcacttgaggtcagaagttcgagaccagtctagccaacgtggtgaaaccccatctctactaaaaatacaaaattagccgggtgtggtggtgtgcacctgtaatctcagttacttgggaggctgaggcaggagaattgcttgaacctgggaggcagaagttgcagtgagccaagatcacaccactgcactccagactgggtgacagaatgagactccatctcaaaaaaaaaaaaaaaggcttcgtttagggatttgaaggaactgctggggccatggactttccgatctgcgaacagctgttctggaggaaaagacaggtacccctttactgtgggttgctataattcaagctcatctccataccagcctaaacaccaaatgctgatttcacataaagatataaaaggattcacctctattcaagatgccagatttccccatgatgctgggggaaagccgaggagtgcgaggccccaccctgatgagttccccactgggaggggctcctagacttgacacgttttaccctcacacttgccacataaggaagtcagagaatggaacaacgagagagaggcttggggacagtgtgtgattaattgagctgttcttggcaaagatgctggctgattggtttgtccatctgtctaacttcttgcccacatcacagatcagtctctctgtcccctgctatttatgcttgggtcctgctgacagtgtgctttacctcagtttcaaaggcgccaatcactggtggagcaggaagataaattccagttaaaaatagagctgtataggaatcaaaagctcctcccttacttccctgtcccaaaactagccttg

SEQ ID NO: 56865 - DNA, 1031 bp, Homo sapiens
tacaggtgcacatcaccatgcctggctaattttaaaattttttgtagagatagtgtctcactatgttgcccagtctggtcttgaactcctgggctcacgtgatcctccagcctcagcctcccaaagtgctgggattataggggtgagcccagccccatacagactcttgaggtatcccgttacccatcaacccccaccactaaatgtcaaatacatgagcttgtgcttgatgtggtccttatgttagttcttttccctcaggcagggctgtgagatccttatcgtttactgcaatttgatcactggctgattattggggccaattatgcaggtgacacataggctacccctatgagcctcaaagtcatgcaaattttggataagaagtggagttagataaaaggtagcaatagacaatgaattctgcacttacctgaagcttctcaatcagaggcgagctcttgaccttgaatttaggagggtggctcgcattgggtggtgatttctatggagcaaatcaaccaaaacaaccagataagtaaggtgaggaaagtggggttctggttggaacccaaaagccacaggcagaaggagaagagaagttggtgttgccactttctcattagttcagtagcccacatacttcattagggcctgggcgacgtgaactttccccctccctccctcatcccaccacagcaagatcttcaaatcagaattagagaagtcagcgccgacatccttaacacagaaggtctctcccaggaagagtgacttcattgttgttatgaaggaaaactatatctgagcaagatcttcacctcatgaccttcaacactgtgaatcaacaatttgggggatttcaaagacaaagggcaaaaattaccatcctgtttgtcacacacacaacaagaaaccagaccaggatgacagaggtatgactggaattcctccctggacccagtgatattttggaaaatcccatcgatggcatgatttataaattatgattttccaaaatgttgaatatt

SEQ ID NO: 56866 - DNA, 1041 bp, Homo sapiens
agggcacatgtagctgtgtcctccacagcaaccccacacgttcagctgtgttctcattgcacaatcaagaaagtagctaagggatctgccctgagattcacaccgggtctgattctccctcagcctccaggtatcaggttccctcttaatagacggcagagtggtggacacagtaggccactgagctccaggacgaaggcagtgggacacaccatagtatgagccaccacttggggtatcaaggtacaggtgtgacccgatcaaaatgaaaggcagccaaatgggagagtcacccaaaggtaacgaaagcctcagggagtcttgagtttggttggggaggaggcaggtggtcccagatgcccgaaggcgtccatggggagaacgtgcgtgagagtccgatcctctttaaggccatctagggtgcttctcctgccctctgcattcccaaatcaccacagagctgcgtcctgcagaccctgtggcagtgccgaaccaggagacagagcctctttgagacttcacagagaagggatggagtgtgaggggcagacggtgcaatgggaagtacatgggttttccataccgacagatctgactttaaatactggatctttcacttaatagcagtgtgaccttcaggccttcagcaagtccaacagcctttccgaatctcagattctttgtctgtccaaaccttttggcctgacttccaaagtcttttctatctggtccctgtgtactctctcctgccccatactcacaccctctccctcccagctccccttggccaccttcccacctcctaccagccagactctgctgtcctggagaactcctatgtatactttaggacttgcagacttgaaagcattgcacacgtttagaagggtgttagtgttttcattgtgatcttaataaagaaggtatcatacagacaagactgagtcatggtaagagttcagtatataaaatacgaaagttaaatagcatactagcccaaaccatgtcaaaaagcagcatatgaagctgggtgcagtggtg

SEQ ID NO: 56867 - DNA, 1205 bp, Homo sapiens
catctcagcctcccaagtagctgggaccacaggcatgcaccagcacccccagctaatttttcttactttcagtagagatggagtctcgctacgttgcccaggctgatcttgaactcctgagctcaagcgatcctcctgcctcagcctcccaaagtgctggattacatgtgtgagccaccatgcccggcaagaatttttttttaagtgtcagaataaaattactaaattagacaccgaactgattaatgttttacagtgcaataaaatcatgagtttttgtttttgttttttactgaatggaaagcatttgcatcttcacaaaataaaagtctgcaggtcaccatgtgatttcacaatcccacatggctctaatctataataaatagcaaacaatgattcgttctcctggaaaattaaacggtccttgcgtggacttgtgaagcagtgcaccagactgacattgaaagtgcatacagtcctcctcttggcctttttttatgagtttttggataactttccttaacactttcttctaggtgcggacgaggggctcaataaaaaggcgccctccctccaggcgattccgaaggtcacagtcagactgtggagaacttggagatttcagggcggtggagtcatctcagcagaacggtgctaaggaagaggatggggatgaagtgttgccatccaagagcaaggccccaggatcccctttgtccagtgagggagcagcgggagagggagtgagaaccctgggacctgctgaaaagcctcctctgaggaggtcacccagcaggacagagaagcaggaggaggacagggccacagaggaagccaagaacggtgaaaaggccaggcggagttcagaggaggtggacggccagcacccggcccaagaggaggtcccggaatcgccccagacctctggcccagaggcagaaaataggtgtgggagccccagggaggaaaagccagctggagaggaagcagagatggaaaaggctacagaggtgaagggggagagggtgcaaaatgaagaggtgggacctgaacatgacagccaagaaacaaagaagctggaggagggagctgcagtgaaggagaccccccacagtccccctggaggagtgaagggcggagatgtccccaagcaggaaaaaggcaaggaaaaacaacaggagggggcagtgctcgagccaggctgc

SEQ ID NO: 56868 - DNA, 1050 bp, Homo sapiens
caggcctcagttactgagccgtgccgaggctcggtcactcacacacacccagaagcttgccagaactccaagtcagcgagaagttggcaagagcagaagacacacttcctctttgtgtccttttgtcccctcagcctcagcgacagcctttctccaacaagttggcacgaggcaggagcctggcacctttgtttctgcatgtcgagctgatttatgaagggactgtacggaacaggacatgtgacagaggcacacactggccctggcactgccttctgcatgtgaacgagccaggccacctacctccggcttggggactgctggctcgctctggacctcactgctggtctccagctgggcagggccggtctgggggctgcagcctggctcgagcactgccccctcctgttgtttttccttgcctttttcctgcttggggacatctccgcccttcactcctccagggggactgtggggggtctccttcactgcagctccctcctccagcttctttgtttcttggctgtcatgttcaggtcccacctcttcattttgcaccctctcccccttcacctctgtagccttttccatctctgcttcctctccagctggcttttcctccctggggctcccacacctattttctgcctctgggccagaggtctggggcgattccgggacctcctcttgggccgggtgctggccgtccacctcctctgaactccgcctggccttttcaccgttcttggcttcctctgtggccctgtcctcctcctgcttctctgtcctgctgggtgacctcctcagaggaggcttttcagcaggtcccagggttctcactccctctcccgctgctccctcactggacaaaggggatcctggggccttgctcttggatggcaacacttcatccccatcctcttccttagcaccgttctgctgagatgactccaccgccctgaaatctccaagttctccacagtctgactgtgaccttcggaatcgcctggagggagggcgcctttttattgagcccctcgtccgcaccta

SEQ ID NO: 56869 - DNA, 1033 bp, Homo sapiens
agccacttcactctggcctgggtgacagagactccgtctaaaaataaataaaataaatacataaatacataaatacataaataaaaatttatcaagtgtttctcaaacactcattatgtatccagtattgtgtagggcactcagctatgccagagactaacttacccaaacaaagacattcgaaatatttggatatcaaatctgagactttgctgtattaacaataagtgccgacttcctaattgcctgattcaattgctttccaagtcattccccttggtttctcaacatttgatttgaaattcttttctccctgagctgatgaaatacatccttctcttgagaatcccctacctttgtaactttgtagtgttaacattgttctttctttcttctccctcctggttaactggcaggtcaacagactcagttcttggccctatttcttctcagttcttttggggacacactccctgcattcccacctcaatcatccctcagacacattaactgtccttgccagagatccctctgtctctcctccttttcccctttcccacccaccgctcctccttgaccctcctcagccccgagcatgaccagcgctttgtgggagctcaatcaataatggaattgtgaccaggcacagtgcctcacacctgtgatcccagtattttaggaggccgaggcatgaggatcgctggagcccaggagctggagaccagcctgggcaacatggcacaaccccatctctatgatgataccagtgctagcctttcttttctatctctacaatcacaactcattcctaacagaattcctggtttccagactcaccctacacatcagtgacaaatgcctcttcctataaataccataggttgtctgctctcctatcccaaaccctttgatactgcccactggaaaatggagttcatgctcctccatgggctgggctttgccacatgcctaaccttcactgtctccatgctccccaatagtggggccggggctccagccagcctgcaccctc

SEQ ID NO: 56870 - DNA, 1088 bp, Homo sapiens
cctgccctctcctcgtggtgactctggatcgtctaggccctcccggattctgactcaggaactagggttctggcgttcttcacctttgggaggtggcggaaagttgcaggtttttcatttgtagggcctttgttgatttgtttcctgttaagccagggttttgttgtaagttccctttcccatgctctcattcagttttaagtctccgtaataaaagagtctcatttccgtggtctgcaaaacgccaataaaaaaatattgttacttctaggttagaatgcaaagagcttggaataccagtgagatggcctggcttaaaagaatttggtcaaatccatcataattccagacgtagccaccataatttgacaagacatagagcattaaaaagcataattttcctaaaggaaaaaaaaagctcctttttcttaccaaatattgtgactcaagcttaaggtaaacctcgggctcaatttatgggaattggatgacttgttttatggacatctgaagtggtatctgccacaggacttttctgtgttgttgttcaaagcaaagtacttgttgctgtctccgaatttagttaaataatagttataaagagggccagctgctaagaaaccacgtagatttttttcattccctttgttttcaaaatgtcagttatgatttagcatcacagtatctgaataccagagtttactcagtaatttctttcttcatggaaaagttcttaatataatccttggatcagggaaactaggtgaagttctgttggatcaccaactgttccacttaaacagtgattccaggggctgtaaagcataaatgtaaaagtctccctaccctccaggggttgacagatgatgacacactttgtgtaagacacaatccattctgtattttgtcttagaaaaaaaggttaaaagtgtgtttgttggtggtggtatttgtgtttaatcaaacaagtagaaaatagcctaaaattaaggtttatcagaaatatgcttcagacagaattgttatgcatgagaggtcagacattgctatggaggacaaagcagttagggtgatcttaattaaaatca

SEQ ID NO: 56871 - DNA, 1518 bp, Homo sapiens
tcttcactaagagactattcttattttatacactgatcaagtcagtgtgatatcacaaaaaaagaacttcagaattgtttaaattctgtttctgttctctatgatctggataccttcaataagttactttccttttttgggctagagtattttcatctataaaatgaacgtgaactagatgagttttcaagcctatagtagaacaattaattagaggtgaaatagaggctactactggaggcaagctgcaatcagcagtggccacagctggcctgatctgcatggagtagacagtaagaatgttaaaagcatttacaaaagttcaaaaataatcatggctggagacatctggctaggagcaaatagtccgacatacctgagtggccccagagggcacactaagttacattatgttcctaatgtccacacaagttctgagctaccaaataaaggttaaatggaatactgtagttctttcttttgcagttttattttgatataatttctcatttacagaaagtttcagatagaacacaaagaataccatctatccttcacccaggtttttcttttcttttctttttccttttcttttcttttcttttcttttttgagacggagttttgctctcgttgcccaggctggagtgcaatgccgcgatctcagctcattgcaacctccgcctccagggttcaagcaattctcctgtctcagcctcccaagtagctgggattacaggtgcatgctaccaacgcccagctaatttttgtatttttagtagagacagggtttcatcatattggttaggctggtctctaactcctgacctcaggtaatccgcctgcctcagcctcccaaaatgctgggattaaaggcgtgagccaccgtgcctggcccacccaggtttttcagatgttaacattttattacatttgcttaaatctttctctccccttcctccccctcccaccttgtatatgtgtttctgtaccacatggaagcagtaaaaatgccgttcctttatttataaataatttaacatgtatttcctgaagactaaggacatcatgttatataaccacagtgtaattatcaaaattaggaaatgaatattgaaacagtaacagtactgttatctaatatatagagtttatttggatgatgcccgttgatccaataatgtccattagagcagaagaaaatccagaatcatgtgattcacttagccatcatgtctctttcatcacctttagtctgcagcatttcctgagtcattttctttaaagttttacattaatatttttaatgtatattatataagccagttacatagtagattgcccctcattcaagtgtgtctgatgatttaggctatccatatttggcaggaacaccacggaagtaatgttctgttcttctcagtacctgatctaaggagaaaggtgctgcttatttgttccactgctggtgatgttgactttgatccttggttaaggtgttgtctgccatgtttctcca

SEQ ID NO: 56872 - DNA, 1279 bp, Homo sapiens
tgtgcgccatgaggctcagctaattttttttatttttggtagagatggggtttcaccatgttgcccaggctggtcttgaactcctgagctcaagcgatccacccacctcagcctcccaaagtgctgggattataggcgtgagccactgcacctggcacagctgcattttagagcttccaaatgcttagtgcgtatttcatttgtttccaaagtacattttaaaccattaaaatcacaataaaaaatagcacacacacttgtgggtggttatatgaataattcgtggactttggacaccaatgtcctgttaactcaggctgccagtgcagtcttcagaataaagtagatttttgtaatttctctgccgacatgtaaacttatacaagtgtgttattgattaagaagctgagtagagcactgccctggtattttgaaaagttcaggttcatgcatgtgcactaataatgtattttacaagtgaacatacctatacctacagtcaatcaaatgccaggcaaggtgtggctcgtctgcttcaggcatggtcttattgtataatagcatcgtaagtgaagtcccaacatctcatttgtatgctgggtagtaattacatgtttcaaatcacctgggggccttttaaaaatcctgatacccaggccataccccttaccaattaaatcagaattcctggaggtaggggtgggacccaggcattagtattcttttaagagttagactgtttagagcagttatggtttacagcaaaatagagcagaaggtacagatttcccatctgtctcctccatggcctctcctattattggtatcccccaccagagtgatacattgttacagttggtgaacctacagtaacacatcattatcacccaaagaccattatatttacgttagggttccttctttctgttgtacgttgtatgggtttcaacagatgtacaatgacatatatctattattataatatcatatagagtaatttagtatttttcagtagtttcagtaggcatcagtatttttaaatttttaaaaattttttgctgtattttggaggagaggaatatattcttattgccatcgaccgtaggcgtattctttccaatctcttgttctgtccttctagtaataattgtattggcttttctggtttcagttaaattttggttcacatatcttcaaacatactataaacctgataagatttgagagcccagaaagataagtttaaggtacagtggtctttttcctgaagagcaatttt

SEQ ID NO: 56873 - DNA, 1373 bp, Homo sapiens
aagtgattagttcagtgactggcctgattcaggaccctttgagcatttctcatttgagaaacagaaagatctttgttggtacaaaaaaggttaaggatagatatgtggccagctggacatcgatcatgagcggaaggaattgactccgagagggatttggtaatcttgtgtgttagtaaaagtacatggattttttttttttacagtctcactctgtcacacaggctggagtgtagtggcacaatcacagttcactgcagcctcaacctcccaggcccaggcagtcctcctatctcagccccctgagtagctgagatcacaggtttgagccactatgcccagctaatatttttttgtcaagacgagggctggtcttgaaactccagggctcaagccatcctcctgcctcagcctcccaaaatgctgggattacaggcatgagccaccttgtctggccagatttttttttttttttttttttttttggtaatcaaatatttcaaaaggtgagtctcctttggggtgattctctcacacagaaagatgattcttggaggaaacatatctaagcatcctccaaggtagtgtcagcattcaaagttgatcctgaattatctctgcagacactttttgtgttgggcattatgctgaagccatttgttgtagagcaagttgatttttatggctgagcttatctgaatttagtttgatatattgtattctttatttattcattcattgattcactgattcattcatttttcctgacattcaaacaaatgtttcttgaacacattgtgaaagggccaggcatttgtcaggtaatgagggtataatggtaaacaaggtagacacagccctttgccctcttgggggtgcagacagccggtcatttaagtggggtgtgaggagagcatttacaaggaaaggacaggatgtcggggagcacagggtggggagtgtggggcagacgctaggaggaagtcccttgagattaaggcctgaagcataactttagacaaagagtgcagaagagtgtgttcctgactaatgaaaagcttagtttattaatacttagggcttgttgaatggaggatacttttgcagccttcccctactttgtgccatccagccaagagaggtccacaatagcagccctgattcgcgggaggaaagagcccacttcagctgcagggtggccctgttcccaggagagatttgagtctgaccccacagtggcagcaaggcagctctgtgcctgtgttatctccaccagcacacgtcattgagtcagctttactttatccagcctgattgtagaagtcatagtagacactgtgagggaatcgtgtggaattttcactggagcattc

SEQ ID NO: 56874 - DNA, 1224 bp, Homo sapiens
gtatgagagtttgaatttacttggagtaagatcatctcggcatgtagttgggagacattatttactctattgtttcagtaattcagaatattgaaataggtcagtcatgtcaggaaatagactcttaggtgaaccattcttgaatttgcctttttctttgtgattgtgatggatattgttttgttttctatctttgcttttttttttctttctgaaatgttctggttgtccatccaaattgtaagaatattacattttgaatatcctttgattattgtaaaaatgacccctagtcagatgattccacagactttttgattacttgtcaaatgactttgcgggcttttttcatttgaattgatttcctattttaagggtcagtgtcacttcattgctaaatgatacctttgagcaacatggtacattttagaaaccttattctccagagtactctaagagaagggttgtttggattttatttgtttatattcttgccctttaaactctagcataactcagcaggattcggtactccttatagaaccgttccccagagagaaagtaagctcagctctcatttccatgttgaagtttgtatgcaagtttacatggagctcagaatccaaagttggcaggatatgaaaatgtttgtatatcatttaatctattttatttcatttcatttctgtgtttttattcccaaagcaattggttttattcaggaatcaacagacttttttaaatccatctataagtttttgaaccaaagctttactacatttcacagccatttttgccactatgccataattataaatccttggcctcaaagaaacctatttaatatcttattcagattgagattctagtcttcagtgacatggaatgtagattagaacaatagtttctgtatatctcaatggtctttacatttgcatttttagccattttaactagcccctaaaaactctcttttatgactctgtggatgagctatctgaattcaacaataattttactatgtattcccataatactcctagtcatttaaaaaaaggcaggggaatggacaaagcaaatcattcccaattgtttaagaaaccagtgaactcatcccttgcttggactgcatagaatacagcctgagagggaaacctgtgatttagtttctctctttacccacacaggagaacacttctgacaagatgccattcgtgctcaccg

SEQ ID NO: 56875 - DNA, 1016 bp, Homo sapiens
atttggttagtctttttgctcaaaattctgtgactgtaaacttggacacttggtctaattccatctttaaataatgtctcgggatgacaagtcttgcagctaggcctcgaggaagggatctggtttaagaaaatccttgaagaaggctgggtgcggtggctcacgcctgtaatcccagcactttgggggggccggggctggtgaatcacctgaggtcaggagttcgagaccagcctgggcaacatggtgaaaccccgtctctactaaaaatacaaaaattagctgggcgtcgtggtgggtgtctgtaatcccagctactcgggaggctgaggcaggagaattgcttgaacccaggaggcggaggttgcaacactgcactccagcctgagtgacaagattgagactcggtctcaaaaaaaaaaaaaagaaagaaagaaaagaaaatccttgagaaactttatttatagacttttagagactgtggctttccagtactcatcaccatggagaaaactagtcaaaatcacacagagtgaataagggttgcaagccagtgctgcttcctggaataagctggtccactagtctagtcttgtgctttgtccttcattttgaactcaagtgccctggggctgcttttctgcgtacccacaatagcaaggaactcttttgtttgcatctcctctgaaagaaatgcttgttttgaggtttggaccgcaaataataatctattgttccctgtaataataatccaccctctttcgcagaaaaaaaaatctgcttgatgcagtatggctatcagtttatttaaaagaatagccaaaagtgcccattatgtcctgagaataaacatttgcaagatggttgggaggaatgggggagtactcttgttctccttggctgagagtcagttaagtcttcaaggagaaaaaattctgaaaatgaccatcagtcctggctgacaatactcttccttattctgcccgtctgttacattctaagaattattgcaacac

SEQ ID NO: 56876 - DNA, 1028 bp, Homo sapiens
cgccaaaagaaatcttcgtggcaaatggtacacaagggaagctgacctgcaagttcaagtctactagtacgactggcgggttgacctcagtctcctggagcttccagccagagggggccgacactactgtgtcggtaagaatgcttgacttctcttggctagtcctgcctcacaggtttctttactgctgtataattggtgatccatttttctgatggttcatttccaaaatgagtgtattttttatctgttatagacttcaaggcccttcttttgcttcaggataaaataagttcagcatctcttaaatgcgtctggtttccttgtctttgatcagttcctctccaccatcaaatcccattctgaaattgatcttaattgaccacactgactctaatcaggatttatcctgcatcttttcatcttttattgccccatatttattgatatttgttttatgtattatcaaattttatatatatatgtatgcatcttctgatttgattatctttttttaatttagcgtatagtccatctgatttagcaatattgatttgggagcttactatgtagtgggttatgtagggccttcaaaaatgtctaaaacagaatccttgctctcacctagagatgattaggaggaaggctgatatatagatgactttggagtaagataaaggatgtaacagaaatacagcaccagagcattgaaaaaaggttatttagtaactagtggagtgctggttattaaacatgaactgactatcttggttctggtctgtaaaatggagacgataaaacctcccacacaagggtgttaggaggataaagtaagattattcaagataagtgctcaggagagtgtctagctcttgagttactaaaatacaccatttgttgttactgttgctctcccagcatgtggaatgcccttcatatattggcacatattttagtactgttgcatgtttcaggttgtcagtgtttagcaaggacagtctgtcatctatctttaagaatgcccaatt

SEQ ID NO: 56877 - DNA, 5583 bp, Homo sapiens
caccaaaaatacaaaaaccagtcaggcgtggccgcacgtgcctgcaatcccaggcagtcggcagcccgaggcaggagaatcacaggagcccgaggcagggaggttgcagcgagccaagatcacggcagtacagtccagcctcagcaacagagggagaccgaaaaaaggaggagagagagggggagagggagagggagagagatgttgcatttctttccgtatgaagtctttaaaagaacctttcatagcatgcacattacagagtttaggaattctgcctttgagaatagttcatgtgttccttttttctaattgcagtttttccactactcccaagggcaagtgtaccttgggaattatccaccatttaaagacagaatcagctgggctggagaccttgacaagaaagatgcatcaatcaacatagaaaatatgcagtttatacacaatggcacctatatctgtgatgtcaaaaaccctcctgacatcgttgtccagcctggacacattaggctctatgtcgtagaaaaaggtacttccttgagtattttggcagtaataatgcagtctcctttatctcatgtttggttggaaaacatgagttgcatttcatggtgggtttggagggaggatttttgccatacagttgtgctccctgttgccacgaacctgtggctctaccaaacacacttggagctgggaaacttgttgctcattctgacccagagtggctgatttctccatttttattcctaccgtctggtgcctattggtctaatttcaggagtatgaatttttcagtgttaattagaagaaagaccaaattcattatgtttggatgtgatgggcagtgggaaagaaggagattcatactgttttatattctccaggagaaagctttcaacaacagcacagttatttcttccttttgattttgagaacaaacaggaaatgcaggttctggtgtctcatttttgagacaaagtctgttttgttggagagtagatccaggtaaattcacacctccggtttttctttagagcactgagagggattgtaggtgtagaaatgcttagttccatagttcattctttctcatctaatattcacatgtcatgaattacatagtaataggatagatagtaggatctcatagtttggataataaaagagggtacggtaactgctaaatgaagatacttgctcgttaatttaataaaattccatgttttctctctgtagcaatgtaccttaaaactattttgttctttctctctagagaatttgcctgtgtttccagtttgggtagtggtgggcatagttactgctgtggtcctaggtctcactctgctcatcagcatgattctggctgtcctctatagaaggaaaaactctaaacgggattacactgggtaagaaacactgtttttttagggcaggggtggagggagggaatcagggtttatagaaacttctgtatttaatgaaaaaaggattttaaagaattaactactattttctttcatgtcagaatcaggcagtctccttaggaggtgttctaacatgggcaagtggaaatcagtgggcctgctattaaatgtggaatatgattctaatctctgttccagtttccttcttaggtttggtgagatgagctgctcagcagtctgtgctctgtgtttcaataccatccactatgcaattagtattcttaagacatcacttacccaatttaagagtttaatttcaatttcttgctaataaactcacaaggtggttctttccagttaggaaatataaaaccctaattaagaagttgtgagctggaattagtggcatgtgcctgtaagtcccagctacttaggctgtggcaggaggattgcttgagccgaggcgtttgaatctagcctaggcaacatagcaagatcctgtctctttaaaaaaaaaaaaaaagaaagaaagaaagaagaagaaaaagcagtggttttaataaactacctcccccagcccagtgtgatgatggtgcagggcttttcctttttgtagttcccctaccccactccaagcttaagtagctttattgctttgatcattcttagctagattcacccaaaatgggataataagaattgatgacaaaatatatcagcaataaagaaaaatagactttctttttgtttatggcttctcagatggaacacgtttaagcatagggtgtgtatctaattaaaggaccttctcttttccccactccagctggaaagctaacccatataagctatgtagaactcatgtggtaagactgggagcagaggctggattcaagttgatatagcatgagcagtgttgcagatgcacagatctaactttagccatcctgaagggactctgatgtgaaaggattgcatgtcctgaactctcttgctggtggatggtgggaacctctatctatgggctctgctgatctagagtttttaggagtgctgtgttttaacaagtttgagtgttcaaattcagatattacttgcttggaatgcttctattctgctgactgtatctgccccccttgcatggtgagtgttttatgattaaatatagttggactattggtttcaacatgagactaatccagggtggtgacatgccggtctttgtagttcttgcttcggggttaatgaggggcaggaaagagttccttagactcctgcatggcatcatgaatgctgctgttcttcttaccttggtttttttcctcctcctctaccttttctaccttggtgtgctgggatcagatcctgcttatcttccacttcttaagaaaagctgacatagaagacacattgggactataacagggctgggtctcctcttccactcccactagacacatggtaactaatcacattgcccattactgttaatattcctgtgtatgtattcagcccctctcccttgttgatgactaaccagctagctctgagctaacccaacagctattatgatttgtccatgaatatgtcacatgtttgtattggaaacatgttgagcatactatctggatgaaattggattgtgaagttacatagagtttttatgcacatctgaatatttgtgctcttcatgtaaaatgccattgtgtatgtgtgtgtgtgcattagttttcttttttcatatatgtattatgttatcaatatttaagatcctgactgattatgtattagaataattaaaccattttggttcagagcatgtagcctcccatttcacagaaggaacagtttgcagaatgcatggtatgctttggtcttagtaatgacactttaaatgtgattctccccaaactcctaagttttaaaagtatatatcaaaaggctttaagctgtactgatgacacatctcattggaaaatccctacgctgtaccccagctttcttacttcctggcattcactttccctgattcatttatgagatagtgcttgttgttaaagactactgtcaccgtgaaaaggttcagcctgtgtgacctggcattccctaatttctcattcatgacttcctgagtttttggggggatttgattgtggtattggtagggaataaaaatatggagagaacaagataagccaagacttgcctggatatatatctgtaatttaaaacatacattcagaagaggtttgcctttgattataacaaaagtgaattgccattaagctaataaaaggtaccatagagcttgttcccttaaacctttatcccaaaggagggttgatggcagggggaaaagacaaacagcaaaaggataaatgtgtattgtaactagaattccaatatgatttttgtaaactgggttgaagaggttgtaccatatttgtttctgtgcctcccccagtgatgagttcattgacttagaagaatgagtgagtgtcaggtatagaaaatagtttaaaaacatgtgatcattttgacacccattgttatgttgtcttttgtttttatatatctgttgcttcatcttgccgtcagttgcatttctatatttttgtttctatttatttattattattattttttacatttgttcttcaaattgccaattcatcagctgcagtacatcagagagtttgtcaccagttaagcaggctcctcggaagtccccctccgacactgagggtcttgtaaagagtctgccttctggatctcaccaggtaatggctgattgcgattctgcccactgcactgttccctacagcttggtgctctgtcacttccttgggtgtggaaaagaatactgagctatgagagacagagacagagacagacagacagagacaaagagagagtgggagtgaggaattaaagggctggcctaggaagaccacaggaaaatatgtggtgaagaatctgcttgagtaaagatttccatgaaaccaccaataacataaattgtttactaaccatgtagcttccttgcctcaagcagaattaggaaatggctttgtcagtaaaagattctttaattgcccaaggaaatgaatctaatgaaggagattctttctgtattgaggtactctaagataagaaattagcaaggaaaagttggtattcttagtattgataataaaaccaaaattattttctgtggattctttagaaaaaatggaaagtaagcatttatctgaataattaataggcttgatgaacaaggaatggttttggtttctacttgtagaaagtacagaagagaaacaggttttatttggaagttagcatataatctagctttgtgtgttttggctgtagtattttaattataactgtggcttggcaaaaattccatagcttagttcagtttgatttttctggggtagaaagcatgctaaagaatttggccagttatagctttgtcctaaaaaggtgttagctggtgggaatggatttaagaggaaataaagagagtaacagtgttttgtgggaaaagtacccatagtcttattccatagttgttatatgtggtgaggaaactaaggcattgtgatgttaaattactaaaagcacacacccagttagtgacagaactggggctagaacccaggtgtctagatagcatgttctctaccacagcatcaggctcattacttgttcctgttctatctgtctgtctctctctcacattacataatatatgtcagatacctcagtctactaatttgggttgtgaacaggaatatggttgtaaatgaagacatgaaagttacatacacataggcatagcatctaaaaaagcattggaacatttttattccgcccttgaagcactatggaagttgcttttttgctgaaaacaaaccagaaaaaagaaaaagaaactgtggttttcaagacagtggaacacaaattatgcagcactgtcatccccaaaagaaaggaaacagacaatgtgagccgtgttattgccccagtgtactgccttgaagcagtttccacactgcagtgtaggtggggaaaatggaaactgggcccagctgtctcactcaattgagaaggcggaaatcagaatttggggaggtcaaggaggcta

SEQ ID NO: 56878 - DNA, 1470 bp, Homo sapiens
aacagtggaataaatactaaaaaaaaaggtgttctgtcagtagtcaatgagcacatggtaaaaatagatgttctttcttagtgattcgtgctaggcttttggggatgactcctctaacacctgaaggactagaatcaaattaaatagggctacaggctacagagactgtgaaaggtgtactacaggacacaacataatgactcctgagcagttaatttgtagttagaagcaggtctctttgcttttctagaatcctttcttcctggaccttctcccccaaccttcaccagttatggtttttttattggaataaataattaattttggtacaagtaaacttcagaggtaattttatctctagttgtaactaaaataataggcctatattaagcaatgtgtttcttgaaacattttcaatagctaaggcctattcatgcagaaagtagctgaaaacatactcagaccaatttttcactttattgttgtaattctttgtgtaaaagcaaagataaataaataaatgaaatggagggtggggagggtgagtaccaagagatagagtaaaacagctaggttaatgtaggttttgttgttgttttccttctttattatacccaaaagtgaatgtcttaacaatggtaggttcatttcaaagttgatcgtggttctgtggatcctcttgaagtcctgagcagcctcatttgccctcaaaatcgaggtgctgaggcatgttccatagagactcagggctccttccacctctaaatagcactcagaatcaaacttcatagaggtgttctagattgagctagatctgtcagcagaccccaatctcaacctacatctgcagtttctctgcatcctttctttcatccatcccttcatccagcacctgtgttctgccaagttctaggaagttaacaaagtccctgacttaagaccttattatattctaagggggaagaggaatgaggataacatcaggcagtggtaaacagtttgaagaataccaagtccatcagcaggaagggatttcttcagtgttttcccatttactttcatgagatagttgtattcttttgacatgaaagacagtactgtctcacatgaaagacctcattgatattttaacatttacagactaaaagataattctgtgttctttttcctctttactttctctgttctcattcttttctactcacataatatatcaattatctactgctacgtaacaaaccccccaaaatatagtggcttaaaacacgcactatttatttggctccccattctgtggattggtcgagcagattctggtctggatgagctcagctgatctctgctggctcacttgtgcatctgcagttggctagaaggttgactggtagctggacagtctacagtggtctcacttacagtctaaccattggcaggctgttggccaggcagacagaggacagctgggccatg

SEQ ID NO: 56879 - DNA, 2979 bp, Homo sapiens
ccaccatgcccggcgaatttttttgtatttttagtagagacggggtttcaccgtgttagcaaggatggtctcgatctcctgacctcatgatccgcccgcctcggcctcccaaagtgctgggattacaggcgtgagccaccacacccggccgaaaacagtctttttaacttccttttgttttttggtggggttagcatttaacttgtagctttctgagatgaatatagagggtctgtatgattattaaccatgtgatctgttaatatttcctatgacagccattatagactaaagataaacacacagagtttgactatttaatttacttgaccagttacctcagtgcattttaaagtatgtttgtgtaacaagacgttcataataataactaacatgtattaagtactgtctgtgagacactgcctaagttataggtatcatcttatttaattttcataacaacaaaaaacaaaaatgtagatattattagtagtaccattttagagatgaagaaacttgtgcttagaaatttacaaatgtgcccagggccacgtgaccagtgctcttctctaaggttcaacaaagacgatatcataattcagactgcagatctgccaacattcaaatggctctagtcctcgagtgttattttctaactccgcttttagatgcaccattgtatagcccttacaactgggcctgtcccttctgtagatgtgggagtagctgaactccacagaaccccaggttacacactaaggacacaggttgttagggctcctggatgagggtaagtgtgtttattttaaaccacgtgcttttggctattgagcttatgatttcaaaggtgaaagcttaagcacgttattagacttctcaaggagagttcccctagattgggagaaaagttgacattgggtaatattaaatctttcttttaaaaccagggctattttgttgttgtttacaattttaagagtctagactgaaagagtcatgaaatgcagccacctatctgacctcttcccccaacagttagggaattcgctctgcccccaggccacccaaccttcccttgctctcctgaatgggaccctgacaattccctggaattgtaacctcttccttactgctgaggctgagaagaggatcttttctactttactccatttagggtttttctttatatctgtgtagattgtggctttttgttttttctttttaattttattttaaaacaggaagaacagttatctgatattaaaaatcaaggaagcaatatttgtattggtcacaatacgctcagactaaaagaattatgctgtaagtagttgtattgaagaatatttgaagtgcttttaaactatttgtttaaaactatacctatttgtataacgtgaccagatcaaattgattgtatctttgggtggcaccaaatatgttggtttcttgcatggattgattattctgaagctcatgatttctgtgggtctcaggtgcgtggaagttcccatcttagtccttaagactcttaccccaattgtaagagctgaggaattctgtgatagctattaagataagagatattcctaagaaggaatatattattacagaaattttcaaacatcaaaaaggtttgaaagaataatgtaacaaagccccatgtacttgctttaactattgtcaacgtatgtccaatcttgtttcaaagtcagtcctggatgtatcatccataagaagtcttcctgaagacattcaagagggaagtctttgctttggaaccctgatgtgatcacgttaatcattgcttctatgcctgtagctgaaggaaccgccagcgttttcagtcctctaatccttctgcttcccttttccagggcccagtcatatatgcacagttagaccactccggcggacatcacagtgacaagattaacaagtcagagtctgtggtgtatgcggatatccgaaagaattaagagaatacctagaacatatcctcagcaagaaacaaaaccaaactggactctcgtgcagaaaatgtagcccattaccacatgtagccttggagacccaggcaaggacaagtacacgtgtactcacagagggagagaaagatgtgtacaaaggatatgtataaatattctatttagtcatcctgatatgaggagccagtgttgcatgatgaaaagatggtatgattctacatatgtacccattgtcttgctgtttttgtactttcttttcaggtcatttacaattgggagatttcagaaacattcctttcaccatcatttagaaatggtttgccttaatggagacaatagcagatcctgtagtatttccagtagacatggccttttaatctaagggcttaagactgattagtcttagcatttactgtagttggaggatggagatgctatgatggaagcatacccagggtggcctttagcacagtatcagtaccatttatttgtctgccgcttttaaaaaatacccattggctatgccacttgaaaacaatttgagaagtttttttgaagtttttctcactaaaatatggggcaattgttagccttacatgttgtgtagacttactttaagtttgcacccttgaaatgtgtcatatcaatttctggattcataatagcaagattagcaaaggataaatgccgaaggtcacttcattctggacacagttggatcaatactgattaagtagaaaatccaagctttgcttgagaacttttgtaacgtggagagtaaaaagtatcggttttattctttgctgatgtcctttctgcttgaaataacagtcaccatacagctaaaggagaggagtttctttccttctaagtaggcagaaatggtatcattatgttgccgctctccaatctcccagagctcgctctctagagaatcaccttctttcgcttttttttttttttttgaggtagagtctcactatgttgccca

SEQ ID NO: 56880 - DNA, 1746 bp, Homo sapiens
aggtttggtcaccacacatgtctgaagctgggcagcgtctgctctgtgttctgtgtggaatggagaaaaaaacgcctgccctgctgccttccatgttcataggcccagcccaagagagtgacacacagtgctggccctgagacatttccacaaagtggtcaactctgccttgcatcctaaaactttttgggcatctattttgaaaactataggagcctttggaaggcctcttatgtttggaggggaagggtgttgagattgtcaccatccttcaagctgagactcctggtgagcctttgccaccatgaaaaccacatagctgaccagggctgtgcttgaggtacagaggacacacattgtagacaggcctgtgtcatgtttccttacagtcgttttttacagagaaaaggggcattgttttttcactgctttctcaacagttcctgtgaataaatgaaacatttcggagctccctgagagcaagagccttcacttcttcttgcggtgccgggaccatgtgttggtgaagctggtgctgtgggggccactcactcgaatgacacctggaggcctgttcctcccttaccactcccttccccagcccgacttcttggcctcctgcccaaccagacacctcaaactctgtcagtgccctggcattctggcagagaatcctcaccagttctcaccaaccttccccccaggcaagggcagctgccagcatggtgctctgccaggacaggtttccctgaaggaagctgctcacactgagatgagcctctcagggcaggacctcttcccaagccctgcacacccacccctgcagcccttttggctccccttttccctgtgcctcagcactcctttcctggttgcagataacgaactaaggttgcctaaagggcagatctgccctctccatgtcttcgtcctggcaaacagggtcgtcttaaaattatgcgctaattctgtatgggagcactcaaaaggcattacttagagattgaaatttcaaactatctctagtttttcaatggaaatatatcagctagggaaaaaccatcaagctcattattattttttgatcttcagttgtatttttgtgaatattttaatacatctttttcaatttctgaattgtgttgtgtgctcattttgaccagaatagaaaaagagatatgcctttcactcatatcattccagctacacctgccttcttttcttcaaaaatgccgtccgtgtgcctgcttctgggcctttgcacatgctgttccctgggcctgaagcatgccttctgccaatattcctgtggtttgctctctgacttcctttaagcctctgctcaaatgttacctcctcagggagaccttctgtgatatataaaagagcaagccccccaccccaccgcctcagccttcctggccccctcagttctgctctagttactctatttctctccctctttcccagtacacacttgtctgttctcccgcattagaacatagttaacaagagaccagaaccttgctgttttgttcactgctccgtctgcagtaaagggaacagcacctggcacttagctgctcaatacatgttacgtggatggatgagtaggtggaagcattcatccattcagcaacctacactgagaacaatcctgtgccaagcactgtgctaagcataaggaaacaaaacaagacaaagctcctcaaggagcttgccacagggtggaggtgacaggtgaca

SEQ ID NO: 56881 - DNA, 1017 bp, Homo sapiens
ggatgctcaggtgggggggctgcttcagcccaggaagcggaggctatagtgagccgtgattgtgccactgcactgaagcctgggtgactgagagagaccccatctcaaaaaaaaaaaaaaaaaaaaaaagtgctgggattacaggcatgagccaccgcacccagctaaacttaattaaaattaataacatttaaaatttatatctctagtcacattaccatactgcaagtgttcagtggctacatgtgtgtcttgtgactaccatattgatcagtgcagatacagaacatttccttcattgcagaaagttctattggatgacactggtgcagaccacacaggggttggcaacgttttagatagttgtgtcaggttatatgcacacaagctcagaatcctccatagccttttttttttcatggtggggatgggggtaccccccacagcagtggtctggtggctgacactttctcgtggatagacagcatacactctttactcactcaatataatttatagcctatgatgtcccacacattgcaaagtgctacaatgcatctgagaacaagatagagcttgctgaaggtcttctaagctttgaccttatgccaagttctgggatataaagatgagggctggctgggcgtgatggctcacgcctgtaatcccagcactttgagaagccgaagtgggaggattgcttgagcccaggagtttgagaccaacctgggctacataatgaggcctctatctctagaaagaatttaaaaattagccccagctactcagggatagtgggtggtgggggctgggggcaagggcgggagggtaagatgggaggatcacttgagcctgggaggtcaaggctgcagtaagctataatcattgtgccgctgcacttcagacaaaacgagaccctgtctccaaaaactaaaaataaattagaaataaagataagagcaacagaatccctgccattgatgagctcaaagaggagacagccccaaacagcagcag

SEQ ID NO: 56882 - DNA, 1032 bp, Homo sapiens
agaaaaaaaaggactactggccaggcacggtggctcatgcttgtaatcccagcattttgggaggccgaggcaggtggatcatctgaggtcaggagtttgagaccagcctgaccaacatggtgaaaacctgtctctactaaaaatacaaaaattagctgggcgtggtggcttgcgcctgccatcccagctactctggaggctgaggcaggagaatcgcttgaacccaagagacagaggttgcagtgagccaagatcacgccattgcattccatcctgggcaacaaaagcaaagctccatctcaaaaaaaaaaaaaaaaaagtactactcttatgttcattttgccagtgaggaaattcaggcacaaagagtttaattgcccaagaccccatagcaggtggtaacacaggatactgacagtatccaaacataggccagggtgcatatgtttgctcactccataacactatctcttgaagaagccttttagtcaaaatggattatgcccttctctgaactacaatactactttgttatgcctctcttatagcatatatcaaaggttcccatgtaacatacagctaagtttgtgtatgttggtcttccccacttgattgtgagttttctgggcaggaactaggccctgttcatactgtgtgtgtatttctccacttttatctgcagaggtggtacagaaaaatcatgaagagtacaggctttgggatcagatagtcctgggtttgcatagtaaactgattgcattaatggccccagtacctgtatctgtgccctttgctgtgtaacttggcagagtcctctcattctggactcagccttgtgaatgcttttgtcaatggactatctgcaaacataagacataggaagaggcttgaaaaatgcttttgcattgggcctgctctcttgctcctccagtattgccaggacaaacatgctggatggaagatgagacacatagagccagattgccctagttatcccaactgaggccgccaggttggccaacagtctgttga

SEQ ID NO: 56883 - DNA, 1010 bp, Homo sapiens
cggcttttagacaaaactgtcattttatgggtcagctatagacagacatggcgcttcagctgtcttcagaataatgtcacccggcctcctctcctgtcttctgcagtcttaaaagacctagtccctaactgaggtctggcttttcctcagccctggatgaagtggaggtatgtggaagtaagagtctcagcagaaagattgattgcagagctgaagatgagggcgaccgtcaggaaagaagacagctattgcagaggagtgggaagcctggggctagaagtcagggttcaagtttgtgtatacctctgtgtcagtcccttacatgagcttagaagcttgaaggcttaaatattgcctcaccttctcaacctggatgctctgtctttctagcttactttctttatttgcctcttttctgcagtttctcacgtgatatcctcctttttatcagtcaacaactaccaagtgcctacctcttgaagggggctctggcaaggtgctgtggagtaaacaaagatatgtagaagatggttccaaacggggagcttacaattcagatgaagacaaaatagaagcaattcaaaagataatcaaggatatttgtatgggaaataagccacttaagtgtagacattaagagccacaatagctcagaagaaaaattaccatggctagagtaggcaagcaagctttcatgacaggtaacactgtgcctttaagttcagagtatctccctctttggactcgtgaaacctgactttacatgtaggtgaaaagttgaatataaaatctattaggaaattctagaggagagatttagagaaactgatgaatataatcgaaccctaatttctcttttcatttttgggtactactgagttttctttactcacactccgcattcaggaatccttcttggtttatctttcgggcctcattcgcctgcttgccttttgactcaggtatcctcatttctcattccaaggtgcttccgcgctttgtcagtaccc

SEQ ID NO: 56884 - DNA, 1028 bp, Homo sapiens
taaaatgggtttttgggccttcagtgcctaaagatgatgccgcacaattctcttgcttcttttcactggagactcgtgagcgagagactacagaattgagtagcttctctctctactcgtcttttatccctagcgacttaaggatctggttagagtggcccgaatgcattcttccagggtgagggcagccgcagcacacaccagcctcagtccccagggtggtcgtcatctcgcgagaaagggttggcggggagggtatccaggacgaggagagggaggagtcgccatcgcctccgcctccgcctcctcctgttggaggggggctgagggaggagactgttgctgatctttggatgttctggttagtctaagaaggagagtatgaggcgagctccggcccgggtgcggccgggcttcaggggcccaggcgccgctgctgccaccgccatctaacgctgcgccctggaggcccggcgcgcggatggtgccggtgcggctcgggtgttgaaacgggtgtcccctccccctcctcccctcccccacgcggtggtctcccctcccacccggctcaggcagagccatgtctcggggtggctcctacccacacctgttgtgggacgtgaggaaaaggtccctcgggctggaggacccgtcccggctgcggagtcgatacctgggtgagcgggggccccggggcggaggcgctgaggtcgccgcctagagtgggggagggggcacgctgccgggtctgttggaggtgggacggcgtctcggtgggggcgcccggagactctggggtgttgggtggggccttggttgccgaattccgtgccggtgcctcccccagtcaagccccctgtgcatgctgccagccgccgcccttgctgggtttttctcggagggccgggccgtgggcagaaggtactggcttgtaaaggtgttggggtcgctgatgggttgggactcgggagacttgcggaacctccaggagctgccgcgtttagagcaaaagttagctcttttgctct

SEQ ID NO: 56885 - DNA, 1046 bp, Homo sapiens
gagaaataattcaaattgtattataacattgtatgaaatgtagctagtttagaaagagttttaattgtcacataaatatgagtttcttggattattaccatctttttgtagctggcgctgttctagtataattactcagtattttcagtcttatatttgaaagtaatttttattttttcctttttagaatgtatttaattgctcaaatactgatcattttaaaaatctgtattttaattaagtttagtattttcatattttttcttactttaattggtttataaggaaagtctacaatattgtggtagaaatcaatcaattttggagttgtatggccaactataaagaaaagagtatcttccttagaaatattgattgagtatatttattttgatttcacataggctgaatgtattagaaatatttctagtagaaatccgaaaaaaaagttaaaagaaagccgtattgtttttccgctcattgtcattcttgactgaattaggagttctgagaatggttattctaattactaatgagaaaatattttaaatataatttcacctctgctgtataactatatgtaattggtattatgttatgttttgtaggatattttaattaactgtcgacgtgctgccacgtctgttgctatttgcccaccaataccatattaccttgctgttggttgttctgacagctcagtacgaatatatgatcggcgaatgctgggcacaagagctacaggtaagaagataatattagagaaaatataggactgtcagttcaaagagtaaatctctatgacattttcagttttaaaatttcttgtttgttataaaatttcagaaaatagtatttgtttaatatggattattataaaaaataacatttcaccaagtgtttatgaccctttgggatgatacttttgcagtttaaaaagttgtaacatttgatgtattagtttggcaggactgccataacaaatgaccacaaactgggtatcttaaagcaacagaaatttattctcttaaatttctggaggctca

SEQ ID NO: 56886 - DNA, 1989 bp, Homo sapiens
tgttatcttaatttggggggaacttttggaagatgacttcgtgtgattgtatttataaatcattttccttgattaactcatttcaacaaagcatacgtaatctggaattctagacaatcatgaatttttttggtagaggtgttacctttataccatattcttttttgttttgttacaaaatctgactgcagaggaagaacctctactggaaataaacgtgatggcttttatttgtattgctacattaagtcacatgtaataattcagattaagagttttaaaaaatgtttttctttaaaacattattaattttaaataacttcttgtttcttttttagggaattatgcaggtcgagggactactggaatggttgcccgttttattccttcccatcttaataataagtcctgcagagtgacatctctgtgttacagtgaagatggtcaagagattctcgttagttactcttcagattacatatatctttttgacccgaaagatgatacagcacgagaacttaaaactccttctgcggaagagagaagagaagaggtaggtttactcaaaaccatgtcctttggccgggcgcggtggctcacgcctgtaatcccagcgctttgggaggccgaggtgggtggatcacctgcggttgggagtttgcaaccagcctgaccaacatggagaaaccccgtctttactaaaaacacaaaattagctgagcgtggtggcacatgcctgtaatcccagctactcaggagactgaggcagcagaatcgcttgaacccgggaggcggaggttgtggtgagccgaaatcacgccatcgcactccagcctgggcaacaaaagtgaaactccgtctcagaaaaaacaacaacaacaacaacaacaacaaaaaccccatgtcctttattcaattcagaaaacaattcagtgactcttggggcctaaaggccaaaaaaaaaaattaattttcaaggcacttacagttcagaaaacaaaaaacatgagacatacttgaaagaatagaagctaataaattactatcagttattactaattataattagcaattagttactaattactaatagttactaattactaattatagttagtaattagttactaataatttgtaattataattagtaatgacaaaaatagtatttttgtaatttgtgttataattaatagtaaataattactagcgtctattcttaataatgtattagtaataataaatcactaatttattattggtattctaaatactatttctaaaaccttatccctaacagtgaattattagggataaggctttagaaaaaaatattttaaattatttttaaggagaatatacttgatagcaaaatgtttatcttaactttgtagatgtacagcagcagcaagaaagatcaacagtgctaacacttgcagaaaaggcgattaaaataatagaaaatatgatgataaatttccaagagactaaatgtgtatgtccatggatcaatagaagttttacgtattaccatttactcttcatatatggacagcaatccctttctgtcccaattgtgcctctttcacagttacatactagtgatttataacagtaaccttaggtatattttacaaaataaatataagtgggaaaaagataagttaaagtagttgtatatattgaaaagtaggtgaatgaattactttcacaagactactagaagataatgaatttattatttataaaaggggaaaagtagaaataaggtatctttgacagtacacagctgtagaaaaatgtttgctttaacctgtttaagcttctttcctcaacatgtttttcactttggcttttttattttataatgtcctgtgttattcactttgaactttggcttgtaaaagtcttttgaaattaaccattgatttttattttcagtgaccttttggtattggctcaatgcctattaatacgttttaaaggtta

SEQ ID NO: 56887 - DNA, 1089 bp, Homo sapiens
aggcaagtcataaagggtcgcaatagattctgtttgggaaccgaagagtaaattgtcaataatgagtaaattgtcaataataaataaaaataatgatggttcccattgttaattaggtatgtgggtaatttaactagactatatttatcatcacaatagaaaactaaggctcaagatggttaaaaatatcttccttttgtcagctggaaggtgatacaggtgggattagaaatcacatatacatgatttcaaagttgcattcaggctctttaggttgaagatattagatataggctgtcaacatcagtggatatttatcctcagaatgaatgctttaaaagactgacgcttataccagtgtctttcatattttcatgtagatctaatttgcatactcaagaagtagggagatggaaataaatagacataaagtatgctttaagagttgagagtagatgagttttagacttacatagaatttacccgttcttattttttagttgcgacaaccaccagttaagcgtttgagacttcgtggtgattggtcagatactggacccagagcaaggccggagagtgaacgagaacgagatggtaactatactttggtcagcttttctttgtatatggtattttaaaattaatattttaacttccagtttcttcactattataaattattctgtaatgaacattcttatacatataggtatacttatgcaaatatatcttaggataaattcttagaagtggaatggcgcagtcactggataagtaccttttaattttggtagttgttatcagattagtctccaaaaaagatgtgctaatttacattcccactgaaagtataagaatgcccattaccccatagtacgttgggtattgtcagactttgcagtttttgcctttctattagatattaagagaaatgaaaactcagcccaagggttttatattagcacataaaatgttttctatcaagtgcctttgataagcataagaatcaaccctgggagctttaagatagcacacttgaaaatagaattaatctatgaattataattctatattattatgttttattaa

SEQ ID NO: 56888 - DNA, 1261 bp, Homo sapiens
gtatgtttttgttattgttgtacatctttttttttttttttttttttttttttaaagacagtctcactctgtcacccaggctggagtgcagtgcacaatctcaggtcactgcagcctccccctcctgggttcaagcaattctcctgcctcagcctcccaagtagctgggattacaggttcctgccaccacacccagcaaatttttgtatttttagtagagatggggttccccatgttggtcaggctggtcttgaactcctaacctcaagcagtccatccgcctcggcctcccaaaatgctgggattacaggcatgagccactgcacccggcctattgttgtacgtcataaatctacatgttcaaactaaaacttaatgcagcctcctacccttcctgttccgtaattggctccttcttggtccatttgcttatttgaataacctgtgagtttttcttgattccttccttttcctcaagtcccatgccagctcatcagcaagttcttttgttcctgtatctaaactataacctgggtcttttcatctcaccatcatttcttgtctcctaattaatctgcctgtacctactgttgttccattataatgtattctccatgcaggagccagaatgagtattttaacatgttaaatcagattatataactttgctgtttaaatcccttcagaagttcctaattgcatttggaaatacaactacaaaagaaaaaaaaatcaaactcctcactgtggacgtataagaatttatatggcctgcccttccctgtctctctagcctcatctcattcaattttctcagtacttgatgattgttacactctagatgtactactgatttctttcggttatcagagaatttccgtgccaaattctgccctgccctgccctgccctcccccgccccaccccgcctccaccctgcccccaccccctcccctcccccctccctccctcccttcctcccacttgcttgctttctctctctctctttctctctctcttttctttcttttcttccttcttttcttttctccttccttcctttctttctttttcttctttttagacagagtcttgcactgttgcccaggctggagtgcagtggcgtgatctcggctcactgcaagctctgcctcctgggttcacgccattctcctgcctcagcctcccaagtagctgggactacaggcgcctgccaccatgcccggctaattttttatacttttagtagagacagggtttca

SEQ ID NO: 56889 - DNA, 1052 bp, Homo sapiens
acttaaaaaattttttaaaatgacaattctaacatgaaatatttagctgaagaatatataactcacttttttagagctcttctcaataaattctgagttgtttctaaatgcataagtttttatccttttaattgaattttgttatttgattgaaattaacaaagcagcttaaatttttgtgtataaatcagatgagttaactgattgttttcaatttctgtttctttcctagtatcattttgttctatgttcattttgaaatcttttgcttatggaggactttttatttccatttggtttaattacttaaatattcctagagaaatatatgtatctaattcatcgtagttaaatagaagcatttggttgtatatgtattgtctcataatttaatgaccagtaattttttatcagtaatttgtttatagtattcctctatgagacatgtgttttgtttatatccttcttcttttttaatgtataatcaaattcttattattttctattttattactgtcttttcacctttcttttcctatttgtgtcagaatttttaaggggccctgagatagctttgcttcgtaagcgcctgcaacaactgaggcttaagaaggctgagcagcagaggcagcaagagctagctgcacatacccagcaacagccttccacttctgatcagtcttctcatgagggctcttcacaggaccctcatgcttcaggttattaatgtcaagtgtccttaagcagctgatagaattgttttttaatactgctactgtgtaataaggtgcttcccttttcccattcaaaaagagagctaatgcgcttgcagcttacccctcctttccttgcatatgggtggtattcaacatcacgtgttagggggacagattggcagcagcatctgccagagaggtgaatataaaataatcaattttaaaagttgtaatatatttggagaggggcaaatatttattacttttaaagctgatgacctctttttgaataattagtgaatttagagcctgcattgatctttctattgaaagttt

SEQ ID NO: 56890 - DNA, 1091 bp, Homo sapiens
tgtttgaagataagatttcttggagagtttatagttttcttacggctcttaaattgttaaatgagggcataatgaaatgtataacaaatccaaatggatgaaaaatatttttcacagatttttaggagagtttcccaatatttatttcactgtgagtcacatttttcttgtttttttaaagagtttaatttgttttctaaagaccaatttatctgttctttaaaaacaacatagatggtagtgttgaatccaactgtgaaatggataaatgagaaggcatcttaagaaagtaaagcacgaatagattagggaactgattgaaatgctattgttcccactttcttttttgtgtactaaagatttaactgttctgatgaaaaagtgataagtaaggataagtaaaagctgttattcaaataatgatcatgttttgtcaaaatctagtaagagaaaaatacatgaacaaactggtgatactagaagatggaagatttaaagttgattgaaatggtaccactagcaggattcagacttttaaatgtacaaatgcaagcaatcaaatcctataaaatcaatgtgaatccaggatatattggaaaactcagctatccagctaagggcaatcttaaaatacctactttttgggaaaaatatgccattatgagcagaaactggtgttggccaaaagtattttgttaacatttgctaagaactagagcacaggatattagaaactgggaattattcttattggttggggagagttgcgcttattacctatgtttctcttttactgtagccctactggaacacctattccccagtgtcttgcttaggttactagatccccaggctgattagagagtaaggagaagcttgggcctaaaaatgttgctaattactgtcagaatcaagttaagaattaaaacttactaacttctgatgagtgctctttccattttattatgctgcctgccttaataccagtgtttttcaaacagtagaaaccgcttataaagtaaattcttacatagaaacccagcatattaaaaagataagaacgaagctgttctatttgaagccaaggtaga

SEQ ID NO: 56891 - DNA, 1044 bp, Homo sapiens
acaaaaatagtacagaaacaaagtgactttaccatttgggatgtcaggtttataattcacattattttcaaatagcaattctgtaggacaggatttttcatgagttggaagttaagacagaggaattgatactaagttttgttatcagcttgactcttgtggaatacttttctactgcatttctgtatttgaagtcttgttaattgtcctctcacagaataaaggctagaagagaggttctatgagattctcccccccctttttttttttttttttgagatgaggtctcacccagactcgactcgaactcctgggcttaagggttcctcccaccactgagccccgctgagattctcttaatgtgtgctccaacatcttcaagaggaatgaaaaaagatataagtccttcattgcaatagaaagtagatccaataataaaaaaaaatcctaagtatatttgcttttatgaaattgtgattgtctttgttatttttcaagagaagtttatttttagtattaaatcagtccttgaactggtatcaaggaaaaagatatctcacagaagagttttctttctgcaagcaactggcagaaatgtgacatgtttgattatgtatccatttgtattccctatgtattttaatgtttcccaaactgttgttcatcataaaatgaaaaatatgtaaagctctgtttaattatgtctttgcatatccatgtactctttttttttggcaggtggggaaggtagctttaaatactctattaatttgtgtaggctttcttgattttgtcatttaaaaaagatttcatacattgagatagatgtgtattatagacatcatctataggctcttaaaatgaaattgctgtttccacaattaaacaaattccttgcaagattagtcaggaagagaaacggaaatataccaaaatataacaaagtatattttagaaaatatcaaagcactataaataccaccctcttctccatcaggtgcagactgtgattcctccctaaattatagatctgtgagtttgaaa

SEQ ID NO: 56892 - DNA, 1036 bp, Homo sapiens
cacttcaggtattaaatagattcactcgtaacttgtttagattctattcctttttccccctctataaaccacatatacaaccaaaacaaatacagtggatttcattgctaggtataaaaatgataaagactaattcaaactaacatttatatctcatccatttatagtatgatgaacaactatcctggccactgtgtccacaaagaggattgtgcttcactgtgtctcctcattttaactgcttaaggtccccatcttttggatttgctatctatcagtttaacagctggactatagaagcaaaagtaatttattaaaaacaagaaacaaaatacagcatcgaagggaacaggaaagtagataaacatccaatgctgcaattttataacaacaaaagcaaaataacaccttacttgtttcactgtctccttctggtggttgcactgagctctgtgggacgaaagattcctcctgaccctcagatttgcaatggctcccaattcctctagaacttgatgctatactgctcctatcatcaaaacaagataagtgattccaccaagaagttaatcaatatgatcttttaggatttttatattttacaactagaaaggtagaccaaaaaattcacaagtaaaatgtaggatttataattttaatagcatttgtaaacatcatttcaaacaaatcaagatgactatcataacacactttactcttgaaaaaaaattcaaaaatataaagggactgcttcttcactgtttggatcctttcattatctagtatgtatttctacatgtctctctattgaattttaagtgaactacattgtctcctttcttgtcttcactacagatggttcaccatatccaaaaccttaatggttatacagatttttatcatatgcccttctagactctgttattccaggctactttaaaattagtatttgaacaaaagcctggccagttctttggtcttttgaactgctccctgtggatcacttccagttctgatctgctgttcaaacatggca

SEQ ID NO: 56893 - DNA, 1075 bp, Homo sapiens
aaagcttaaagaggtttcttgctgcaagtcttctcagaggctttattacgctacaggttcttgtgaatctcacaaagaggtatacacaatgtagtatttcccaaattttgtgaccacattgtagagtatcagaacactttggacaacagtgaccttcatcttcttattctgtaattaaattattccattcaaaaataaattgagtgtgaatttattattaaaaacttaagcctgggcccctccccgccccgcctcccggcgcgggtggccgaggcgtagcgctgcgacccccgcacccctgcgaacatggcgctgcgagtggtgcggagcgtgcgggccctgctctgcaccctgcgcgcggtcccgtcacccgccgcgccctgcccgccgaggccctggcagctgggggtgggcgccgtccgtacgctacgcactggacccgctctgctctcggtgcgtaaattcacagagaaacacgaatgggtaacaacagaaaatggcattggaacagtgggaatcagcaattttgcacaggaagcgttgggagatgttgtttattgtagtctccctgaagttgggacaaaattgaacaaacaagatgagtttggtgctttggaaagtgtgaaagctgctagtgaactctattctcctttatcaggagaagtaactgaaattaatgaagctcttgcagaaaatccaggacttgtaaacaaatcttgttatgaagatggttggctgatcaagatgacactgagtaacccttcagaactagatgaacttatgagtgaagaagcatatgagaaatacataaaatctattgaggagtgaaaatggaactcctaaataaactagtatgaaataacgcaagccagcagagttgtcttaaattagtggtggatagaagacttagaatagaaacttttagtattaccgatggggaaaaaaaaactactgttaacactgctaatgaaagaaaatgccctttaactttctaatgattatagataaatataatatgcgtctttttcacaatatcctatgatttttagactaggctctagtgttcagaattcat

SEQ ID NO: 56894 - DNA, 2030 bp, Homo sapiens
gaagctagacataaaaaaaatgtattattccacttaattaaagttcacaagcaggcaaaattaattcatgatatcagaagtcagaataatggtttcctttaaagggacagtaatgatggaaatggggtacttaggagacttcaggaattctggttatactgtttctaaattctggtgctgattatatgggcctgttttgtttgcaaaaattcattgagctttttaccttaggattttcaactttcccgtatatgtgttatatttagtaaaaagtttacaatatcttttttatgtgtaaaaaccgctttcaaactcctctcagtaatgcctgttttcctgaactcttaccattctgatatacataaaagtcttttccatctaataaacataaaaagatcagttttttgtttttatcctattattagtgagactgagcatcttttatatatttgttaactgttatgagatctgtttttcttactgatttgtaacctttttaaagattatggacgtctggtctgttatatgtcaaaatataatattttaaataaattcaaactgacaaaattattaagtaatatgtgttaggagagaagttttattttaatagttaaatcagtttttaagagtcctttgttcttcaatcccagttctgtcaccaaatcatttcttaagagagtaaaatctgcttcattagttctaaattcgtaatatggagtccataaagaagatgctatttgaaggcccttgttttattgcttatatattaatattcttttttttttttttttgagacagagtctcgctctgtcacccaggctggagtgcagtggcgcgatctcggctcactgcaagctccgcctcccgggttcatgccattctcctgcctcagcctcccgagtagctgggactataggcgcccgctgccaaacctggctgattttttgtatttttagtagagatggggtttcattattctttttacctaaagtagtctgtttttggaacatctttaaaccacattttaaataaaatatcaaaatagaagtctatccactgctattatatattacctttagtttcttttcatttctctttatgtgttttcttaatatggagaagaggggaaagaacattggataaaatttgttatatttgtagtaaaattgcacatgaattttgtctgtattatgtttttataaaatagccctttaaaaaccagtttgccgcatgctattgcctttacttttcatccagtaccaaatttctaagtgatctcttaactaaaatactttgttgtagtaactcaactagtctgacttctcactgttgtgtctgcgtttttatgcttttggttgggggtgccttattgagatagtgtgtttatgtatttcctagacttactatattttcataagtttctcattattctttgtgaatatttttatttatttttgtttttttaatatgtaattcatatagacgctctgctgttgcccgtattcaggagttcttcagacggagaaaagaaaggaaagaaatggaagaattggatactttgaacattagaaggccgctagtaaaaatggtttataaaggccatcgcaactccaggacaatggtaccaaatgttcatggcattttttggtgaaattgcagtttcatgctctgagtgtttttccataatgatttatcttcatatattgccaatgggatttcagtattacattattaaatcttcagttatctctttatccaacatggttcttttagccctataatatattgtgaaagatcattattttttacaagaaaactctactaaaaaaatgcagattaaaaaaatttttagtttatacaagtaatcattgcttttgtttttttttttttttccccctctctttctcacatttgctgtctacctgaaaagtttctggtggattttttttttttttttttttagcttgtattagcattctttgttagttttggagagaaggatttggatctataaaatctaagttgattgc

SEQ ID NO: 56895 - DNA, 1020 bp, Homo sapiens
ttcttgttaacccttgcccaaaaatttattttccaagactactctgcctcagtcaaggtaacatcttttcaagggattcaagtggcccatggataataatttaactgtatttcgtcactaaagttatcagttctcctatagggaaaacaaggagccaacaaagtaaatggctctgagaagcaaattgcaagtaaaagctaaattaaattcttaaatgttttaagtagcctcaaaatttgacctttgtttttctgccatttgaaagagttgtgttctttgaccttcctcctttaaatacaagttacagtgattatttggcattgaatagacttaaggcagaaatatagacatcagacgcataaagaatgaagtaattcctcctggtactggctgattgtttacggtttgcctgatcttcaaggaaaaaatacagttactttatgatctttgatacgatttttaacttgccttgtaggttataactcgaaacgaactcatgctggaagaaactagaaacaccattacagttccagcctctttcatgttgaggatgttggcttcacttaatcatatccgagctggtaggaactttaagtatactactaaaaccatttttatatttgaaaatatattattatttaagatctgctttaaaggggtttatatatattttttaatatcacaaaatgagggtagcttaacttctaaactaggatttctgtgaatgcttgatcttggcacagtaacttagttcctcatgaactacatttgtcgtaaaatggtcaaaatgaaaagaccagagtcacgtaaaaactcttatcagctgctgttttcttagagtacataaccttaggatatattatcgtgcatattctttaatggtaggtttgttgaaaatcagtcatagcccaaacagaaataaatgtgacatgctaagaaatgaaacatacctcagtttgctttttgaatatttttttgttttagataaactgtgaggtgcagtgccacagatacataaaa

SEQ ID NO: 56896 - DNA, 1950 bp, Homo sapiens
acttggacaattaaacaattaaaagggacatatagtcccttcagtgtactgttcttggtgctgttgacctaggatccagtgggagcatttaatcctgtgtagataataaataaaatctcaggattcagtcttctcttgctgttgacagtgggactgaactgttttccttatgcttaaccttaatattttccatgttactatgtggaaatgtttctggggcagaaacatcctagttccatctcagtgatggtagtgattttatgctgttgccttcttcacaatacccttatgtaatgtatcttaccttcataaaacttatattcatttattcagtaaaccttcattgaacatcctatactaggctctgaggatataaagataaaaagaagtaactcctgccctccaggaactctcaatctggtctgcaggaagacatgcaaacgactattactgtaattaggatcatcattatgaagttcatataagatattctagaatgtggaggagggagttcataattctgcagatagcctgtttggaaatgtccaggaaaagtttcaccaagggtataatagttgtattgagatgagtaaacctttatagctaaagaattgggcaaaagtatcccaagcagaggaatagcaagtgtaattcctgaaaacttgaacgagcatactgtactcaccagtttgtaagtttatattcacttgagtatttaacctaaataagctccttgagaccagaaatttacatctgttttggtcaccattgtattctcaggttttatcacaatgcctggaacatagtatttaatttaaaaaaatctttttacaaacagaattacacaaatcctcaacaatcgtccacatattttctctcacacagctgcctcctcactcccctttgcagcacctgatgtacctccttagaaacctagactccaaagaacactgtttgacaaccactgcagtagaacataatatatcaagattttaggagtgggtttcttttttcatttttacatgttttagaataacatgcataatcaaagctaataatactgtgttttctttactcttttatttgcctctaaagacatccacacatagtggtgaactgatttttaatgcgttttaaataaaaggcattgaaaaatattaataattgtaattactaaaagtatttctctttgcgattctcttatctgtgtttccagaccggttggagggtgacagatcagaaggctctggtcaagagaatgaaaatgaggatgaggaataataaactctttttggcaagcacttaaatgttctgaaatttgtataagacatttattatatttttttctttacagagctttagtgcaattttaaggttatggtttttggagtttttccctttttttgggataacctaacattggtttggaatgattgtgtgcatgaatttgggagattgtataaaacaaaactagcagaatgtttttaaaactttttgccgtgtatgaggagtgctagaaaatgcaaagtgcaatattttccctaaccttcaaatgtgggagcttggatcaatgttgaagaataattttcatcatagtgaaaatgttggttcaaataaatttctacacttgccatttgcatgtttgttgctttctaattaaagaaactggttgttttaagataccctgaatttgactttttatttaatgccttgctactttgacccacagttttccaatctctcctgtagcatacgatgactatttttctatattttctagatttaacaaccttttccttttttgcttgtgtgggatagaatcacatagaaggacttccttcatttctccttccacggtacagctgacccttgagcaacccaggggttagtggcaccagcccccctcacagttgaagattcatgtgtaactgttgacttcccaaaaatttg

SEQ ID NO: 56897 - DNA, 1029 bp, Homo sapiens
tcttaatatcttctctttacagatgaggaaactgaggctagattagatactttttccaagatttcccaggtaggaagtcagggagtcagcttttggtctaggaatggaactttgaaacccacgcccttaactgcggtttgtctccctccccggggtggtggagcagcagcaggcttgtccccaaggtagtccccaggcctggctcctcagctgacttttttttctgccttctccctcagaagctgccaagaactcgattcttcatgtgaaagctgaagtacacaagtccttggacagttacgcagcaagcttggccaaagccattgaggccgaagccaaaatcaacttatttggggaggaggctttgccaggggtcttggttacagcacggactgtcccggggggcggcttcgggggccgccgaggcagcagaactcttgtgagccagaggctgcagttgcagagcatcgaagaaggagatgttttagctgccgagcagagatgagggcctcagggtgccgtggggctgcagcctgagaggctggcccggggaggagttcccatcaccgcctgtgccgcggccttgggagcatgtcactgtgtacagctggccacacacagggaaggagcagcatctggtatgcagccaccaggacaaggactgaaaataatgtctacagtccacagcttcagcatttccagagaccacatgtgagcttcttttaggtcccagtgatgggaccagaagcatctaaagcaaaaaaaaaaccaaaaaaaaatctagagatgtggctgtggctttttgggaggtggggcatgggaggaccagagacgaagggcttggaaggagacccccacatgcatcatttcctcctcttcacagtgtgctgggagtccagccgtgcactgtgccagatgcctcaggaggagaaccctccccagtgtactgtgaaggatgacacagcacttcttcctaatgacacgcgaccgtcctggtgcctctacatggttgatgcgggcagtgtggga

SEQ ID NO: 56898 - DNA, 1040 bp, Homo sapiens
gtagtccttcaacatcattctggttcttaatgatccctctgaaaattgatgtaaatggatgattctgctgtcagcagcagcagaattgatctggcccaatgcataatccctcaggacctctgtaggtatcttaagactggccacacccccaaatatgagtgggctgtggtgtgatgacttggaaacaggactgttcgagctctgtgtcttgccagtgttgagctcttctctgttaaagagctctgcagagctgtggaacacgatgcagtctatataacttgtctggggagacttgggagaaggtgctgcttttagaaacatccaacccagtcatgggagcccctgacgcaggaaggcagcggttttctctctccgctgacttctctctcttgcctccctccatcccttttctagctactatgctgtcctgtaccccatggtgtaccccatgaagatcacagggaaccgggctgtgatggcacttgtctacatctggcttcactcgctcatcggctgcctgccacccctgtttggttggtcatccgtggagtttgacgagttcaaatggatgtgtgtggctgcttggcaccgggagcctggctacacggccttctggcagatctggtgtgccctcttcccctttctggtcatgctggtgtgctatggcttcatcttccgcgtggccagggtcaaggcacgcaaggtgcactgtggcacagtcgtcatcgtggaggaggatgctcagaggaccgggaggaagaactccagcacctccacctcctcttcaggcagcaggaggaatgcctttcagggtgtggtctactcggccaaccagtgcaaagccctcatcaccatcctggtggtcctcggtgccttcatggtcacctggggcccctacatggttgtcatcgcctctgaggccctctgggggaaaagctccgtctccccgagcctggagacttgggccacatggctgtcctttgccagcgctgtctgccaccccctgatctatggactctggaacaagacagttcgcaaag

SEQ ID NO: 56899 - DNA, 1661 bp, Homo sapiens
gcggctgggccggggcctgagctgccgcggcggccgctcctcggtgagcacccggcgtggggcgcgggcgcgggcccgggcggagagggcggtccggatggagccaggctaaactcattgtgcgaggctgagggctcagggcgcgggccgggaagggtccccgcccccacggcgctccctttctccccgcgcccctctcggaggtcagggctgtcctccgcccgcactgcgccttgctttggagagctggagctctttgtgggaagatgttgggggcgcgcccctcccctgcggcctggggcttctgagaggcccaccccattctgctgggtgcagcccgccccgtttctccggcgccgcccgaagcccctaaacagtccgctggatgggagggcgtaggtgcgtgcccgggactctgccgatgcgggccgcgccccctggggccaagagactccacgtcccgctcagggcaaagggtgtggggagaagcggtcacgcccctcggctggaatccgtgaggaccaggtgagcagccttctcccagccgggactcagggcgctgtctccccgagcctgggcgggcggcgggtggcgcgcccagaagtggcccggcgccgccggatgggcggctctgcccctcagatctgcgggagggagattcggctggttcttggaaaggggagaactcgaccagccctcggcgccttctgggccaagcttaacccccgtgcaacctttggacaaaggcatatgggatgagaacgtctgttgggtaagtggggtgtgtcctgtgcttcccggaggtctgctcaccagtaaccacatagctgcgcattggcatcgctttatatcacatcttggaggctatttttgcttgttattgtactttcatcccttttgcaaagtgctttcatagagcaggtcatttgatccacctcccggtgaagccgtgaggaggtgtgtggttttggagggaaagaacctcagttccttgattgtccaatggagacaccgataacctccggtgagcctgtctcagcgtcctaggggctgggggaggatggccatccttgtggctcctccgtggagccaggcgtggattcagcctggcttcttctcccctagtgacctggacctccagatgagttctggagagctactgcttcggggaataggcggttttcccttataatctattttactgcagccactgggagcaagtgaagagaggcatttttcaggccctcagggcagaaagaggaggtgggagggacctcaggtcatagagacagaggctcttcaactgtaactggaatgcatggcacccatttctgttacttctttcagagcacctctcttccggtcctcctccacacccgtcttattttatacttgtcaggtgcttacaagcactttcatgtacactttttcattcacacaacaaccttgtgaagctctactagcccatttgataggtgaggaaactgaggctcaggagagatgaagcattcttgcccagctaggtaagcagcccagattgaactcagatcttttgccttggtagtgcttttcacgtggtttcctgatggcacacaggtgagttctttaactcagggcttctccctgccctgtagctccactgccataacatcaagaataga

SEQ ID NO: 56900 - DNA, 1054 bp, Homo sapiens
caagacccacatcatgaagtcggcggatgtggagaagtgaggcttcggggcacggggtctgggcgctggccggttgctggcccagggcgggaggcagggcgaactctgtgcagcccctccccttttccctgaggcggaggttcggtccctccggaccggacctttgattgacaacttcgataaataatccagtcacacttccgggccctttggttggggatcgccaggcgctgctttcgtcaactgtcaatccgcctgggtttgagtagagtgtgactgttctggtggactttcccctcaccaaacgtctcctcctgcctcagcctgcaccacctttctttctgggtggctgttgcctgttttcttaggggttaatgacggggatgatttataagtttggtttctgtcacgtcaggtgctgtgcccggcgcttgagataggaaatgtaaaagacaacgtgcgcctcaattcacagtctcgtgagagagacagacaattatattacagcgtgaataaatgtaatgaagatgtatacacggagtgatgtgaggtcttttaggggctcgaaccatctgggaaattgggatgcctgaactgaatctttataaaaccgttgcggggggcggtggataggtacatgccatcaggtcaggcagagtgagttgtgatgcgtttttgatgcctgggctgaatcttgacaaaatttaggggaatcaggggacgcatgtaaagctgggggctcagggagagtgaaagctgtgatgtgtttaaagagctgtgtccgtgtgattggagcgtgaggtaccatagggggtgttgtgagagatgagaggtaggccccaggggaatcaagatactgagggaatttttatgcctggctaaggagttttcaattttatctgacaaccactgggtgtaattttatccaaaggagctgcattatcagatgtacgctctgaaagatttctctggaggccatgttgaggctggattgcaggtccgcagggatgggaaggagaccagttagtaagagaaaagataggttttagaagat

SEQ ID NO: 56901 - DNA, 1748 bp, Homo sapiens
aagtcatttcaggttcatactcagggcagacagggcataaacctactttgtctaaccagaagttctttttgctcatatatttgttcatctataaacttgtgagctacaagctagcaggttctgtctaaatcatgtaatacattaccaaggcccgaaacacattttaatgtttcttgatagtgataatgataacaacaaggccgtctgccgttgccaccaactacacttttaaaaataaatttttccactaatgccgtcttttattttctactgataagtcaacaagcaaaaccccctcacattaggttctgaggaatgccacaacagaaaacaaggacgataaaaatagttgcaaaaaataacccgttactagaaagttctaatgctcagactgtccaagacaatcaatgactcatgaaagaaaaaagtaagatttacctttaacttaagagattctccaagtaaggttcccttataatctgttgtataggtccaatcatatggtttaataacctctttggagtgttcaccctccgtcctcaaataccaaaatgagaaggatcagattcagtgatgcagaatagagattatctgtatttatatatcacatcaaattatattctataataacatatcctattaaatatatacacttgttataattcaccagtacaaggtttttcttacagtttttctgcatttattatttaacttgtcatgtactgatgtagtcttttcaattagtctgtatacagcctgaggacatggtttaaaggtttatacttatttgtatcatctaaggtacttagtacatattaggcacaaagtaaataattgctgatttgactatcaaagaaaaacatgttgtcttaatttcaatgcttctcaaatagggtatttattaagcatatcataagtaaacattttttcttaaaaacaggaacattaagtatagcctactgcctcttcagtaaggaacactgaaaaatcgaaaacgtacatagctcagctcagttgtaattcactttaacaagtattcaagcagtggggtaattaacttccatttttatgtctgagaaaaacgaattctagaatgatacaactctcaagtttaataataccagcccttcattctaacaacacacacgtatcattactgaatattttttcaagtcttttctcttttgtttaacctaattaccttttttgtttaacctaattgaccggattctcacctgctttcttgccactcttcagcacaggccactttaagcattccttggtagttgtttacacatcttaacgcatctgtagcattgaactcaattccaaagccagacccatgctggattcttaaaacgttgtctccaaacatcatttcagggagagatggcatatgtaattcatcggctaatctatacgtaaccaaaagtcgggtgagataattttatatcgctgttggcatttttgtttcttttccatcccaacagaattcttcctacttgctgaatgagttacacagcacatgatttaatcaatatgatatatttgcaaggtctataaaatgctttcatcatccattctttcatcatcatatggcactgtactaagtagtgggctaaataagataaatatacaaatacgtaatataatagcttattatactactataatatatagcacacagatattactataatatatatcatgagggtatgaagaaaagatagcaaagcaattaaagatac

SEQ ID NO: 56902 - DNA, 1004 bp, Homo sapiens
tgttccttactgaagaggcagtaggctatacttaatgttcctgtttttaagaaaaaatgtttacttatgatatgcttaataaataccctatttgagaagcattgaaattaagacaacatgtttttctttgatagtcaaatcagcaattatttactttgtgcctaatatgtactaagtaccttagatgatacaaataagtataaacctttaaaccatgtcctcaggctgtatacagactaattgaaaagactacatcagtacatgacaagttaaataataaatgcagaaaaactgtaagaaaaaccttgtactggtgaattataacaagtgtatatatttaataggatatgttattatagaatataatttgatgtgatatataaatacagataatctctattctgcatcactgaatctgatccttctcattttggtatttgaggacggagggtgaacactccaaagaggttattaaaccatatgattggacctatacaacagattataagggaaccttacttggagaatctcttaagttaaaggtaaatcttacttttttctttcatgagtcattgattgtcttggacagtctgagcattagaactttctagtaacgggttattttttgcaactatttttatcgtccttgttttctgttgtggcattcctcagaacctaatgtgagggggttttgcttgttgacttatcagtagaaaataaaagacggcattagtggaaaaatttatttttaaaagtgtagttggtggcaacggcagacggccttgttgttatcattatcactatcaagaaacattaaaatgtgtttcgggccttggtaatgtattacatgatttagacagaacctgctagcttgtagctcacaagtttatagatgaacaaatatatgagcaaaaagaacttctggttagacaaagtaggtttatgccctgtctgccctgagtatgaacctgaaatgactttaggaagttacttaatttgagtct

SEQ ID NO: 56903 - DNA, 2291 bp, Homo sapiens
ataaaggaagcagtttgtgagaagctaatatttccagaaagaattgatcctaacccagcagactcacaaaaaagtacacaagtggaataaaatgtgatacaacatatactcactatggaatctgactggacaccttggctatttgtaaggggttatttttattatgagaattaattgccttgtttatgtacagattttctgtagccttaaaggaaaaaaaaataaagatcgttacaggcaggtttcactcaactgctgtttgtactgtctgtcttcacattcatattccagatttatattttctggagttaaatttggatgatttctaaattatcacaaagtgggacctcagcagtagtgatgtgtgtgtctcatgagcagtgagcacagtctgcattcatcatgaaacactatcttctaccaggaggaggttaatgtaaatcaccaaatcccaatgccttgtgactttcataggattcctgatcatgcatgttgatgtactggctcttcactttgggctttctgatgtttattcacacctttggagagttgcaacttgccacatacgaaattagtctcatagtgtagtgaacttcaaccccaaaattttaaaaatgtatttccccccagttttaaattgcctttgaaatttaaaaaaaaaaaatttagacttagtaccagaaccaaaaatacctagatttttggagaacttattacatacatagaaacatgaatatggtttaccactgtgtgtgtgtaggatgttagaattatctgtcctccatctttaggtgctttttcttaaatgtggttctacttatactgatatttttaatttccatcttccatgcaacctcagagtgaataaaccccttaaatttggtgctggttcgaaaaagtctaaagggtttattaggggttgtttttcgcaaatattacatcaatccttaaagcaacaagattaattttctgcttaaaatatttgggaagataggtaaggaggagggggttttaaaatataaaagcaagtttttctattttaaggtgcatatttgtaacattacaggggatgaagtaaaatgtaattaattagcacaagacttagggagtacagaaaatacacagaagtaaatttcaaatccatttgattgttttcatagtgaccccttagtcattttatattcttgtctgcctttctagaaaaatggttgtcataaagtggaaagtgattaaaaagcatcaaataagaaattatttcaagtggatttttaaaaatatttttttgaagggcagggggaaaattcaccccttttctgatttgaaatatgttgtacatatttccatttgatggataaatcattaagtaagaatatttgatttaaagtattagccaacctcttcaggtattagcctgaagataaattttaacaaaacatatacacttgggtatccgtcattgctcaaactctatagtgtattgctggagccaataggcagggtatattttattagctaaatttgatatttgtcttctgccttctgtatcacctccaagctataggaaatcaggattttgttggctttaagaaaacacatggtatgttcactgtatattaaatatacctgtatttaatgttttctcttaggacagaaaagtagacacacacacacacacacacacacatgttgtgttcagctttctgttttatattatttgccattgagattagaatagaacaggctctattcatgcaaactatatgaaatgaaaaacttttaagactcttcattaattggagcttctgggcaacatcgtgtgtgtgtgtgtgtgtgtgtgtgtgtgtgtgtgtatacagacattttttttttaacttgttgattcagatgtcttggtccctgaatagtcctagattacttattttgagaattcattgttaaaaattacagggaattaaaataattgccttttttttttttagagggtaagagatgggtagaagagtatgcctctgaaaattttattagtttattcttgtggagaataccaagaaaatgtgtatttgcccattgctaaatatgatatatgccattttgtatttatttgtcccaagtgtctttttgtaagaggagaataaacaataaggaattactgatcaaagttttactatttcatttatttgagtttttcttagagcttaattaaagaagtgtggtttggggtatacttttcttatttgtgctttatgttttgaactcagtcaacactgtagacagtctccaggcaggttata

SEQ ID NO: 56904 - DNA, 1021 bp, Homo sapiens
aaggccttgagtgattaaaaagaaaatcttttcctgtgtaggcacgatcgcaatatggatgaaccacagcctttgttcccgtctgcacaaggcttctcccccgtctttgtgtctccggagccttgcacgtggtaggtgctcggcattcgttgactggatcaagtagggcgagggagcgcggcccgttccggtttgaaactgctctggacgccgaattagtgtttggcagcgcctggtggtcttcaatcccagcccctccggcccgccgcgccccccgggaccaaaacaagcggaggcgagcgcgggcgcgcggggcatgccgggagccccccggtgggcaggtgcctgggcggggcgcgccgcggttggcgcctgggcggctgggcggctgcctagcacccggaagagccgtcaacttagcgagcgcaacaggctgccgctgaggagctggagctggtggggactgggccgcaatggacaagctgaagaaggtgctgagcgggcaggacacggaggaccggagcggcctgtccgaggtgagtgagcccggggccgtcggccccctctcgccgcgctcccgccctgcgtcccctgcccgggcctgggaagcctgcggggactccctggagtttctggacggtagctctgccccttctcctcctcttcttctgcagggctccgcgaagaggtctggcactacacggggcagtggccgcggcgtccttttctgccccgcgccccttcagcccatcctccctgacaagggggcggcgcaggaggaaatccccggactgagctgcgagtgggagggtgggcgactgggctgtcggccccggccccaccggccggggaatgcgctttagggccgggtagggctgggggccccgaggtccaggcggaaggagcctttgctgggtgggtcggggccccagacccggactggggtgttggggtggcggtccctacctcgcgacggggctggtggccgcgccccgagctctgccttggttttctgtccggt

SEQ ID NO: 56905 - DNA, 1145 bp, Homo sapiens
ctgtagttctttcaaagtttatcaagggatggtatctgccagaacagtttcagtatagatgtgactcacctatttttgaaaaaaatgtttgctacagtgtaaagaaaggaggattgtggacattttaaagttctgaagaattggttaactcctatttggtagaaatgaatcttgagactgtaagcttaactcccatccctccctttagcaattttggacttttgaataaatatagttacaaattgccttttggaatttactgtgttgacaagtaattgagcttctgtacatgttaagtataagatatggagaaggatgctggtgtttgtgtttatgtgtgtgtgtgtgtgtatgttttttttttttttaaatgacatgcacatttgagtggtagactgtttatattttgatttttcttccagggcagaaattggtacctatatacacacaccttgctttgcttatagactgattttgaatccagtttcagaggttcagcattcatatgggtccagctgaatggtgatattcccttcaacactcatgtgttctgactgtgtttgcttttctaagggctaacttacagtctgcctgacacacagtgcctggttctttagcattatggagcctgttccttgtatatggtttccttctaagtgacagggctgagctaactggaatttaccaagatacctttggacgtactacattttcactcatagagtagttggtagcatttttttcttcttcttttttattctcttttctcttcttttaaaattaataggagcagagcagaaaatttatcccaattaggtagaagttaaattctgtttagaatttataaaatgttaggagttcaactgtgccaggtatgggtggctcacactgtaatgccaagactttgggaggctgaggtgggaggattgcttgaagccaggagtttgagactagcctggacagtgtagcaagaccgggtctctgcaaaaaaacaaacaaacaaacaaaaaaaaacattaaaaaattagccgggcatggtggcacatacttgtagtcccagcaattctggaggctgaggcagggggattgcttgagcttcctagacttgagcctagaaattcaaggctgcagtgagctatgattga

SEQ ID NO: 56906 - DNA, 1446 bp, Homo sapiens
acctgtgataaggccattatagcatattaataagtgctcaggacccatagtgagctcccttctgctgcctgcttagaatgaagaaaggtcccagttaatatttgatttaatgctgtcagtgcattctgtgattttgaccgatattaaagtgcagcaatcctgactgatttcttagtttctgacagtctatgttatctttttctctgattatgatggctaatcccataatcagactgtcgggtaagtggggacatcccctcttacagatgaggaatttgaaactcaaacaggacaaggaactttcccaggatagtactactaataaatgttgaagctgcagtttgatgctgtgaaggtctgatctttcagtctaggtgctttctactctgcagcttccactctgggtgccctctaaaggagtgcctttggggtgatgacgttccactcatctttgtgtcttttctttcctagggatgctgtgaagaagtgttttgccgtgtgtcttgcataattcatggccagttttatgaagctttggaaggcactatggacagaagctggtggacagttttgtaactatcttcgaaacctctgtcttacagacatgtgccttttatcttgcagcaatgtgttgcttgtgattcgaacatttgagggttacttttggaagcaacaatacattctcgaacctgaatgtcagtagcacaggatgagaagtgggttctgtatcttgtggagtggaatcttcctcatgtacctgtttcctctctggatgttgtcccactgaattcccatgaatacaaacctattcagcaacagcacataagccttgggtgcaagtgattcccaggtggcaaaaggcagccccatcagagatcacgggagcaacagtaagggacagagttttggggtccacttgtccctcagcatggaagccatcaccgtggtcctgcatagagtgagtctgcttctactctggcatctgagaacaagtgactctgctttagacaagcccctggagagcctggccatggagtgaggtagaaaagaagcactttttggtggtatatgctgtttctgaatttgaatctaagcattcttggtgttctgattctgcgcctgactgtggaatgtattttctgacattaggtgcagactctttttctcttgggttttatttcccatccctccctccctctccctgcatatctttctttatgacctcctggcactagatggggaaagaacagagcagcagcagaaaatgctgctgttttttttttggacgagagcccataggagttgaaaaatcctgctgctctcagctatatttttttctccattatttataaatgtttgcttttaaactgattttattttccattctcccctggagttgggccaggggagagtggggtgggaagacagatccctgctgtgcagcca

SEQ ID NO: 56907 - DNA, 1052 bp, Homo sapiens
actgcaggctcagggagcaagaaataaaatcatgaaatgcattccaaataaaattaccttttggctgggtgcagtggctcacacctgtaatctgagcactttgggaggctgaggtgggtggatcgcttgaggtcaggagttcaagaccagcctggccaacatggcaaaaccccatctctacaaaaaatacaacagcaaaaaaatcagccaggctagctggtgtgcgcctataatcccagctacttgggagggaggctgaggcacaagaattgcttgaacccaggaggtggaagttcagtgagccgagatcgcacccctgcactccagcctgagcaacagagtgagactctgtctcaaaaataaataaaaaaaaaaatcactttttgatacttctgttaaaatagataataaggaaccatatcttaaagtgtggaggatctggcttggcttctgtttttgatagctctatgaaagtgacagatttgcatcatgagacttagtggaatgaattgggaaattgaagggcagcccagtggctatggattctattttctatgggactgtctacgccaggctttattttctctttgctcagataacttctgactagagtcgacggtaggattataaatggtttaaaatacgtattctcaaacctcattttcagcatataaatttttaagaatcagtgtttaaaggtacgtgaaaccatttgctagatttttgtcctagttttttttttttaatttaaaaatcttaagttttttttagtaagcttaagatgtccagtagtttatttgcagacagcatttttaaaaagtgaatagatgtttaactgaagttaaatacaaatttatgtctgtgtaactcttggtaagatataacaaaacctagacatctaaattttttggaaatttttattttaaaagtttgttgggaggtaaaattgtgtgactttaccttctggttaatagttttatagttaagaagaaagtccagcgaagtttacttgatctcagttgcactcaagaataggggatttagttccactt

SEQ ID NO: 56908 - DNA, 1028 bp, Homo sapiens
ttctaaagaaatttttttaaagaaggagggtggtagatgtcaaagacacaagagctctttgtaggtgctgactagcttactttgtccccaggttcatcttagagctcaagcagattcaagacatgaggcagagatgctagacttgtgtcaggggcaaaaacttctgataatagctcttggtgacatcaatcgtcagctcctgagtgcactccacgagctctcctgagaagcatcctgggcagcctgagaagacagtgaatggtgggaccacagtttctggaggtaatgctgtgttgtcaagaattttgcagcagtctttcaacaaacaccggcacccaatcacgcagttcttgccaacatgaatgcaagaaccaatctgagctgcgttgaccacacactcttcctcaataaagacatggtccccaatatgtaaaggaaagaattcaacacctttgctgaatttcttgaatggtggccttatgacactacaacttttcacaacacaatggagtccatctcttatgttttccagatcccctcagataatacagtcattcaccacatggtcttgcgattgagaagtatgttctggcttccacacaacactgactggagactgactttgttcccagatgccgtcttgatatactcagacttgttgtagagcagctcacctaactccatggtcaccgcctccttccttcagccccggatcctgtcagagtcagtcagtcagtctttctgagattccggctacttctgccattccaatatttctatctggccatgtcctttctctgctgaaacccttaaatgaggccacaaaggccaggggctgtgctaaaaagcatggtctctgaagctggactacctggtttcaatcctgactctcatttctagcacaggtttctcatctgtaaaaggggaataataatagccccagtctcttagagttgctttaaaaactgattgaggttagtagtaggcttaggacaatatctgggatagagtagacatctgtaaacact

SEQ ID NO: 56909 - DNA, 1024 bp, Homo sapiens
taacaacagcttagtttgtcctattaagtttgacttttgtataatatattttcttaaagaagacaaaactgtggagaaaactgtgcttaatgaagtacaagcaatatgaagaaaatattgaaaaacttgattaaacttgattaatatctttttttattttgggttttttttttttttttttttttttttttttttttttttttgggagacagagtctcattctctcacccaggagggagtgcagtcgtgcaatctcagctcactgcaacctttgcctcctgggtcaagagattctcccacctcagcttcctgagtagctgggactacaggcacacaccaccacacccagctaactcttttttccttttgcatttttagtagagacagggtttccccatgttgcccaggctggtctcaaacttctgacctcaagtgatctgcccacctaagcctcccaaagtgctcggattacaaacatgagacactatgtccagcctgaaaaacttgattaacatcttaggaaggtgatataattcttttgtcatagaattttgtcagagaaaggcagagcaatgggtgtagaacagaaaagttttctaccaagttatcacagaatcaatctcttcagtctctcccagattccagacagctggccaaatattaccaaattaattgtgctaacacactggttttcatcttattgctcccctactcaagaattcccaggggtccctaattatccatgtggaatgctccagttccacagcctggcctttaagtgtcttactttaccataccccgccactccccttctctgcctgggccctgcctctctctgtaatgtgcattatccactccaccccagctttattgtctcctgatcagtgtgcacttctctcctaccacaaacatttgctcacctgtttgttttttcctctactgtttcacctattttattcctacatacccccattaattttcttccttttgcatgtctacattgtcttcgttttctgcaatattt

SEQ ID NO: 56910 - DNA, 1051 bp, Homo sapiens
gccaaagctgtgctaagggccactccgatccggcctttggaggagccctgtcttagagctgctcagagcctttgtgaatgagatgctgaggagcatctggaattccccagcacccctgagtgtggaccttggctggttgctctcaacctggctacagtaaagaaaggaaaaaaaaatgattttaaaagaaaatacccatgatatatgcaacaacacagatggatctcaaaaataattatgtcaagtaaaaaaaaaggcagatttttttaatgagtacatactcatgattacattaaggtaaaactcgagaaaatgcaaattaacctatagtgtcagagagcagatcactggttgctggggggtgtgaggtcagaggaaaggattacaaagggacacaaaactttggaaagttttgggtgtgatggatatgtttactatcttgattatggtaatgctttcatgggggttatatatatcaaacttaccaaactgtatactttaaatatgtgcaatttcttgtatgtcaattataccataatgaaaaagatccctatataaacctcactcccagagattctgattcagttggtccagggtgggatcttggcatgaaaatatttaaaaatctcctgaaatcacagcccaggtgccaagggatgtgcctgtagtctcagctacttgggaggctgatgtggaaggatcacttgagcccaggagttcaagactagcctggacaacacagtgagatcccattgctatgaaaaaaaaaattcaccaaataattaagaatgtgcagccagggttaaggtatagaatcttgcacgccacagtaatgactttgttaatgatctgcaataagattgaaagccagttaacattgcaagaaattcaaatcaaaacttccctgccagccccagtgccttttgagaatatgggccccttataggcaagcagttacaaatgaaacttttatgaactctgatcaagagtctgcaggaccatttctacaatgaagtatatcatacagttccgaaataagtggaagtttacg

SEQ ID NO: 56911 - DNA, 1034 bp, Homo sapiens
ggaccttgaagtgtaaggtctcaagtgctgtgatgggaggatcacagatttcaagaagggaacagtttatacctcttgccaacaacccactttctaaaccatctggccaggtaagttactgctaggttgcaataaacttttggggttcagaagaggtttactttgaatatcaaccttacattaaactagcaagtcccctggttaaaactggagattcctccttcaatgatttattcaacatatatttcttgaaacttttatgttccaggcactgtgctggaaactggataattcacaagtaaaataatacttcgtctctttttttaaggagttcacagtttgaatatagcccttcttcttagttgttctctgggtactgtgcttgagtccttcttagggatattttcttatgttttgaatacttcatggtttgaatttttaatctttattcataaccctaattcatacatcagctcattctgttttctttttagtggagctattaatatataagagttggatatttggcaagatagcataatgaattgtttttaaaagagaaatgacagtgattattcaaaaccttgttaaaatactaaaaagaggaggtaaaagccagggcaatgggagaaaggacaaaatccttggaacgtaaagaatctatgatccttaaagaaagataggaagctgccctcaagatgaggcagagaaggaaagaattatagaagaggaagaagaggcctttggtgttgagtttaaaaagcaaccgggtgggcagaaagaaagaaagaccaaaatgttcagtgtaactcttgttttaaaggactttcacaccatttgttgttaaattgtatgtttagacctcactcattgtggttggtcatgtggatttttaacttcagaacaattatactccaattattttaattttaaagaaaacaaggattaaagtgcatgagctcactttaataggtgaccatatgtgtgattaaatttggaggctggaaatcagacttaaggttctgtggaggact

SEQ ID NO: 56912 - DNA, 1016 bp, Homo sapiens
agggaataaaaaaatataaggatcctagttctagctgaacattcctcctacccttaaccacctcccatacacactgcaagtggagggctgcccagcttctcgattttcaccctgtgtcagtggggtgaggtgcactcttgacgttggacaaggaagaaatcatgggaccgggggaaccaggaaggaagcttgttcatccgtgggaagattaaactttcattctgagcatatgactgcatcacagctttttgtttctgttcttcttgcagttaagatccttctattctacgtaatattttatggctgcctggctggcatcttcatcggaaccatccaagtgatgctgctcaccatcagtgaatttaagcccacatatcaggaccgagtggccccgccaggtaaaatccacatgaatagcttcatttccttcagagatagcatgggtgtcactttttctattgagaaaaaattctttggaaaattactctataatgtagtcttaaagcaaccatgaaaagggaaaagagaaacttctctcggctgcagccagatgtcctacccgcattgcaggcagagctcccacgggttgcagacatcttatttgcccagttctagagtgagggtgaagcgtcctggttcttggccagcctgctacccaccagctatgtgactgtgaacagattgagttctgatgggggcctctgtcttctcatttttcatattctagggtttggttagtgggatcctttccagaccttttcaactctaacagacatttttttacttcttgaggggggctatgactcaggtaaattcttttaaaaaagtcacttgggctcctgttttaaaaggtgaacttatttttagagatgataagaagctgtggaatgggcagctactcacagggagaggagccatgactttaggggtctattgtcccacctgctgttaatttgcagtttgagcttgaacaaagtcactcttacttctcaatatttatacccattgatttaata

SEQ ID NO: 56913 - DNA, 1120 bp, Homo sapiens
ttagctcttaaaaacttgggtgaacaaaaagattatcataagaaatgcaaactgccacacgagtccctgctgtgacttgggtgccatcagtgtagagctatgtgtgtccacaccagtcgtgaaaggcccatggccatcatgcctgatgctgataggacaaggcagtggaatagccacaaacgtgaatttaccatctggctgttgtaaaaatcattgtctggaggacctagagagaaagtgttgcataacttccgggctctcacttacgaatgaccttgaagctgctgctgagggatggcaatgacttgtcccttctctgctttcccttggcaaaggtttagtaacagctgtatttaggtgacaatcttcagatgatctacgtggccctgagcagcctagatcaagggctactgcctgccacaggcttttcctgcgtacctccttgaatgtgggaaggattcacagaggaagatcttcaaaatacggaggtggcaagcattgttgtgtagccctaagtcaaatagttctccactgtaagaaaaactcaaaatatttccagataaatttagagctgagggattggggaagtggaaaaaaaaaatcacgtaagtaaataacataacttaaacctgcttaataatccagtttccagcaactgttttccacaagaggtgggtctgtggaaaggttgaagcaagaattctggagtatgcagagaagctgaaacatgttttacgttgggtatggtgatagggaagcattgtgtcttttcatgtcctcttctgctagaactttgtggtaccattagttgtaattttaattggtgcggatattttgtttttgttctttgttatgccatttaaaagttattcttccatcatgatgtgattttataattcttttttttttttgagacagagttttgctctgtcacctaggctggagtgcagtggcgcaatctcagctcactgcagtctccgcctctcaggttcaagcgattctcctgtctcagcctcccaaatagctgggattataggcatgcaccaccatgcctggctaatttttgtatttttagtagagacaaggtttcaccatgttggccaggctggtctcgaactcc

SEQ ID NO: 56914 - DNA, 1071 bp, Homo sapiens
aatggatcctgtctacctggtcccagaatttgtggatgagttagcattggtggcaattagatttccaaaagctactgcacagccttatgacttggtaaagggtttgtggggggaactctgtttggcttcaacaactcaactacccaggtggtgatttctttatttctaaagacaagggtacaactagtaagtcatctcttgggtacacaggaaacctaatgatttactttaaaatgttcttggagccacagaaaaacagatcttacattgtatgcccattgtatgatgaataagcagaacagagacctgataagtaggaaggaccaggtaacaaatctgtgggagtgatggtgggggaaaaaaaaaagctggatttgtgaagcttcatttaaggattttttgctgcattcacccaagggtcatagaaagtggggtggaaagagcagtagcctgacaggtccacttctaccataaaatctgatggggttattggactggttgctcttaactgttggtcagtgctctcatgctagtaatctgatgaccagctggtctgtcggatgcagtcaagactagtgagaagctggggagatgaagggaacagggatgtatcatccagctttttcccacatacatgcatgagtagatcttatcaaatgtcatgtagaatgcagtgtcttgtttcaggatattacttaacaaatgttatgttttatatctagataagtcaaatatactatatgtacttgctcttcagtttggccttgagcataattaatgtaaaatactaggatttatctatttgtttatgttattcttttataaaagtggcacctttcctttattgtattgagaataagcacaattatgagctatacaaaataccaaggatttgcccctatggaatatgcatttttaaagataggtcaactgaactaaataactccctgcttgcctgaaagtgaatatacagccacaggaagaagaggacggatcagagaagagcctaaatcagagttcacggcatttagcttagacaggaggaatgatttctttaccctgagtgttggt

SEQ ID NO: 56915 - DNA, 1004 bp, Homo sapiens
atgtgtgtgtttatgtgtacatatacgtgtgagtatgtatgaattcatacctctgtgtattttttttaaaattggaaattacttttcaactcggaatgtataggagacacatgatttgtgcatggctacatttaaaagcatttctttgcttcctgtgcccttctcagtcatatgggtaccttcctggaggtttccatgggaaatgattcctatttagagatttgatctagtgatttatcagatgtattaaatgacaggtgcaagcagctgtgcatttgaataacttacaaggttgaaatggctacattctagtttaaatactttaaactcacatgtagattgagaaatgatgaacttgctacattataaacctaaagaaacaaaatcctttccctcaagccttttcccccttgtgctatcaacacttactaaagctaaacatggaggatcttccttatttctcaagagatggggaccaaaggcaggtaaatgtgtctttgaaaagcaagtgggaagccagaagttttttctaaatctaaatcttatgtaaagttgaaatactcattgaaaaccaaatattaaaattttacatacccagattatgatttctgcctcttcaagtggctttgttaattaatgatatatagcttaaggcaaatgatcctatcagaacaaagctgtctctagagctcagggtggttaatgtaaattcaagtttagaagactggagagggaaaaggttagatttgtttcctggaatataacttgaaattgcgtgccagcgattgggtgttctgctgtctttggccctctgggagttaccagtgcaaacagagctcatccttgtccagagtcataactaacaactttaagaagtgggcagtagaaagaggggcatgatgggagaaagcgtctggtctagtgtgaaatatgactcatgagaactccagtcagcaaggtgggatttgtgcagcccttggagaatgtcatggttggagaatttg

SEQ ID NO: 56916 - DNA, 1850 bp, Homo sapiens
tatatataggtttttttttttgagatagagtctctgtcacccagactggagtgcagtggcacgatcttggctcactgcaacctccgcctcccgggttcaagtgattctcctgcctcagcctcctgagtagctggaattacaggtgtgtgtcaccatgcctggctaatttttgtatttttagtagagacggagtttcaccatgttggccaggctggtctcaaactctggatctcaggtgatccacccatcttggcctcccaaagtgttgggattataggcgtgagccaccatgcccggcctcagataaacaataatttttaaatgtaagtgtgtcccacatagcatttgggacatacttatatttttttaaaaaaatgttctttgcttatctaaaattcaaatgtaaccaggcatcttttatttggcagtcctacaataaaatgcagttgtgatggacttttccaaccattgctcctgagtagtgctgtgtagtgtggttcacatacccatctaggaagtctcatgaaggcagcggcttttggatattaaagaatgtaacagagttttagagagtgcaaacccaaggcatacggactttgaattttatctgaccggcactgacatgctgagactttcagattggaaagcatttgtggttactgcatgtatgtcccaaattcttcccgtttagtttaaaagatccaaagaaatatcttggttaggtaggcttgagtctagagaatttggaatggttatacatttactgacaataaggattataaaagaagacctctgtgtccaaggcttacacgtaattagggagggtaaagccacctgcacacaatgctagctagcagggtattttaaaaaactgtgcacgttggggtactagaaacataatgggctttggagtacagcacacctgggttggaattctggttctaccactttctgtgcagccttggcccaggtagttaatctttcagtgcaagcagtgttgtcattcataaaatggaggtgatgcctaccatgaagtgttgctatggaaattaactgatctgtgatattaaagcatagtcactggtacttggggttacctaatctaaatgccagaggagtgatttaacaagggaggcaagaccctttctttttagccaagtggagttagcaaagtatgttttgtatgtggaaagtctacttttgaattgtcttcgtttctgccttcctactaatgtttttctctctgcctggtctaggattaacacagattcctcagatccagaagactgaaatttcctttcgtcctaatgatcccaagagctatgaggcatatgtactgaacatagttaggttcctggaaaagtacaaagattcagcccagagggatgacatgatttttgaagattgtggcggtaagtagactcattgtagatgtctgtggctagttttctttctctttaactcttatttcccacttctattttttgtttaatgatcgagagataatcctgaaataatgaaagattgaactctggccatatttagacactttttttaaaaaaagcaggaagacacaatgaaaaacagtacagcctcaagtatgactgttttctgcattggaaaggtgtcttactttaaaacactcctaggtactattttttactattcagagccaagacagcaattccggttttctttctcttacatccgttgaaaagtacagctacttatttccttatcttcccccaaaaagttctccctatagaagagtgcacagggccttctctcatcagaaagaccttttggtgtgattagctatcactgcactggcattcatgaaggaggatgta

SEQ ID NO: 56917 - DNA, 1121 bp, Homo sapiens
agtggtggttgaaaaggaaaataccagttcctttttaaaaattctgaccaaaaaaaaaacctagttctgaaaattattgacagtccttttgtattctgattataatatccctgttactgagctaagccagtgttgacagtgtgaatgatgctactcacgcagtgtgatccgtctcctttcagtcttctaaatagctgagtaatccattatttaaaagaagggaaatattgccagagactaaatattacgtgctgatcaagtactatgaagctttggtgtggggccatataccagctattccttttggtaaaatatcttttaatatgagtgaagaggtgagagatggttttcctggagatcttgcttaattcagatcatgcattaaatgcagaatagcgtactctcagaataggtaactatgacaaggaagacagtttctttttcttagaactgctaagggaattgctggtacaatataaaagttgtgtttttatttttagatgtgcccagtgaaccgaaagaacgaggagactttaatcatgaacgaggagagcgaaaggtctgcagattcaagcttgaatggctgggaaattgctctggattaaatgatgaaacttatggctacaaagagggcaaaccgtgcattattataaagctcaaccgagttctaggcttcaaacctaaggcaagtaatattttaaatgatagaatttagatgagtcatttacactaagtacttaattgatctgagaagacaatgtaagatagttttaaagtatactcagtgctgactttgaaacgtagccagtagagtaacaccaaaaacttctgtatccaccctgcaattcttgtagttaggacattaatctcattttctaaagttaaaggaattctgagaggcaaagctgcattctgaagtgagtctgtggcccttttcttaatactcctgctcagtatccagataacagtttctataacataaactctttaaaaaagtaaaaatggaaaaatatattttttccctggtggtctagtggttagagaaaaaaaaaagttttttattttttacttcataaagaatggattaaaaaaaaaattttaacccacttgcatgtatagtc

SEQ ID NO: 56918 - DNA, 1017 bp, Homo sapiens
gatggactgctggcagaaattaatgtacctctcaaaaggattttaagcttctttccacatagacaggatataatggaagaaaaacggtgagaaccattatgccaaaatgtatttgatattcatattgctggggaatacttcactgagatcaatcagctatttagcagcaaaagaaattgttgtggcatggccaagagaagactcatcccatactttctgagtaccttgcttttgacattactcatcgtagacactgaatgacatttggaccccacagaggcagtctagtctattgtgattgatttcttcccacatctttagagttacttggttcagtgataaattcagctactctttcttttcagtcctttttttcttttttctttggtctctacttggttatccattgccactgcctaattcatcacctccacccaaatctccaactattttggagttatttttgtcagagatcagagtatcccagcatctcactatcctcaccattggaggatagattctggcaacttcttagtgagcattttctctacatatttttaaagacaaatacattgctggcagaaacgtcccaaagagtcaaatctagacgatcattttcttgcatccaaaacagagtagtagcaaaatagtagttccttcctgatgtggaactaatattttatctgactttgattagactatgtatgtgttacatctcacatcaagactcacttgctgtgctgatctgagtaagcaagtgactgtcttccagcgaagtatgttcatcacacttctgagatagatttgagccatgggtgtagaagaggaggctctggatatttcatgacagcagtaattttcagactgtcctctgggtcccttcagtggattcaccccttcaagaccacccttcctcttagggcagtgacacctctgccttttttacatattggactttcctaagaaaattgcaaagaaacgctccttaaatggcagtctccccgactggagattaaa

SEQ ID NO: 56919 - DNA, 1097 bp, Homo sapiens
taagcaaagcttataatgggctactattaaaagttccatttagtactggtttgcatcacagcttaattgtagtcgttataaacttgggcacttattttcatttcagcaaaatcacaaacatgaccttaaattggttaggggagtcattcattctgctgtcctgatgtcttttgttattttggttgacttactgtgaccagtgtgtacttgtttggactacggagtagttttatttttcagaaacttaagaaatcatttacaatctactgatcataatgggttttatttttagcctcccaagaatgagtccttggagacttacccagtgatgaagtataacccaaatgtccttcccgttcagtgcactggcaaggtaaagacaaatttagggttactggggtggtggaagggtaggcagaggaagaggggagaatgaagaagactgtttaagtgacaggtagaattttaatagaagaaataagaaacattgctttcaagtataagtctcagtgagatgaattgtagctatactaggtaaaactttttaaaagaacagaaagatgtaatcagaataagactgatgtcagtttctccactggcataagaaactcaaatatctgaatttaatacattgggatatttgcttatcagaactgagaggtgaattagcccacagaagtactttctggcccacagcatgtattaaaaatttggggccaacattaaaaaaaaattaatgtcacataaaaattagtggtttgggcttctcttttaaaaatattgaaatatcgcctggtgcagtggctcacgcctgtaatcctagcactttgggaggccgagatgggcagataatgaggtcaagagtttgagaccagcctggccaacatggtgaaaccctgtctctactacacatacaaaaattagctgggcgtggcggcgcgtgcctgtaatcccagctgaggacctgaggcaggagaatcgcttggacctgggaggcggaggttgcagtgagctgagatcacgccattgcactccagcctggggacagagcaagactatctcaaaaaaaaaaaaaaaaaaaaaaaaaaaattgaaag

SEQ ID NO: 56920 - DNA, 2360 bp, Homo sapiens
taacaattagtgcatgtttcctttggatccaaaaactaatggaccgtttagagagaaaggcagaacaaagaaagggagttcccagacagtgctagcaccaagcaaggaagtggagattgatttctcaacaagaaaatgagaggcaagtagtaaactttggagataatatcactagacagattatttactgggccaacagcaaggtgtttctgcctttcaatgttggccttgtttctaggaggcttgaagaatgcttatttggcatttgactcagcttccccatccatttgcacattgagaatagtctcttcttatgaccatttctcaaggctgcaatggaatagactgagtagatgttctttcctctctcagtagtttgcaaactactgtgtagattgagtcttgtttttgagtacacatagtgatgcatgatgtgagccattaaaatttcatttcattctggatttcagcgagatgaagataaggataaagttggaaatgtggagtattttggactgggcaactcccctggttttcctctgcagtattatccgtactatggcaaactcctgcagcccaaatacctgcagcccctgctggccgtacagttcaccaatcttaccatggacactgaaattcgcatagagtgtaaggcgtacggtgagaacattgggtacagtgagaaagaccgttttcagggacgttttgatgtaaaaattgaagttaagagctgatcacaagcacaaatctttcccactagccatttaataagttaaaaaaagatacaaaaacaaaaacctactagtcttgaacaaactgtcatacgtatgggacctacacttaatctatatgctttacactagctttctgcatttaataggttagaatgtaaattaaagtgtagcaatagcaacaaaatatttattctactgtaaatgacaaaagaaaaagaaaaattgagccttgggacgtgcccatttttactgtaaattatgattccgtaactgacttgtagtaagcagtgtttctggcccctaagtattgctgccttgtgtattttatttagtgtacagtactacaggtgcatactctggtcatttttcaagccatgttttattgtatctgttttctactttatgtgagcaaggtttgctgtccaaggtgtaaatattcaacgggaataaaactggcatggtaattttttttttttttttttttttgttttttggctctttcaaaggtaatggcccatcgatgagcatttttaacatactccatagtcttttcctgtggtgttaggtctttatttttatttttttcctgggggctggggtgggggtttgtcatgggggaactgccctttaaattttaagtgacactacagaaaaacacaaaaaggtgatgggttgtgttatgcttgtattgaatgctgtcttgacatctcttgccttgtcctccggtatgttctaaagctgtgtctgagatctggatctgcccatcactttggctagtgacagggctaattaatttgctttatacattttcttttactttccttttttcctttctggaggcatcacatgctggtgctgtgtctttatgaatgttttaaccattttcatggtggaagaattttatatttatgcagttgtacaattttatttttttctgcaagaaaaagtgtaatgtatgaaataaaccaaagtcacttgtttgaaaataaatctttattttgaactttataaaaagcaatgcagtaccccatagactggtgttaaatgttgtctacagtgcaaaatccatgttctaacatatgtaataattgccaggagtacagtgctcttgttgatcttgtattcagtcaggttaaaacaacggacaataaaagaatgaacacattcctcgtgtgtgattcactcttgtctaaatgtcccaacctgtgacttctttactttccacaccactaattatccaagatcttgaagaagtattgaacctgaaacggagaaacacataatttcttagttcagacaaattttggtcttttccacttaacagagtccaagaggttggtcaggacttcagacactggcataccccttcccaaagacactaaaagttaatcaatcaatcagaggcagagaatcgatgaagctccagtttgaagttccatttaaaaaaatcatcttgcagtgctactgctacttcactcagtttagaaaacatgaagtgttggttcctgctattgcttcactagacatatgtgttaaaaaaaaaagttgttagcacttcagtttttaaaaaatgaggttaggtttgtggttcagtaaattaaggttcataccttgctttttggttca

SEQ ID NO: 56921 - DNA, 1016 bp, Homo sapiens
gctaatttttaaatacagctaaataaggacttaggccaatccctgaaccaaaaagcaaggtatgaaccttaatttactgaaccacaaacctaacctcattttttaaaaactgaagtgctaacaacttttttttttaacacatatgtctagtgaagcaatagcaggaaccaacacttcatgttttctaaactgagtgaagtagcagtagcactgcaagatgatttttttaaatggaacttcaaactggagcttcatcgattctctgcctctgattgattgattaacttttagtgtctttgggaaggggtatgccagtgtctgaagtcctgaccaacctcttggactctgttaagtggaaaagaccaaaatttgtctgaactaagaaattatgtgtttctccgtttcaggttcaatacttcttcaagatcttggataattagtggtgtggaaagtaaagaagtcacaggttgggacatttagacaagagtgaatcacacacgaggaatgtgttcattcttttattgtccgttgttttaacctgactgaatacaagatcaacaagagcactgtactcctggcaattattacatatgttagaacatggattttgcactgtagacaacatttaacaccagtctatggggtactgcattgctttttataaagttcaaaataaagatttattttcaaacaagtgactttggtttatttcatacattacactttttcttgcagaaaaaaataaaattgtacaactgcataaatataaaattcttccaccatgaaaatggttaaaacattcataaagacacagcaccagcatgtgatgcctccagaaaggaaaaaaggaaagtaaaagaaaatgtataaagcaaattaattagccctgtcactagccaaagtgatgggcagatccagatctcagacacagctttagaacataccggaggacaaggcaagagatgtcaagacagcattcaatacaagcataacacaacccatcacctttttgtgtt

SEQ ID NO: 56922 - DNA, 1048 bp, Homo sapiens
tttatcctcaaaacatcaggaggcaacccttgaggggaatgggcgttgacataatcaggtttatagtttttaagaggtctctccagttaccatgtggaaaatggactgaagggggtcaggttgggatagatttgttaaataatagtataacaactgaaaatacattgataccatgtactttaatttatgggttgttataaattcataaaatgtgtctaggcattagtttctccatgtggaaaatgatgaggctgaacttgtaattctcaaagcttggactcccctacaaatgagctgaataattgatcctctgagacctggaggcagcagctccaatccttaaccacttcctgtgccggctccaggatgccatgcgagaatgagcattttctaggtgcaccatgaggtgacaaagattgagaggccctcctctaaacccctttcctgcactaacattccatgattctaggttttgaggaaatcaaattctaatccgacaccttggttttaccattgaggaatgtgttgcccaaagaaggaaaatggctcacctaaaattgcatggcttagtgtatagaacattactctcctaactagtaatcctgggtttttctagtttgccatactgtctctgtatcctttgtaagcagtataatgaattattataattatcaaattgcaggtgcttctttttctttcctctatttatgaacagaagtacagtttattcttttttgattaccagttaagaatttattgctgtaagtcatcaagcatcgttttactaaaacttgaagactagaaatggagaaattaattcctaggaaaacaacacatcttatcttattctggcttagctgaaaatattgcaagactagcatttctatttcaaaatcagcccaaaggctgtgagcatacagaagtgatgaatagaaagatgttagctgagctcttaatgacttttacttgatttgaacttgagttcaaaggtaaatcaaaagtttaaagttgaacttgaatcttactatgccatataggctttccttag

SEQ ID NO: 56923 - DNA, 1015 bp, Homo sapiens
tggttgaagtggagggttcctttggtagagtatgggagataaatttggaaatgtaaattagagctagattgtggagactttggaaagctttctgatggcaataatgaacattatggtaacagtgataaaaataataactttaatttactaagcaatatataccaggtactatgccaaattgtttacctgcattacctaaaaactctgttgaatagtttctattatctccattttatatgctaagagagtgaggctcccataggtgaaatgacttggccaggatcaccccaccaatgagtggcagagagctgaaatttgaacccaagtttgtctaagtccaaaaccagtgtttctatacagcaaactaggtcaacgatgacaaaagtgtttcaattcaagtgccagtttttgatttattgataaaactacaaccaaatagaaaaaaaaaatcaccatgatggattactgatgtttgctgtaaatgctggatgggagtttcttggtatgtatgacacacagtggctacttaggctctagaaaactggaagccatcaaaggtttttgaacagggaagtgactcgataaaggttccaaaactttaaccaagcagcagagtttaaggtgagtagataataggagtaatggacgcgtatactctgatcatccagtaacaagtcttaaggacctggtagtctaaaataggaccattcagaaattttcttctccttcaagtgatctatttctactatcaaggtgtaattctttgaagagtatctgtctcctcccctgtcctctatgatccatgagaacagtgaccttgtgtgttttgttcattcctcaattctccagtgggtaggcattcaatatagttttcttaaatccagtaataataaaagcaatgatgatcatagaaagcactcactttgtgcccagactgggttaagtactttcagtacagcaaatgcatatggaatcagactacctgggtttgaattctagctctgccacttactag

SEQ ID NO: 56924 - DNA, 1055 bp, Homo sapiens
cacatctcaccattccctccacctgccagttgccagaaaagtccactgcagcatcccaaaaatgtgaacaattattatgtatcaattaaaaaggccacgtccaccagcatcttctttcattgctgtttattcaagtaaaacctgaaatatgtgcatgtggaaagcgaatggtttgcatggattcttttcttccttctcaaacctgatatttcagaagtctctacattcatcgtaaaaacatcatgataatataagaggccttaagctatcaaattgtaattctttatggcccagttagtatttcatcagcattggttgttttctcagataaaagaatcttggataaggagcaatttcacattccctcctatatcccgtcatagtggggcataagttcattgctagattcaaagggagttacaggttcataggtctttctgtttctcaagtacagtgccagctccacctttcttcagataggctgccttctgaatctgaaaagtaacaagcttaatgacttaagaactgtatttaatataatttatcccactttatataggcacttataaaatcatttgccgaagactctaggattattttagattaatttattttgtataaattggttaattaataactatggaaaatccatataaaataaatagacacaatcattggactaaaagtgaccttacagggggcatttaagaatctccaggcattttgtctcagcactttttgcatcttctctacctattccctgggaaatggttctcaaacagtagcacaattcctggatggctttttaattttttttttaatttttttgagacagagtctcactctgtcacccaggctggaatgtagtggcatgatcacagctcactgcaacctcgacctcccaggctcaagtgatccctcctcagcctccctagcagctaggaccacaggcatgcaccgtcatgccccactaatttttttttgtagagacagggtccccctgtgttgcccaggctgctctagaactcctgggctcaagcaatcgtcccaccttg

SEQ ID NO: 56925 - DNA, 1115 bp, Homo sapiens
tgacacccaggaatgagtgaagacagccagtctgtgaggccagaagcaagatggagtcagctatgctagactcctctcactgtcataatctttgcaaagtcagtttcataagtagttgatcaaatctgaatttggatacataattacttctgcatggattcttattctggtacactctgggggaaaaaatagtgaatcaaggattaatcagaaataaacataggtgcatggtgactaagatgattggacaggccccaatttcttggccgtgattaacgcaggcctctgcacatactgacactcataatttatctttagttttagcttctatcttgaaagaagaagagttgtgatttttagtagtacattgtcaaagagggaacaacttgtacaaatacaaaagcaaacagctttctcttagagatctaaaaatagtgcagtaagactggggctttgaccaggaggtagaaaatggcaagagataaagctggaaacatcagcaggggcctcgtaaagtcatattaagacaactgaacttcatcttgaggccattagggatccaaataaatgttttactcaggggaatagcacaatgatacctgtgttatagaggtcactctggctgcagtatagagaacagatgaaagggccctggggtcaggcagggaaacaagtgggtggagtctagggggacagagactaggtagaagtctattaagtaattcaggagaaaattctggtttcctgaattgctatggcagaagggatagccagaagcagtgagcttcaaaagacatttagtggggtagaacagaaagcctcagagactaattggatgtgaaaggtagcctgtgggaatgaatccagattaatgcctatccccaagcaaacgtgatagtaccatctttatctgtgttaccaaaatctaataatctaaaaatgtctgaaaaccaaagttttttcataagtttaatggtaaaacctaacctgtcttatatcaagttgtgtatcattaaacagttttgtttcagtagcttgacaaaacatttaatgtatatcatttttatttaacctatttagtgtgactcttcacactgctgtaaaaatattaatgt

SEQ ID NO: 56926 - DNA, 1999 bp, Homo sapiens
tacattacctaagaaatggcatattctgatttagtaaatgttctcattaataggataatacagtataatctgtacacatagggcttttcttttttttttctttttttctgagatggagtctcgctctgtcgcctaggctggagcacagtggcgtgatctcggctcactgcaagttctacctcccgggttcacgccattctcctgcctcagcctcccaagtagctgggactacaggcgcctgccaccatgcccggctaatttttttgtattttcagtagagatggggtttcaccatgttagccaggatggtctcaatctcctgacctcgtgatccgcccgcctcagcctcccaaagtgctgggattacaggcgtgagccactgtgcccggccagggcttttcttaagaaatatgtaaccaagaaaatatacttgacttgcaactatagtgaacagagtttattcttttctttataaatgggagtcttgcctcaagatcatatataaagatgtgagttattgcttatagaggtgtatatatttaaaatatataatagtaatagacatgtctaacataagatgaaagattatttattatatgtgatctctcatgtttagagtgaattggtcttttctatgctatggatattcaccagaagattaagtagttctttggggaatagtcttaatatctcaactggaaaagtcatttatgagcatgcacttataaacttaatgctattctagtggattagtccaattccacatatttgtcacatggcattttatatctgtgatgaaacagtaatattatcctcaatcaaagtcacagagcaagttactttcagagctatggattagagcttagagttctcatttccattctcaggcaggtgtgtcctagtttgagaaaatgtgatacacaaaaccaccacctcacaaaatagataaatggtggttacttagatttcaaaaggatgttcttcggggttccttaaaataggcacttctgaaggatctaatatagcctaaggagcccagactattggtaaccaagaggcctagtttctctaccctatcattaacaaagttaatggggtatataaatttgagcatgttagtcattccattcatccattcacttatccactaaatcattaatattttattcaatgaatctttcatgaggattctgtgtgttggatataaaaaggttgtagtccttgtttttaaggagttaagacagaagggtaaacaaacagtacatttttaatggtagaggtaatgcagcctgttagcagaccactaaaacctaaacaagatgtgaaggtgaactgtgatagtaggagtagacttggaaagtaaggaaagaatgctatgctaaagaaatagaatctgtgtgacttggtaacaaattagatggggggcccaaaagggagagagaggagtcttaggatgactcccaagctgttggcctaggtaacttggtgtaagagtggtgccatttatgacgagagggaatttaggaagagggggagttttgggaggaagacaatgaggttagttttgtgcaagctgagtataagagccctgtgggggccaggcacattatagctcatgcctgtaatcccagcactttgggaggccaaggcaggagatctctgaggccaggacttcaagactagcctggttaatacagcaagactttatctctacagagttgtttttttttttttttaaattagctagttgtggtggcatgcacctgtagtccgagctactctggaagctgaggcaggaaggtcacttgagcccaggagttcaaggctgcagtgagcattaggcagttgtatagtccagcctgcaactcagaaaagagaactgggcagtagttaaagagtcgtctaaagatatatgatagtagtgaatgaaattgcccagggagagccagaagataagaggagaatatggagtggaccctaggcagtaggaaggtggaaa

SEQ ID NO: 56927 - DNA, 1046 bp, Homo sapiens
aaatagcaaaatggctttgggggatacactcaggaactctaatgagtagagttatgagtaccatataaattttgaagtccttttcctcctcttttagcttctgtagtttgtattagctgagatgactgcttttggatcaatattcaaatatattctgtaataaattattttactttgatgttgtgtatcgtaaatcctcaaagtcatgaaaatggtttacatgaccctgcatggtctggcctcatctcttactactttcccgtagtctcactcagctcctagcctctaagctgatcttcatatatccctactgtacttctgcctcaaagtctttatatccattttcacttctgcctaaagtattctttcctattcaagagggtgaaaaaaattatttttgagtgttctagacactatgagaggcatttttcttggatcatgtttttcattatacagctttatatagagagctaagaatcttaaaacagtatacttatatttttcccctattattctgtgtgctgttgttctcatacattttacatctatatatgctataaacccaacaatacaatgcatttctttgaacaattatgtttgaaagcaactgaaaatacaaaaattagctagatgtggtggtgggtgcctgtagtcccagctactcaggaggctgaggcgtgagaatagcttgaaccctggaggctgaggttgcagtgagccaagatcgtgccactgtgctccagctgggcaacagagcaaaactctgtctcaaaaaaaaaaaaaaaaaaaaaaaaagaaaagaaaacaacagaaaggaaaaaaaagaaaaataaagcaactaaaaaataaaaatgcattttatgtttatacttgacatgtttactgttgctttgtatagatttatatttttgtctggcatttttttccttctgcctaaagaacttcctttaatatttcttattatataatgcttctgatggtgaattgtatcaggtcttttttgtcttaaaacgtcttccttttttcttcatttttgaaaaatattt

SEQ ID NO: 56928 - DNA, 1003 bp, Homo sapiens
ttaatattgcatataaatcttcttttgtatcaagaatgaggttttattcagagagaggtgtagtgtagtaggtaaaagtattatcaatggggtcagactgcttgagataggatgccagtttgaggaagttgtatgactcctctgagtcttagtagtctcatctgtaagttggagccattaatactacctatgcagtaaggtggttgtgagggctaaatgagatgatgcacgtatagaacctagagtgatgctgttatccattattattcttgatgagttgatgtttaataacactttttcttcaaagagtaatctatgtaaagtttatgttttagagtaaagaagagattacaagtgttaagtgctaagtgtggcttatttatttcccttttgttggttggtttatggttttgttttgttttattttttaatatagttcaatatggatcgggttaatgttgaggaattctatgaagtttataaaggagtagtgaccgaatatcatgtaagtataaaagtaaatgtaaaacatttgtactgttaagtgaaaagtataggatgcagtgttttggactaagctcctgtactaggtcccaaatggccagactgaaaatcaatacagagtcattcatactaaagttctgtgtcaacgacctaggttgttatctgaccttctgagaaatcaggagagagcgagccaaatttcccaaacaggctaattttgtttggtataataatgaagttttctctgtctttcatccatacaacaaaaagtaacctgaggtaacctgatgttaaccagtcagttatttccacattacattcttcaaactgtatacctttcatatctcccaaaattcattgcaaccagcctgcagcttcctaaattcagttctcttcttttttcttccccctctgtagagtcagatgctaggttcagatcttaaatcttctagttatatgaccatcgacaatttatttaccttctttaaaccttgattaa

SEQ ID NO: 56929 - DNA, 1049 bp, Homo sapiens
agtttcgttttttgtactgtcttcatatgatttcaatatcaggataatactagttttataaagtgaattgggaattatcctatgtatacaattttgaattgcactaacattgtactttgaatttttttctatgcaattaaataatatttgaaaatgtgatttttaaagtctgagtaaaaagttagttgtaggaacttattcttctttatctaactttttcctgttttttattatttagaacttaaaatttttttattactaataattctatggtgagcatcttcctatatatcgtgtgaacttgtcctatttattcttagaatttgtaatagatatagattataaatttcttttcatattgattgaagcatagtgtttaatatttagattagattaaatttcatatttagattagggttaatatgtaatcatttttttattatcattaatgagacccttttatggatctgcaagaccaaagctgatttcatacttaattgccttttttaatgtgttgtcatttgcactgatggtgcaaaagcgatggtgaacaaaactgccactgccttagaacgaatcaaggcagtggcaccaaactgtgctagtagttactgtatttttaaccatcatgcatctgcagggggaaaaaaaagccatacttagttaagaatatcttagatgcagtaaaaataattttattactttttgatcctcaaatataggtctttttaatactctgtgtgaagtaatgtgaagtacacataaagctccatataatggttttaaggaaaagcatttgtgagtaatcctattcacaattgtttgcactgtcagctcaattagatgctttttcttttatggaataccatttttacttgaaagaatgactgacagacaaattgtgcttattcagacttgggtatttggcaggcgttgtctttcaaattaagtaagcctatcatatcaaagaaaacaactgacaatagcctttgccaaagataaaatccaagtgaagataaactacaaaggaaaactaaacttagaacctt

SEQ ID NO: 56930 - DNA, 2171 bp, Homo sapiens
caccactatataattcatccgtgtgaccaaaaccacttgtaccccaaaaactattgaaataaaaaaattttaaaaactgagattttcatataatgagaatagcccctgcataataacattcatgaaaatctcctagaaacatggatttggcttctaatgggacatttgcttactccaaccacatagagactggcctcttaagattaggaagcagctcactctatccatagctggcagtaccctgtgctgtagaaacttaattttactttgtgattgtgtggttaacttttctgtattaacctgactttgactttagacttcatatgacctatttacccaatcttacacagttttcagtttccagcctatctactcagtaccgtactttattttgtttttcttagactgtccttgttttaaaactgtgatcttatttcaaccaaggtatagctgttcttagcttcctttgcatgctgagcctgtctttcttcacagtgaggaggaacccctgactactctttcctggaaatcttcattcccataggtcttctctgctgtccctatgatggtatggagcctgtttttattattttctactcacttaattgcatcttgatgaatttcagtacacaaagtcaccatattgtaggtatatctacaaaggtgttgttatactggaccagatgcagtggcttatgcctgtaatcccagcactttgggaggctcaggtgggaagatcacttcaggccaggagtttgataccagtctgggcaacagtgagaccctgtctctacaaataatttttaataattagctgggcatggtggcacatgcctgtagtcctagctgcttgggaggctgaggtagttgaatcacttaagcccaggagttcaagtccagcttgagtaacatagcaaggccccacctctaaaaaaaaatacaaataaaataaagttctattggttactctttttactaccttgtaaggaatgtacagcttgttcttgttaggaaattggtaaggaaaaatgtgaatttcagatttgggtatgtggtgttagtggaggatcagaaatctattggatgaattaaatctgtcttttaaaagctactttctactaatgtgggttttatgatcacctgatggattaatttgagatccattaagacctaagtgccttactggttcccaatttaacaattctgtggaatccaaactcttatttattttgatttgtttttacttttttgagacacggtctcgctctgtcacccaggctggattgcagttgtgccatctcagctcactgcaaccttggcctcctgagccctagtgatcctcccaccttagcctcctgagtatctgggactacaggcacacaccatcatacctggctaattttttttttcatattttttgtagacatgaagttttaccatgttgcccaggatggtctggaatccagactcttgtctgcaattgatttaatataattctacaatatttttccttattgcaaggcagaaaaccatagacatttgtagcttaaaccaatctgagtgcttccattaaaaattacaggaagattatcagtgaagtggtattgcctagtaacatattgctctctaggagacagaaagcttttccacctggtttttatgcctaaggttatttgttatgcatgtttgccaagattagtattaaattccttctgttgactttagtaacacttgtgatttcttttatatgttagcattgaacattaaactctcataatctctagttttttgatttgtctttacactaatcatgttttaaagatacacgtctattttttagttaaaatggctttgaattttatttcactagatttaaattttaaaggaaatcatatccttccaatttgatttaaattggttatggttattaatattaaacatgtctattttaggcaccagttttattagttcgtgtactcttggctacatcacgattaaaacttttctttcagtttctttccaaaataaactgcaagatttccttgttgacattttttcatttttaaaaatcgtttcgttttatttcccaccacccctgtttattatatggattgtgaagcaaagcatacaggtgatagtgaattatcttgtacaacagcctggtcgcttct

SEQ ID NO: 56931 - DNA, 1063 bp, Homo sapiens
tgtattctataccttgatgttgtgttttggttgtaaaaaataattctattttcatggagaatgtttcaaagaaagtttagatattttgtggttgtctgcatttaatttactaggaagcaaattatttattagaatattgaccaatttgtaaatttagcatcagaattggctctggtataagaattaaaatgagactggtaggcgctaggtcttatttatcatgtcctcacttttagaaattgggttattcttactcagagcctctttcagagttttactatccactgtaatggtagctttggtgctgtgtaagccaagagccctggtagatgcatgcaacctcctaaatttgggccgattgaatcagttaagtgctcagctttttcatatttgatttccttcatgcagttcatccactaggatactgtgaaagaggcatgacattttttggtataaagagagctaaacatcgtatatttaactcagttttaacaaaaattccagaagtggtcccagttttgcttagaatgtcaccattttggagttttgtgaatgtgttctgttctatctgaaaaagtaaacagttggatggaattttatcaattgcaccaagtacactgaactacatgttaggaccctgactttgaatgcacagagcttagcatacatttttgaaacataaaattatagacagtgaaaatatcctaaggatctgtaagttttagggactttaaataaaactggtgatttattgatttagaaggaatctcaagagttctgttagtccctacaaaagaatcctaattttgaggaaggattgcatttaatggccctgaagaggtaagtatgtattaagcttaagaaaaatcatttacaaatagtgaaatttagatattattgctgtataacaaactatcctaaaatattttttaaatttaatttaactcttaaaaatattttaacttctattttaggttcaggggtacatgtgcagttttgttatgtaggcaaactcttgactcggggtttagttaacagattatttcgtcaccccattaccaag

SEQ ID NO: 56932 - DNA, 1050 bp, Homo sapiens
gatcacctgaggtcaggagtttgagaccagcctggccagcatggtgaaaccccatctctagtaaaagtacaaaaattagctgggcattgtggcacacgcctgtaattccagcgacttgggaggctaaaacaggagaactgcttgaacccaggaggtggaggttgtagcgagcgccaagatcgtgccactgcactctggcctgggtaactcaatctaaaaaaaaaaaaaaaaaaaaaaagaagaagatagacaatatataacataagtagaaaagtaaacattgcctcctacattaatttttatttacattgatattactcatacttaaaaaatattttaaaagagtggctttgacagaatatttggtgaaaaattattaattaaaatataaattagtataaattgagaggattttatcttaattttattaatgtaagctaaaataataagtgtttaattttataattcttaactattgcctttttgattattttataggaaagaagcattggattttcatgtagatcaccagtcaagaccctttttcaagtaggtccttaatttggggattagtggtatgtaaaggaggatatcctagaaaactatggagttacatttgtaaaatttattacttgagaataatctgtcaaaagggccatagcaacatcttgcaactgcacagaattctaagaattatattctctgtctttttattaagtaagaattcctatattttatcattaaaaatcttaaagtttaatcagttgcaaatagaaagatttgtttacattacaagaaggataacttttaaaatttttggttgattaaaaatggagtgataattatatttgatgttcaatatttttattatgcttttgtgtttgtggggcttttaatttttttaatttttattttttatgtcaacttttactttagattcagggggtacatgtgcaggtttgttacctgggtatattgtgtgatgctgaggtttggggtacaattgatcccattacccaggtactgagcgtaatacccaatagttagttt

SEQ ID NO: 56933 - DNA, 1052 bp, Homo sapiens
atattctaatatattctttttcagatctgcttattccattttgtagcttacagttttctattacctgataatgttttgtagcttgtcttttagtcctttaaccatagtttgcacagatactttacagtttttctctgattatcctagtatctgaagtatttgtgggtctctctcttttctgttgtttctcctggttttccctcatgttggccttttccctgtatgtgtgtatgtgtctgtgtgattatctttctatatgattgccatgtgtgtatgtgtgggtgtattgcatatatgtaaataatatatgtgagatatgcattttcatatgaattatttgaggtacaggatgacattactttcctactaggagggaattaattgtctttgcttctgtctttttcccataggcattagcagtctgtatgattggtagttcaaaaattctaagttttgagactgcttagatgatgtgaacttgtattgccattcaagacctggttgtttctgattcaccttaagcgggggtggtatagcctttgggtccaaattattttaggaaggatcatctcttgggttctgttaccctttcccaatgatgtactgcaaatcaaagttcagattttccagataggcaatgctgtcaagtcaaaaacaactttcattcttacttttcattctttggttgtttttttttttttttcacttttgtcccagtaattatttatgatctagtcaatttatctttaatttttaaaagattttttaaaaatatcaacttttttagtttttggtggaagaattgttctgaataattttgctattgttgccaagcaaaagtcttgatcactgaattttccaccaaattacaggtgcctcatttgagacagttttcctttatccatggggcagatatacactttatgcttgtaaacaaagtatgagaaaaaccaaaaatttagccttgatgtttagaataggtttacttttagaataggtttagaatagaatatttacttaagacaaatatgaatcccatatagattaaagtt

SEQ ID NO: 56934 - DNA, 1245 bp, Homo sapiens
cttgtctcaaaaaaaaaaaaaaaaaaaaaaaaaagactgaaatgggattattcatgttttggataagaaataaacaagtgattatagataaggattattatggtcataaatacgtcctcattattgaaagctgttattgctacaaaaagtcaaattgaagaggctcaagctaagagacttctgtttctttgtgttctttcactggcaacacaattttaacaagtagatctttttggtattgggattttgtgtacacaagaaagcagaaatttgggtgtatgactctttctttagcattttgtaaggactactttgctgaaatgatttggtaataaacaaatctttctattcaggtttttaagagtattaaatttgtaataagaagcttttatgttattaccagattggattaggaaatatggaagttattaaaaattatgatttatatttgtaacaaaaaagaaacagaatataacctatctttgataagacagaattaagaattatttctaccttatgatgagattaactttccttattcataactttttttgtttgtttgttatattgttgtgtctggttctagcatgatgtaaagaatcatcgcacctttttaaagcggaccaaatatgataacctgcacttggaagatttatttataggcaacaaagtgaatgtcttttctcgacaactggtattaattgactatggggatcaatatacagctcgccagctgggcagtaggaaagaaaagtaagaaaacaattatataatctttttacatgctctaactttgggttcaaagtcaatctgaatcaagactgggagtatgtaaccatatgaggatggataggacctggaaaatggttgtcttcattctttttctttttttcaatttaaaaaaaaattgataataccatagttgtgcatgtctcatctgacttaattcatgtttatgtctcctgtggcacttagcacatctccatccacattgcaagcaccttgtctgtattagctgaacgaattaatgaatcacaatttaaaatctatgatctattctttcctttttccactttctccctgttttcaaatgatgatctttgatctagttgaccaggaggtttttgcctagattgtttgtaactaatgctgcctattgtcaagttttgttaacagatatatatatatatatttatatctaatagatgttgaccaacggatcaattgaaaaatgacaatgtgagt

SEQ ID NO: 56935 - DNA, 1030 bp, Homo sapiens
gcttgtttttgtcaggtttgtcaaagatgagatggttgtagatgtgtggtattatttgtgaggtctctattctgctccattggtgtatgtgtctgttttgctacccataccatgctgttttgattactcatgctgttgatttctattataatgtcattcaaggtgaatgtgggttcatggagactcagactaaactttagaagcttgttgaactgtaacctttatcatctacataatttactccagaatgtctttgaagtcaaacagaagcagatacttggcttgaaatagattgactagttactgacccttcaacatgcaaatcatgaaaataagacttctagttagtttaagatatttctccatcatgcattatggaatccatttagtatgatttaaagaagggagcacttttgtatgaacaaaaatattttgctgcctattgtgaagtaatttttcctaaaatacagcattacaaaaatgcaatgtacatttttttcagtgcactgttagaattacaagtctgataagtatgtcctgatttttattgttgtggttgtgttggtttttaaaacctgatttgtcttaatagggggttaaattgaaagaatatagttgctatttctagaaatcgagcaaacactgcagcttatataggctgcttagtccagtgtctctcagaagggagtttccatcccttcttgccacagttaaggagagtgtctaagagcagatctggagtcaagctgcctgggttcacctctgtttataagctgtgtgatcttggcaaatttctttttttttaaaatattaaatgtttatgggtacatagtagatatatatatttatggggttcatgagatagtttgatacaggcatgcaatgtgaaataagcatatcatggtgaatgtgctctgtcccctcaagcatttatccttttgatacatttatccttttgatatccttttgttacaaacaatgcagttacactctttaagttattttaaaatgtacaattaagttattattg

SEQ ID NO: 56936 - DNA, 1485 bp, Homo sapiens
ggaaaatttgtaaggagcttgataaaatgaatccagggttttaaaaaaagaggttctgttacacacacaacacacacacactaaatagacatacattgtggattaaaccttttttaaaaatgtcatgagaaagatattcttgaaatgatttaatagcattttttaaattattgtttttaattgtttaagatactgttatgtaatttgttagatgttagaaagcaagcgaaaggaatttattagatgttagaaagcaatggaagagaattcactgaatgtcacgcatattccataagagtggctgtttgataatttcatcaataaatttaaaaactttaaacttatttggggctgactgggcaaaggataacccccccaccccagattgggtcctcttttatgcaaggaattagagagaaatgaaattgttgacctggcacaagctatcctttcattaaaatgtttcctaaagtcccgatgactggaggggatatattaaaaacaaaaggaggctgctcttcctatggagtaggcattcttttattcctttactttcttaataaacttgctctcacttttctttaaaaaaagaaacttattaacttattctttaaaaaagaatgggaaatctctttttcttaatagttaatatctatcacttattgaatgcctactgtatattcttttcacataaggaaacctcagttttttaaaatacccaagattatacgctagaaagcggtagggcccaaatttgaacctatttagcctagaacctcatgttctttctagcctactacttagggtcacgatgtttaaaattttttttttttttgagttaactctttcttttgcttttatgtagctatagaaatttaacttccttttcaaaaactcagtttctagtggatataggtgatatacatttttttcaggaattcataattcatattttgatacttgactagggctctgcaaaattactatggtttaatgaataactacagggctaaaattgagggtatttgtgaaatggctttgtgaaatggctttgtgaaatggctttttgggcaggatatgttaaatccacattgaacactaggtggcactcttccatcattggacactttcaggaaaagctatcctttatggattttattagttgcttattaattttaatcatattgaagtggcattcgaatgctattcatctagaaatcacagatgtacacagtatcacagattatttctcataaagtcaaagacacacgtttttctttcctaaattagaaaactttagcctaaatgatgaaacaaatggtcatctttgggattaagcttgaaaatgtgggtttttttttttttttgcttttttttggaatctgttactttaccaaaatatcctttgacttatttttaaaaacttaatcaggaaactacaaaataaaaataatgtttgaattacatgaggtaatataggcaaat

SEQ ID NO: 56937 - DNA, 1029 bp, Homo sapiens
ttaagatagagacctactgaatgtgggaacacagaagagaggctaatgactgaaagaacgctaattaaaaacaagattagttgactttactgctttttctctgcaatttttcattcactgagcttcaggttttctttaacatgtgaatatgtataaatccaaaattaaacttatgcatattaatgtcaacattgattccctaaagttactggaacgcatttggaaatgaagtaggaaactccgtcattgtggttcattcttcagggttcagcctagtgtcctgtacaattaagtgcttcacagatgctgccccctaccccactttcttttaaacatttttgttcattgacccagatgtccctttgggtgagttttgagaggacacaagatacacagagttggtgactattcagaattatttgaggtagttcttattcatataatttttaagcaattctttttggtttagccttctgagatatacattttcaaagtttacatctttttttttccagttttacatacacttcagctgcacttactattccatttgcctgaaatgctcctacacgttttttcagatgtatgttcaaatgacacctcatcagagaggacttccttgtccacctttctaaagtaacaactccagttgctctctgtccccctaccagcttcaccttcttttttcactttagcacctgacaaaagctttgcaaatctgccattttaacgatagtgcctgacacttagagaatgttttctatttttaaaggcatttaagattcttaactaattgatagtgtccttggaagtaggtattgtatttacagagaaaagatatcaatatcatcagggagcagaaaggcacaaacatccaaggaagaaagataatcctctgaaaagacagttgagaagaaaggaaggtaactttccactgaatttccctgctagttacttggtagagaccaggagtggacaaacagttttgatcaagggctgttcacctctagagaaaaatctagaattatg

SEQ ID NO: 56938 - DNA, 1048 bp, Homo sapiens
attttaattttaactttttattaccaaaaaagtataaattatgttatcttgagtaatattttttgtcgtttgttaaacatctaaacagaagctcctttttgatatgtgtgtgtgtgtatacaaattgtgtcggtatgtctcctaagaaagtaattactttaaaattcctcttgtcatatggatgacaaaaccaccacagtaacttcattccctttgcttggctaaaattcaggacatacttctgacaatttagagtgtattggtgaggatggtgaaacggagtatttagaagtaaaccacccctaatttttttttttgagacttttagtagacataacaatgccttctgtgagaatgggatataagggacatttctctttctaaatgcatgcgtactaaatacagaagcaattaaaatatcataacttttaaattggaggtactctatgtgtttatatgatatttttaaaattatttcatatgcatacatttctaggttgttcagcagaagtcttggagtgcattttcagtggttaaggtgaaaaaatgactactaaaaatttagaaaccaaaggtaagtggcttttttataattgtttttaaaacatgacatttatgacgatgtgaaggaacgtttgagccagataactagatctcatggacccccttgggaatcatttgttatttcagatccctttatgtttattttttagtgcagtgtttatatttcagtactttagatgtacaagtgaaatttaacatcattagttagaatttattaggtgactactcttaaacatttaatgttaatgcaaagtttttaacagctatattccctatacactagaagattacgatttaaataagaatacacattttaaagatttaagtagatagacaaagcaactagggtgtatcaaagatctctttcatgttgtattagtttgctggggttgctgtaacaaagtaccacaaactgcatggcttgaacaacaaaatgtattctctcagttctggaggctagaagtccaagatgaaaatgtcaaca

SEQ ID NO: 56939 - DNA, 1058 bp, Homo sapiens
accttctttgttctttccctacatttcaccaatcctggtaggcaatacgaatgagcaaaccttagatatgttttaattcattgataattgatcacaggtggaagtaatgatgatgaataatttaaggattgttttgttggttcccttcaaatagtggggaagaataaggattggtgtttttcttgacttaagcgttactcataattatggagctgttaccataggtccttgtcttcccaattgagagaaggtaattattcgtaaatgtgtcctggattgtgcctactgcatatgtaataaaggtttctaggtatgtcacaaggaaaaatcgaattacgaaagttaccaggtgagaaaatgttaagccctggctcttacggcctgtttacctatgcacattagctagaatcatagttattactgagcgggagctctcacgtaatatataatacaactttgatattcataaatgcttgagtaagtagaacagtttaaataaagttaagagtaaattggggtggaaacaagttggttgaacttcttgattttccaacaaggtattttgttcaaaaagagatttctgttaaatacctattaatggttctttgccttttaaatttaactttaatcattttgtaatttgttcttgaatctctgttacttaaaattccaactcaaaaatgttacagcttgcctagaaattttatttgaccataatggaagtatcacacctgttttttatttcctcagcctcagtgggcctgaaccatggctgtagtgcgtgtttttattgttgatggtttttattaatttatagttaatacatgattctgtgttacttcttaaatgccagaatgtcttattgacaagattagacaagttagttaagtttagacaaacttaaaatcagattttaagaatacaggtagctgggtgtgatggctcacatctgtaatccaagcactttgggaggctgaggccagagaattgcttgagcctaggatttcaagaccattctggacaacatgatgaaaccctgtctctacaaaaaaaaaaaa

SEQ ID NO: 56940 - DNA, 1041 bp, Homo sapiens
tggaaactgaggaaccacctaaatctgttgaagttacctccggagtccaatctagaaagcatcatagtcttcagagtccatggaagaaagcagttccatcagagagcccaggagttcttcagctagggaaaatgctcactgaaaaagcaatggaagttaaagctgtaagaatattagttcccaaagctgctataactcatgatatccccaacaaaaatacaaaggttaagtctctgggacatcataaaggagaattccttggtcagtcagagggagttatagaacctaataaggaactctcagaggtaaagaatgtattggaaaagctcaagaattctgaaagaaggttactacaggacaaagaaggtctttcaaaccagctccgtgtacagacagaggtaagaagagccttaatcgataaaatgagtactactctttacgtctggaccttttaaacgtgcatgttagaaaactacatttctttatgggaatgtcattcatcctagcttgtcagttctctaaaatgcttcctcttaaatttctcattctttctcagttctctagggatactttatattgggaacttatactctaaacctcattgaagatggaggtgtgaggtgctttggacaagaccaccaataagttgtaaaagtaggttacaattataaactgccagaccaaagattgaccaagtcaggcatagtaattgaccagcagtccttgttttaaggatccgtaaattccaagtagttttgcttgtgtatacgggatacttggaataaagagaatggcgatataacttactgtgtcttcattgtaaatgaaaaaaatctgtagcccttaagtgtgttgctttaatctttgcatcttagtaaaaattgccttgccccttcccttgtttctctattagaccatgcatcttttggctagatacaagtcttcataagtgagaccatggttagtgtttttatacaaatatatttttaaataactaatttctcattacaaaatgtagtacaaatttatgtgtaaaaattt

SEQ ID NO: 56941 - DNA, 1116 bp, Homo sapiens
actggttaaataaaattttgtgtatccaatcagtagaaaacatgaagctaatttttgaaaaaagggaatgagatagctgtatatgtgctaatatggataagtctctaagataaattattaaatgaaaaactaagatttagaaaagttcgtattcagtatctctttttgtaaataaagtggataaatttatttttaacacatgtatatgttgaaatatacataaatttttttttgagaagtgtaaaaaaactttgttgactgcatataaaaggataggtatgctgggcatgacaaaagactttatataaatctttttatattaatatttttctgggggcaaagaggtaattgagtgaagaagataatttagttttgtttgtctctttaagtttttctgtatttaaaaatatttaataattttttctttcaaattttggtcaatctagagtaagattgagatgtactccaaaagtcattatataggaaagttgaataactcttgcctttgtcattgtctaaatgaatattttaactgaatccctttaatgaactctaagctaataagcatttttaatgctctttagctaaaatttaaaaactgtgaagtaactatactgttaaatctttgttagcttctgaaagtgacagtcacaaagtagtatattcaattttttacactgtattattgtcagcaaatttatatgtaagattttaatctttttcagggtaatggcagatgagttaaccaactcaagagcagctttacagcgtcaaaaccgtgatgcacacggggctatacaagatctcctaagtgaacgggaacagtttcgtcaagaaatgatagctacccagaagtatggcacttgtttacattctgaactcttctgctttctcctgcaaattaagttattgtagttttggtttttttgtttgtttgtttttgttttgggtgtgtctacatttgataacttactgagcatatacttttagtagcattttaaaatagatgctctgggagggaagaggactgaaaaaatagaaggcatgcttttcacattcttaattggggaaataattagttatatctgtagtagaaggattctctggatttaaaag

SEQ ID NO: 56942 - DNA, 1239 bp, Homo sapiens
ctcaagaacaaatagataacctgaatagccctaacctattaaagcaaatataatttatagttaaaaattaaatattttccagtaaaggaaattccaggtctagatggattcactgatgaatgctagtaaacatctaaggaagacataaaaccaaacttataaaaattattctagaaaacagaagagaaggaaacaatttccagctcatttcatgagaccagcattgtcttgatatcagaaccattagccaaaacccaccaactaatatctctaatgaacataaatgcaaaaatccttaacagaatttcagtgaatcaagtccaacaatacagaaaaagttttatacattttgaccaagtaaagtgaatcccaggaattgtagattggtttagcattcaagaatcaattaatgtaactcaccaaaaaagaaaaaccgtatgaatatccccatagttgcacaaattatgtaagtagttcctatactaaaagatgagaacaaagaaaagtactgtttgttaaatgattttcatacaacaacctagtagattaacatatgctttctgtagtctaacttacttgactaagacatccgaatttatggaactctgagagagaaagggatcagagaaagatgttatataatttcagaaatatttgtattacctatttactattattaatttttacattttgctctcttactatgtccggtgttcatgtgtgttctatgcagattattggaggagctcttagtttccttgcaatggggaagagagcaaacttactcccctagtgtacaaccccacagcacagcagagctagcattaacaaatcacaagttggcaaaagcagtaaattctcatcttctgggaaatgttggcattaacaatcaaaaaaagattccatcaacagttgaattctgcagcaccccagctgagaaaatggctgaaacggtaaaatattttcttttgtgatctatggaacttctaacactgtccttttactgaaaggtgacatatcatggaaagcatttggcattaggaattaggaaatgtgggatctaaaccactcatgctattgagtgtgttatcttggagaaaattatttcctcttctgcgctttaatattttctaacactactgttctatttttaaggacaaaaaaagtaattgttttgaaagaggtcctatgttttagctattaagtcactgataatccttttcatgagttcattttgat

SEQ ID NO: 56943 - DNA, 1062 bp, Homo sapiens
tcttctttctctcctttattcctccaaataagagctctttgaacttttgaaaattccctgaagatactatccatcatgaactttgagggaccacgaaataagccactcctactagctttttcttatgttaaaattatcatggctgctatctttataagaaaattcttatgactgaaaatccttatggccaccctttacaataggaactacagttttgaaaaatgggcttagccattttaagtaactgctgaaagatattcttaaaacttaagcgtgatgtatttggtttggatactaggaatgcaggtaatgaggctggcattattatgaaaaattgaagagtaggaaatatattcttgtaggatcccataagcagggcttcaaaatgtagttcttgtttatctaaactaagtaaagcttgtttttctaatcagcaggaaaacagagatccacaacaagcttttcgattatggcttaaaaaaaagcacgaagagcagatgaaagaaagacagacagaagaactaagaaagcaagaggaatgtttattcttccttaaaggaacagaaggccgggaaagggcctttaaacagtaagttaaaggcagggcatttcccccctcctccttcctcatgttcattttaaaagttatatcatcaattaagattggaaaaaaaaaaccctcaaaatgttttctcttacagcacgtacctattcaattttaaattcatgcttttaaaaatgtataattctttaactctattatatatattatatatatggagttatatatatatatgcataccaatttttcttcaagatacttttcaatacttaaattatttcttatggcaccagtgtgatagcctttgataccttatcatttattgtttacttatttctgtgagaaatgggttgaagattggttacagcttctcctacatagccctcagaaaaactgaatttacaaataaatgcaaccaataaaagttgcatttaccagtaaaagaaaggcaggtggactaaggaggaaaatctgtatagaccaaaggagatttgggtaca

SEQ ID NO: 56944 - DNA, 1006 bp, Homo sapiens
atcgaaagtaaaaaatacagttaattcctactttctgtgaacttgggtaaaatcatggggttatgctattaaaataaatgaaaaataaagcaaatcctctaaacacatgaccttttagctaatatttaaaactttaagactgaattagctcttcttggcaatgaatatagagaacaaagtaaagggtcaaagtctgagtcacaggaatactcctaggaaaagtggatgcattaagcatggtcatatactatttatcagagatgaagaaaggaactccaggaaaattaaccagttcctgcatcaaggtaggttatttctctctctctttacatgtgtataatgtgtatatgtatttctgtaaaacatatatatgtatatatgcatatgtatgtgtgtatatatatgtatatacataagttagtgtcaataagtagaaaaaggaataacactaggatataaataggtgactttggagggataatgatcagagttatagcagaagccagttttaaaggtgttaaggaaaagactatgaggaaatgcaggttttatattacagatttcttagttccattttgctttcttatataatggaaaagacaaatggaatacacaatgtttgaagatggaaacagagtcaaaagtgaagatttttctaagatggcttttaaatgggagttttatgcatcctaacagaaaaataagcagaatgagtagaggcagatacccagagtggtaaggttgaaccaatttctcaagactggaagggtgtgagatccaaagcacagtgcgatagaattagagaggtaatagggatgatttattgttttattttctaattcaacaagtattaatgatcacctatcatatcagaggctgttctaggtgctagggatatatatagcaggaataaaataaaagtgctgttatgaatcttacacattccagcggatgattataacaacctcttcttttgaggcttttgggaaaaggggatgactgagct

SEQ ID NO: 56945 - DNA, 2310 bp, Homo sapiens
aagcgtagacatatatttatgaatgtgcatttcttgacttcacagcagccacttgactaataccttgtgttccgggaataacatgatactattcagaggagccagaagtaaagtttatttcatggattatttatgagagctaatttaaggatgactttttttctgattcaaaagtgaacttgattttaaaaaccagtcaagagcaatcaaagcagcacatggtgttgtatacttcattagcaagtgagtttggtgttttataggtcacatatgtctgtatctacttagccagatgcttggcctggtgggaccagggctccacagaggccacaaaatgttgcaagtcatgatggatggaaatatgttctaacagcatctgcctctattcaatttaattcttatttctgtgttactcatgtacattggtctttctacatagttattctatcactggcaatatttgttctggtttagtgttctgtattttaaggtgtacgtatcatttctaattttaagttattttaaaaaaattcatcatatgaatgttcttggttcccattgtgacgattatttatttctgtaaaatttgtttagaagtacgtttttgcattattcatatgcttcccagagaagctcatttagttagaaaataaggcaagttttgaagcctgctaaatgaagagacttaagaaagcttaaggtacgcttgcttgtctttaaatcttcaatatgaaggactattaattccaagattaaaagttcatatataggctaaagatgtaactaggccatttgtatttgtattcccttttatttccaaaataaaatgaaaaatctttttttaataatttcatccctatttatagtttttatattaatttgtttttcttatccaagtaaagatgtcaataggaattgcattagtccaaggcctttttcataaactgagcctcttttcaattatttcaatgggacaggaactaggatagatgtgattcctgcatttttttaccttaaatctgcctttgtttctaaaggtagatcatcttgaatatttgcttaaaattgctagtgatttcattaccaagttacttgaaaaaatgttctatatgcatttaattctgaaatcagtctaccaaggggctgctagtatatgtcagacatgaaaactattttaaagctgactttgttgccttatcttgaaaagaatctagataggtgcttttaactggggtattaacttttttagaatgacacagctgaacagtgttaataatagtgtgtcaagattgcaaagtcgacatactcatttggtttaagcaggaatcctagaagcaaatggatggggataagaataggtcattttctattcaccatcctttactattaagggaaaggaaaagaacactagctaaggaagggaaagggaagtgatatcataaaagtagcaaccttcattttacattctgtctgtttttctttttttgctttgttttgtttgtgctaatttgggaattgtgtactccgaaacaagtagaaaagtgctgtttgagggattttattaaatctttttttaatggaatgtggtacaaattgttcatgttaccaaagcaatatttccctggaatttaattcaaagtttgtggcatacaacctgagccttttcttatataagacaagaatatgttcacatcttggtatgtggccatatttatagaatgctgaactcaatgtgcaagttgtactgtatgcagttttgtaaataagtgaaaataatttgttgtactttttattcaattctgtatagattataaaattatttttattaaataaatattttacagtatattttctctttttaatcaaaattgttttaaatttatcttctatttcagtaggagctttagattatatctttaaatattttaataatttatcctaggacaaatttcatattaagtcttcccctggtctaacttgcctagttaaccttttgttatctttttaattattccattgctttgtgatttttacctttgactcttcccccttatttcagatgttttcccccttttttttggcaccccgttgcactgtttttttttttttttttggttttcatgttggcactgctcttatctctttttaaagcattcttccttaaaaaaaaaaaaagacactctctttgatgttaactgaatttttacaataaaggaaattaaagcaagagcagaaaataccaccttgttctgaaacttcatagcctctttgttccacctcaaattattctgatacccagggaggaatctt

SEQ ID NO: 56946 - DNA, 1039 bp, Homo sapiens
gttgtcttcagaatcatctacatgttactcatcacgatagcaacgtatgtattttggctcatagaagccttaggaaaaattgtaacaggataaattttttggtttctttacaaaccaaaatattcaagtttctagttaaatgaggcaaatgggaggaagcattgtattatatgtgcattatcagtttttctcctgaggaagcatttaggcaagttttgtttattcccatgtttgtatgttcctactgttttcagatgtttgcatgagatttatatcatttagttgcagaatgttttcatttggttggaaaggcaattgacagtagaaagaaggactcttcatgtttaaagataaatgtttacttttatttagaataaatattataagtactccagaagtaattcttatttattcactcttttatttttttttaagttttcaaattgctgcaaacctcagcatggaacgctatgccctagtatttggtgtaaataccttcattgccctggcactgcagacgctgctcactctaattgtggtagatgccagtggccttggattagaaattaccactcaggtaagatctctcctttggcatcgaaggtagtatgtgtgacttgatcagggtgacagaagtatatgtatgcttaatgaaaacaaatccaaacaatagggaacagatgtaaagtaaaagcataccctccttccttcattcaacatcttctcccctatccttagttcttttctcctgggagggtgttgggattgtcaggtcttagaacattcccgagtgtaactcatcagcccaatggggctgtttcagctgagaggtaatattgattccttacagaccaagaccttctgcttcctcatccattatttccctctatacttaaatctatgcttggaatactgtatcccatgtttgagattccctgcttcatctcacaactctttaagtctcctcccttctttatttaaaacacccctcacccaaataccacggtaatgccttgctgctgatgaacaacattatgat

SEQ ID NO: 56947 - DNA, 1777 bp, Homo sapiens
ccaccacctagagagaactgctaatattttggtctacttctttccaatatttctatcttaactgttggatcagtctgtcaattataacgataggaggccttaactgaatagtgatttattagggttgctagtctgttgcttattattattcttgttatgttgtttgccagtttatgggagatgtagattacagactcccattggctgaagcctgcggtctcttttcatcatcttcattttgtaaacagtacatcttttgctgggttgattacatacagctgtgttaatgctatagtgcatttaaagcaaaaatcctatgagaacatatttttcgccagaggggataaatgtatttgttaataagtttatgaagtaagcagttagttttcacaaggaaaaaagtctgttaggtaagtaattgggcctgtaaattgctttctatataattgccttcatcagagtttgagcattgttcccttttgctatgtaggaacccaagccagaccgtctccttgtattgaaagtactatggaatgatttcctgatgtgctactcctctcgccctcttctctgctggtctgtgtggtgggccctctctacctgtggctattttcaagttgtgaactacacacagggcctgtgggagaaagtgatgccttctcgctatgctgctatctataatggtggcgtggaggccgtttcaaccttactgggtaagcaatgcaggataatagagggtcgtggtgggggagggattcctctggtagttaagccagccataatcagatttattcacccctcccaaatttgaaatagcctcaaaaaatgattattttgagctagattttacaatttaggaggacaacttagaagtactcaagtggagcaggactatgactaacaaactggaatttttttataagctttgagtaaacctaatataataattttcaagattgtttatccaagtttccattatctctgtatttactgggtagttttgtcacttgatgtgaaattttgaatggcaatatataatagtttataacaatagtatctaatatttgttgaatgttaatatgtgctaggtactgttctatggacattatatacattaactcaatcctcacaaaattcctgagataggtagaatttatccccattttgcaatggaaacttgggactggtaggttaataacttgctcaaggtcatatggatggtaagtagtaaagtcaagacttgaactcaggcaggatggcttcagagcctgtgtatttgaccatcttactctattgttcatttctaatttgttgacctacctcctgaggttgttggatggtgttatatgatttctgtaaacacttattatctgtcttggccctcagaaaacacttcatagattttagctatccttatcatcatcactgttttaccaaaaggcagagaagcccttttgccatgttctagactgctccttggtttgaaggagagatgactcatcctgccatgatgccaaattagaagctatggttctttttgactcttgcctctgcttcagctgcagcattttttttccttagcaatgtccctgtgtctttgtcctgcattttcatctcattgccacctctcctaattcagtctgtcatctcagtggctccattttattgattccatcaagttcagaaatttctgtgtgagtttcaaggccctccataatcttgagctattctgtttataagtttgcagattttaaaatttaataatctaagctgagtt

SEQ ID NO: 56948 - DNA, 1290 bp, Homo sapiens
tgggggagggaaggaggtgtgtaatcatttcatagattttatgaagtggaaaaaaaataaagacacttctttatctgttttgaatgtgttacagtggctttagctaaaattaacgtatatacagataatatgtgtataaatatatattttagatattaacatattgaccatagttctaaagatttttatagacagtttcaaacttttttgaatataagtaagaaacatagaaaacattttacatagaaaacctgtacatacataggtatgtatatattttatatataacagaaacaagttttacaacagtgttttattctgatacattcttttattttttttaaattcagttcactgtcctctaaatcaattttattgccaacttatgggtgatgacctatagttttaaaaactgttctagatcaacttgaaatacttgtttatagatacacagtgtgtcagtattttatatactgaagaattgtagaattttagagttagaaatgactctaatcacaagtcatagaaaaagcagagcattttaaaaagagattagatttcatcaagactgtccttttagagataaggattaggatcagagattagcaacttatgcagaattgtacaaatatactcttgaacataatttaaaagtgtgtatgagatccagttctttctaaacctttctcggtgaagtcttttaactggggtaacaatgtcagaaccatcatgtcagttacactgttttcagaattaggattcaagtcagttccctgatatcctaggctctgctactgataccatagcagatgggcagtgctgcttggtattggcactgactggccctaaaatgctgctgtttttctttggcaagcatgaagaaaattcagaatatggatattagggatcacagagctattttaagttgacaagacctataattaaaccataaattataattgtggtaattattgaagagtaggtaggtaggtggttttatcttgatttttatagaaagagaaaatgaagtaagaggagtctaagtgatagctcattctacaagttaccttagagtatttgtgagttatttttaaagagagtctattgcattggggcaaagggtgctgatcttgcagaaagaagaaccaaagctggtgactttcttttacaagcagagctggattcattatgtagttggctgattggtgaaactgatttattttgagttcttcatctattagaaatgacataaattaaaccacttctttagcacaggttctgacatgtaat

SEQ ID NO: 56949 - DNA, 1092 bp, Homo sapiens
ttattaggaaaaagatgatggtattggggataggaaaggatatttcaggctgggcgaggtggctcacccttgtaatcctagcgctttgggaggctcctcatttgaggtcaggagtttgagaccagcctggccaacatggtgaaaccccacctctactaaaaatacaaaaattagccaggcgtgatggtgggtccctgtaatctcagctattcgggaggctgaggcaggagaatcacttgaacctgggaggcagaggttgcagtgagccaagatcgtaccactgcactccagcctgggcgcagaacaagactccatctcaaacaaaaaagagagaaaagacattttcaaagttatctgaactgctgttgtcaaggttgagatctttgaggtatttgtaggttgttttttatgaataaattctttatgagtattccaggtcctttcatcactaatgttttttgttttttttttttctctttctaccaggtcttcaatgaaatttatccagtatggacttactcttacctggtgctactgtttcctgtgttccttgccacagactacctccgttataaacctgttgttctactgcaggggctcagccttattgttacatggtttatgctgctctatgcccagggactgctggccattcaatttctagaatttttttatggcatcgccacagccactgaaattgcctattactcttatatctacagtgtggtggacctgggcatgtaccagaaagtcacaagttactgtcgaagtgccactttggtgggctttacagtgggctctgtcctagggcaaatccttgtctcagtggcaggctggtcgctgttcagcctgaatgtcatctctcttacctgtgtttcagtggcttttgctgtggcctggtttttacctatgccacagaagagcctcttctttcaccacattccttctacctgccagagagtgaatggcatcaaggtacaaaatggtggcattgttactgacaccccagcttctaaccaccttcctggctgggaggacattgagtcaaaaatccctctaaatatggaggagcctcccgtggaggaaccggta

SEQ ID NO: 56950 - DNA, 1022 bp, Homo sapiens
atctgttttcccttgactttgtagctcaagaaaacacaagcactgatccaaagagttgtgaaaggcaccttggtcataataaaatcaattcccgttgctcacatagcagatgttacgtgaagtgagaagttggagtatggacaattaataagggtctgtaattggtacatttttgcctgtaggatgtttcccttcaagattcaaaatatcaaggaagcattttttgctgtcattggaaacactgaaaaagaaaaggatctgccttggagacccattagttaagtgctggagactgtagtctttatctcttcatgaatgccctgtaaaagcacctcagtgcagattggaaaagctactgcaagcattagaattaacctggaagatagtagatgattaatagcagttttctgattgaagaaaccaggcattttagtgtggcggattcagaatttatgaattcagatccttcttctgccaatcctgtgataacttgggacaattcacttaacctttctttaaggccaagtttccttgtttgtaaaatagagatgatagaagcatttaccttaggtttgtggtttggattaaatagagagaatttagagaaagtgcttagcgtggtgtgtaacacagcagtagaggtttgttattatgatgctgataatagtgtgagtggggcattccccctgggttgatgtcttttaaaggagaaaatgcaggtttcttatttagaataagttaaagagaaactatctggtcttccccctctcccctatttgcctttctttttgtttttagttgttattgcaaggttggcagtgttactctcctccatcttcattatctaaattgtagttttgtaatagtagaattagactcatgagtaaagatacgttaaattgataatttaaaggatgaaacttagacaatgaaaacttagcagttaatcattttgggacaactatggttaaaagttatgtaacatgtctaagcacagacaatattattggagtgaagaggtc

SEQ ID NO: 56951 - DNA, 2198 bp, Homo sapiens
tttgtttgttgcaatgctccgtcattttcaagggcacttgagagagaattaagaatcagtattgacttacgtattgagggtttcacttgagagtctgacatttgttcacttctagcaagtatcactgactttttgcctggccttaaattaccctattgacctgccagttgtgggatggagtggctgggccgtttctcagtcttgtggatcattacataagcgaccgtaacagttattcataacctatttgagttttaatactgatttaaagcaataatgtcaaaacagccaaatttcatgacagaatgattttacaagaaaattactgcactgatatgagaaagtatgattctggagacccaaaacaaccactgaatctgaggtgtagccactgaggcagaattgatactgctgtgaacagctgaccattaaagtttcatgtgaactgccatgtgatctgcacagtttgtgcgcctttccggatagtgaaacacagggagagaaacatgttcccagtgttgatatttgaaagctgatctgttttgtcatgtgctctgggtagaaggttgctgtgtgacgtgctaccaagatcatgtgctctgtcctatcagaaagcttttcaaggtgagtgaagtgtgttcagggggcacagaaataaagcagagttgccaggcgtagtaactatttgctgattgtgtaacaaaaaacataagtgtacttctcttattgcaaattagttgaggaaaagcgtgggatttgaagagaaatctagtagtctggggaaggggtgtcttctcagaggaccaccaaatcatggctgattctcctctgcttaccttgtggcaaaccctacgtttttttgtataactaataattgaaataaatagaacaacttattcattacttactgaatgcttgttttttgccatggacagttaaataaaaaaaattacatgatttttaagcaaagctaatgctaagtcatattcagcgacatttgtattaaagtttgtatttgctcttagaagactgcagaagggccaagttggtttgaatagagctattgttaactaaatcctaaaacaaaaggagaggagaaaaagatttcttctgtctactctcaaaagtttttttcttagatttcaggaaaagcattaattttaaaacagataccagtgtgtaagttttaagcaggctaaaatttgactgtatgttaatagttgaaggccagactttcagtaaaacagatctttatctctaaaaacttttttatcctttcatcattgtagcatgtgttttgacagacatttactacctttcttagatttttttaaacattccacctattttgcctgatattcagagcctcacgaagtttggtttttacctccttgacagccttatatcctactacaaaccttcttccccttaccacttccacataaccaagctccattcatattaatctaatagtcttaagtccagcatatccacagtctcatctgttgacatgtactcaaagacttattctcttcttggaataatcttcccatatatatctgttgatatctttgttagcctttaggtttctcatccttcaaggtccattttgaagaaacaaccctgtatttcctatttccattataaatactgcatatattatatattcctcactaggttcaatactcctggagagctgaggatctcagtttatttatttagagacagtcttgctctgttgcccaggctggagtgcagtggtgcgatctcggctcactgcaacgtctacctcccaggtttaagcgattctcatgcctcagtttcctgagtagccaggattataggcttgtgccactactctcagctaattttttatatttttagtagagtcggggttttgccatgttggccaggctggttttgaacccctggcctcaagtgatctgtccaacttggcctcccaaagtgctaggattacaggcatgagctacagtgcctagccttattttattcttttttttttaaattttttaattttaattttaatttttattttttgagatggagtttcgctcttgttgcccaggctggagtgcaatggcgtgatctcggctcactgcaatctctgcctcccagattcaagtgattctcctggctcagcctcccaagtagctgggactacaggcacacgccaccat

SEQ ID NO: 56952 - DNA, 1351 bp, Homo sapiens
gcggcggccactgtgctcctgcggaccgctcgggtccgtcgcgaatgctggttcttgccgaccgcgctgctctgcgcctacggcttcttcgccagcctcaggccgtccgagcccttcctgaccccgtacctgctggggccggacaagaacctgaccgagagggaggtacgcgcggcggacgcggggcgcgggaagggcgggcgaccggcctgcgggtgggcagcggaggaagagaggaccgagaaaagcgctcgagccattctcggcagagatttctgattttgccagttggaggtcggcttcgtgctcttctttgtgttcatgattttctgttttcttcggctctgtaggacgagtctcctgcgaagggctcagaacacgcgtccagaggccccgtgccttgtgcgtcaggcagtatgctgatcgtgttgtaatgtggcttagcgtgactgcccagactggtccagcagttcctgctgggggcgagggggcaatattttgacaaagaagtgaaaacagcaaagtgtactttggacacggcttagtaaatattcattgactgaaagtaggcaaccactgcttttctgaaaggatcttccctctacctccttcacctgcttcctgtccataccttactttgtttgcatttggcagaatgggtgggcttaatcaagtaaggacaggacagaagtacagaacatcttaatttgtcttgatttttaattgggtgaggttgtgtccaaggatatcctgcccctctctaccttaagaccaacctccagggataaaggcagatggtgaaacataattgacttttaattatagtgtttcttgtattgcgaattgttgcttcacagatgttagttttgcttctcagatacaaggtgatgtctttgaaggccttctgtgatgttcagggtaattgagagcacgtagtccatcatcaagagtttcttgctgattgattttttccctagatgagggcttacaaataaagtacttcagaagcgcatagtgtactttagaaatgtgctgacctatttaagtgcatggtcaaaaccagcacttgatttttgcagaagaaagacaatatataaactgagaaagaaattaaacccaaagtacttccacaaaaccgaaataaagccgattcaacaccctcttccttgaatacaacaaagggtgaaagctgaggtctcatgttctttttcctactatcagtcaaggggccacttgagagctttttcttttttcctacacctgttccttccaccctgcctccttgccccaggtgctgtaaaatactcctcccatttaaaccttactcttctctatgtgggtagtagtcagt

SEQ ID NO: 56953 - DNA, 1064 bp, Homo sapiens
gaggattacttgagaggagtttaaggctgcagtgagccatgactgtgccactggactcaagcctgggcaacagaataagaccctgtctaaaaaaaaacaaaaacaaaaaaccttagccatttatgttgtcattaaagattttctcttatttggctttcagatttttgaaggaaatactaataccaaaggacatgtgaagaactttttcaaccccccaatcatttccaggtttatccgtgtcattcctaaaacatggaatcaaagtattgcacttcgcctggaactctttggctgtgatatttactagaattgaacattcaaaaacccctggaagagactctttaagacctcaaaccatttagaatgggcaatgtattttacgctgtgttaaatgttaacagttttccactatttctctttcttttctattagtgaataaaattttatacaagaagcttttataatgtaactccttgctaccagtaagtaagataatggctattacttctgcattaatttgaatacaggtaggaaaatatcaagaaccaacaagaaaagggcttatctttcttaatgattgaaaatgctatgaagtaatatttatgtagttaaaatgcttcattataactcttttaaatcctttacacactagtaaaacagatattactttaaataataattgatagacctggataactttcacaaacacatgattttttaatggtttttcttgagtgaagagaaaaacaatattatcaaatgaaataagtacttaaaatatcctgtctttcccatataacaatgatttttctgactttccatgagtaaaaaaacagccaagcatctttccagtagccccattgaaattgtgaatccgtcctggtctccctaaggactgcacacattgatattcaaggttggtggtcattagatatggaacagaactgaaataaccatggtagaactgaatgtgtaatgttggctttattctagctggtactacatggcacacagtttcaaaacataatttcacctactggaaagctcagacctgtaaaacagag

SEQ ID NO: 56954 - DNA, 1017 bp, Homo sapiens
ttcccacaaataaccaaaatctgtaagaatactgagctgcgaatgtttcagaaaaaaaaaaaaatcatacacctagttcggcatgtaattaatatagatcagaacactttaaaaatatttataggccaggcacggtggctcatgcctataatcccagcactttgggaggccaaggcgggtggatcacctgaagtcaggagtttgagaccatcctgaccaacatggtgaaaccctgtctctactaaaaatacaaaaactagccaggcatgttggcgtatgctggtaatcctggctactcgggaggctgaggcaggagaattgcttgaacccaggaggtggaggttgcagtgagctgacattgtgccactgtactccagcctgggcaacaagagcaaaactctgtctcaaaaaataataataaataaaaataaaatatttatatactctgacccatcaatttgtccagcataattaggcatgtgtacaagggtttacacacaagaatgcctattgcaatattgcttttaatgctaaaaaaaattggggaaaatgctttaaaaatatagattaagactgtacattgtggtacagtcatataatcaatagtatacagctattatttattttcagccactgtccaaaatatagcctggcctaacaacattctgttaggatacgcaagcaccgtgaggagatcagctataaagtatcagtgtttcacaccactgctcctttgctaataaccttcaatggcttttaaagaagtaaaaaacaaaggcaaaattccttagtcagcccttaagactctctgttacttagctcaaactacccttttcaacaacactgccctaaccaggatgagttttttgcccccctggagtacattcagcctttccttatcaaaccttcctttaaataagtatcttctccaggaccacttcactttcttccccaatttagcattttctatatctccaggcctacctctataaagcctgtcctaaccactcaaaccct

SEQ ID NO: 56955 - DNA, 1012 bp, Homo sapiens
acagccctccttgagagctgccaaagagcatgctatgcctaaagatttaaagaagatgttagaaaataaagtcatagaaacattaccaggtttccagcatgttaagttatcagtagtgaaaaccatcttgttgaaagagaacttccctggagaaaacatagtttcaaaaagcttttcttctcactctgatctgattacaggtgtttatgagggaggcttaaaaatctgggaatgtacctttgacctcctggcttatttcacaaaggccaaagtgaaatttgctgggaaaaaagtcttggatcttggttgtggatcaggtttactaggtataactgcattcaagggagggtccaaagaaattcactttcaagattataacagtatggtgattgatgaagtaaccttacctaatgtagtagctaactccactttggaagatgaagaaaatgatgtaaatgagccagatgtgaaaagatgcaggaaaccaaaagtaacacaactatataaatgccgatttttttctggtgagtggtctgagttttgtaagcttgtactaagtagtgaaaaactttttgtaaaatatgatctcattctcacctcagaaaccatttacaacccagattattatagtaatttgcaccagactttccttagactgttaagtaaaaatggacgtgtacttttggccagcaaagcacattattttggtgtaggtggaggtgttcatctctttcagaagtttgtagaagaaagagatgtttttaagaccagaatactcaaaataattgatgaaggattgaagaggttcataattgaaataacttttaagtttcctggttaattaacattcactgagtatccaaaatgaaataaacagaaggaccaaaaatttgagtgtttgatttctgttttgctattattttttctgaaattttgatgttgtttgtttagttttgtttatccaaattgtaagtgagctatgttaccagtcttttactcactaggtgaaact

SEQ ID NO: 56956 - DNA, 1042 bp, Homo sapiens
aatcttgaaagtgaatttctttggaccctcccttgaatgcagttatacctagtaaacctgatccacaaccaagatccaagacttttttcccagcaaatttcactttggcctttgtgaaataagccaggaggtcaaaggtacattcccagatttttaagcctccctcataaacacctgtaatcagatcagagtgagaagaaaagctttttgaaactatgttttctccagggaagttctctttcaacaagatggttttcactactgataacttaacatgctggaaacctggtaatgtttctatgactttattttctaacatcttctttaaatctttaggcatagcatgctctttggcagctctcaaggagggctgttttccatgtggctccaagttccttgaactgctggctgcactgagtggactgtctgtgtcttgagagggagctgcattttccattgacttatgttcccacaagtgatcctgaggcaagtcaaattgttctgcagaacattttctgtccctctcttctcctttttgactttctgagactgacagctcttttgaggaatccagggtcaaagctccatctctaatgggtgttaattcattttccagatggtcttctatagtgaaattaaactgaaaggtcatcctcttattaaatgcacacaatctttaaattcagattcttcaacttctggatagaatttgatgatacacacaaatctgcctcaattattcaattagttttgttgggcccaatttctctttagcagcttatacatggtaacaaatatttagagatatttccaaatgactttttagacgtctttggtcctctttccaagcagctctggaaagaaaaaaaaaaaaaaaagaaagaaaatgatgattaaagcaaaatggcacatttcactaaagtgtaatattaaacagccacccccacccctccctgtcccaccatacagctgctttttcttaaaaagttgtggggaagagagagagataagagatttggacactcatacacaccttaagggt

SEQ ID NO: 56957 - DNA, 1002 bp, Homo sapiens
caatttgggggagaggcgggtcacccagtcccgcggctaggaacgcgcctctttcctctcccatcacgctgcaaggcttggagtcacttccggctgcaggtcccggaacaaatccgaccccagaagtggggacttctggccctcacctccccatttgaatgtaatgtttacagtgatccagacctggggatgcttgcttcccgacgtgtcctgggatcgcgcttctgaaaaagctcacctcacaacgcctcctccggacctaaatcgcgcaccagtgagtcgagtcctccaggggctagagaagcccgactttctttccggccttgagggacccgggctcaccaagaaaccagccgccctcctctctatggttttggagccggcggagagcgcgcaagggttggcgggactgcgagtttccggtctgggctttggcgggtctggtttgaagctctcctgtttgacgaaagtatgtctcaggaaggtgcggtcccagctagcgcggttcccctggaagaattaagtagctggccagaggagctatgccgccgggaactgccgtccgtcctgccccgactcctcatatccttccttggttgtcacttctacctagagaagggtgtgggcgggtcgcgaacctttctcttctgtcccttcagacccaccgccaggctgggttatattaccgcggcctgaaccccctcttttctttgtcagtgagtgggatgaaaagtgagggactggaggggaagcgacaaccgtggtagatttaagtaaggctttggccctggaaagcctcgcggacgtgttctgacccaaggttttagcagtggatgtggcgttttcttccattccttctttcagtttttctgtactcgttgcttgcaattaagtgtaaatacttttgctagtggataatgggggaggcaaggactgagacctgcggtatgacgatagctctggctcttaatagtttgaggtaaagcgagatactctgagctt

SEQ ID NO: 56958 - DNA, 1029 bp, Homo sapiens
aaatatgaaacatatagaaaaacagaaaagattacaaaacatctaatctgaaatggttaagattttgatgagaacagtctcatctcatttccgtatattcctgccagcctatccatcattcttcgtacatgtttatctacattaaaattggtgttatattttggaaactttttgtttaactacattgtgaacatttttcatgttttaaaatgtcattttaatgatggcagatcctattcaatagatgtacacacacctatttaactggtccacaattgttggatatgtaggtcgtttcctttctctctttttttttttttttggctactacttaatagtttctctgtatagaatgtggtattttgaaagtgtatcaagctttagattggtagtattcttgcatttaataaagggcagtggcctttgttgactgacatgacaatatttttataaaatttgttatttgctttacagaaattttgaaaattattgtagaaatgtttttacctcatatgaaccacctgacattggaacagactttcttttcacaagtgttaccaaaggtataatactattacctgaaaatacatgttataaggaatctagcctcagtcttagatgatttattattaattatggctctctttttctaatatatcaaatatattcaaaataaaaataaggagtaagtagatctcatgtgagactataatggtgttagtgtgatcattaggcagttaaaaactgttacaggctgggcacggtggctcatgcctgtaatcccagctctctgagaggctgaggtgggcagatcatctgaggtcaggagttcgagaccacccatggtcaacatgatgaaacctcgtctctactaaaagtacaaaaaattagctggacatggtggcaggtgcctgtaatcccagctacttgggagactgagacaggagaattgcttgagcctgggaggcggaggttgcattgagtcaagatcgtgccattgcactccagcctgggcaataagagcgatgc

SEQ ID NO: 56959 - DNA, 1029 bp, Homo sapiens
agggcacttatgtcattcatgagggcagagccctcatgacttaatcacttccccaaaggccccacctcttaatagtatcacattgggtgttaggtgtctgggaggacaccaatcttcaagccatatcatctcacttggaaaaaagtcaaaataaaaccagtagatttaattaatattacactatttatagaagcatgtgatgtatcattccttgtattaatttcctggggttgccgtaacaagttaccacaaactaggtggcttaaaacaatagaattttattctctcacatttctagaggcagaagttcacagtgtgtcaatagggccatgttctctggaaggctttaggggagaatatatttcatatctttctcttagcttctcggtgtcactggcaatccttagcttactttggctttctgtgtcttcacatcatctttttataagaacaccagtgatagtgattaagggcataccttactttaatatgacctcatcttaactaattatgtcttcaataaccctatttccaaataaggccacattctgaagtattgggagttagaacttaaagctttttgggagggacacagttcaacccataacaacccctaaaatcgatatttattctcaattaagtcttgaaattggtttcaaaaagagaatattctattagagtttttaatgtatagttttaacatatagttctttagcccccaattttttttttttttttttttttttttttttttttttgagacggagtctcgctctgtcgcccaggccggactgcggactgcagtggcgcaatctcggctcactgcaagctccgcttcccgggttcacgccattcccctgcctcagcctcccgagtagctgggactacaggcgcctgccaccgcgcccggctaatttttttgtatttttagtagagacggggtttcaccttgttagccaggatggtctcgatctcctgacctcatgatccacccgcctcggcctcccaaagtgctgggattacaggcgt

SEQ ID NO: 56960 - DNA, 1082 bp, Homo sapiens
taacaatacaaaattagccgggcatggtggtacatgcctgtaatcccagctgcctgggaggctgaggcacgagaattgcttgaacctgggaggcagaggtttcatgagccgagatcacaacattgtactgcagcctgggcaacaagagtgaaacgctatctcaaaaaaaaaaaaagaaaagaaaagaaagaaaaacaaataatttttttaaaaggggtcacattcaggattttatgttattttgcatacctttgtgagattatatgtactaaagagacatatttttatgcaaagaatgaatagagttgttttattttaggaatttcttcctttcctctctgattcttgctgtactttgcaccaactgtatcttcagatacacaggtaagaagaatgccatatgattattaagatacaacaatgccatctgtgccatgcagtgcttaagtacctaccattttatgataaaacagaataatttttcttaatgttttagtaatttttatctgctagcttgaaataattggagatagaggcttttgaaagatacattccacatgagttatgcttatctttgtattttattagtaccttatacaggagtaataattagtaggtgataaaatccaatggcaaatataaatatatatatacacaaatatacgtatacctttatttttctattggcattttttaatctttatttttattttgtttctatgaagtttaagtcacttagcctccatttaaatttacattttgatacctttctgtaattcactttacaggacagtcttttttctgaaaccatctcagaaaagaactgaattacagaaaggtatcaaaatttagatgggggctaagtgacttctaaaattgatggtttcctccaaagagccctaaatttgacacaaagtgagttcatttatccagcagtcctgttgcagcttcataattcatttagtgtcccagacaactttttcacacctttccttcctcaaacttcctgtatcttccaacaccttcccaattcctcactgtcaatgacctcacttcctgtgtcactgaggaaaaatggaagc

SEQ ID NO: 56961 - DNA, 1215 bp, Homo sapiens
tgggaggccgaggctggcagatcatgaggtcaagagatcgagaccatcctggccaacatggtgaaaactgagtctctaattaaaatacaaaaattagctcgtgtggtggtatgtgcctgtagtcccagcttctcgggaggttgaggtaggagaatcgctcgaacctgggagttggaggttgcagtgagccgagattgcaccactgcactccagcctggtgacggagtgagatgccatctcaaaaaaaaaaaaaaagtttatttagaaaaataaagcaaatgtttctgtgtacaaggaaaattatttttaatatatacttgtgttaaatagctgaaaagatggctttggctcttagaaatattattctacatggactttatgaagagttaaaagtaacttttataacctctagttaagtcggctcttggtggtgctttagactggtgtttaaactcaagtcctttcctgtttctgtccttcagaacacagtactgtctgctttgcttgcagtatgtaattctgctggtgaagctttggatacaggaaaacaaactgcaattatcgaagttgtgagtcagctttgggcttttttaaacattaaacaggtaaggaaagcaactgatcctttccttatcaaaaaatagaaaatatcaaaaaaagaggattgtactgaaattttccagtgtagagtaaaatgtatctaattcttttgggtgcttggtagacctttataagaacttaaagtacctgtactctctcacgcagctttttcagagtgtgatagcattatattagtaaaatcagaatacgtaatgtgatggcagtccacctacttactttcctaactggttataccctttccccacctccccatctcttcccctattgtttctgttctgtcttaggttaatgtatcctatttctgtaattctaggacctttaataaatcttttgggcaatggagagtgagctgacttaaaggtggaaagggctagtgaatggatgtggctaatttgtatttctctttcccagcaaagccaaaaagccaagtgatgatctaaaactaatgatatgcatcccacacatggttgtacacgtgtttcttagtttgaaaatatagcctgtttgttttctttgactaagtagaaattaacattggcctctggcagctagaggaagctaaaggcaacagccatacttttgggaaatgataga

SEQ ID NO: 56962 - DNA, 1049 bp, Homo sapiens
tggcttcaacaaatacttttcctgatgttcacaaatcattcagtattcattcaggatatctgtgctggagatatagcttacaatattataatgtaaaccaaaattatgaagaagggaaatgaaattttaagattactaaggaacatacaagcctttcagtgatagacaagtaattagatcccttttagacttaaatttggatttcagtcacagctctgctttttgtcctagccatgtgatcttgaacaaattgtttaacctctttgaccctgttttcttatcagtaaagtgaaggtaataatatctacctcatagagctgttttgtaaggcataaatgaggtaataaatataaaatacttaacatattacctgatatataataaatgctcaataaaagcttgctattattattcttatgtgattgaaaatttttcttcaaaattactttgtgtttcttaggtagcagatcaaccttatgttcaacagacattcagccttttacttccactgttgggatttttcattcaaactctagatcctaaactgatacttcaggtaagaataatgaccagattgatactttgtttgctaaggaggttgctaaaactgctatcatgtaaaataactttctagaaatagttcctttaaacctcctcttgttgtgtcatatattgacttgtcttcatcaaggatatctcatttctctttcttccttacagtattgttaatatatggcgctgttaattcagcctttatctgttcttctctgtcaccctatactgagcagtcaatactttttgttattactgttaactacccactgcaaacccctgaggttaggagtcatagttcatgtgttgaaccctgcattcatagcagtttcaaaagcatttcagcagctgtgggaatgtggaatctaaccagtgtgtattaaaagatagcacctattgtttctttgaaaaaataaaattattttgaaagaagagcactgctgaatttcctctttggcctccaacttacatggctaggacaggcagagcctgggtca

SEQ ID NO: 56963 - DNA, 1899 bp, Homo sapiens
actgatttatcacagtgactttcaaaccattttaatatttcaaatattccagaacaatcccaaaacatttattgaactgcttctgtattgcaatcggaaaattgtctgaagggtacattactcgttatctcttttacagcttctcaaaatgaggcttagataaatgaagtgaatttcgtaaggtcctctgaataaacaaggaccagaacaggcatacacagcaggcctactgatacagacagacacagacacagtcttccagcagatagtatttttgggtcaaatgataatacatttcattttgtgctatcagtcataagggttaggctgatgaacctaaacctgtaagatgggttgctcctttactcttactgcatttgctgtatagtcatgcctatgatcataagggagtccagaagcattagtatgacccagcagaagtaattaaagcttacaacacttgtacagaagttaattttgtattatccttagggaccctgaaggaatcatgagtttatcacctttgaggatcctctgggactcttacttaaaatgaatttttggttaaggtagctcataaaactcatctatttgtctttgcaagttgttgaaatgttaaaattggtcttgttcatcaattttttaatagggaacaaatcatgaagagatagttccacagtgtctcagttctgaagaaactaagaacaaagttgtatcctttctggagaaggtactttctttacatggctcatgttttattctttgtcctatttttttttttccgaaattatgtaactgtaaccaacctgagtgtcttcttagcttaaacttttcacagtgctgagcacagtgctgacgacttttactaagcaattgaggccacagaagtaaaacacttggggccaggcgcggcggctcatgcctgtaatcccagcactttgggaggccaaggtgggtggatcatgaggtcaggagttcaagaccagcctggccaacatggggaaaccctgtttctactaaaaatacaaaaattagccgggcatggtggtacgcgcctgcagtcccagctactcgggaggctgaggcaggagaattgcttgaactggggaggtagagattgcagtaagccaagatcatgccactgcactccagcctgagcgacagagtgagactgtctcaaaaaaggacacttgtagttcctctgcctgtagtttggggtgtaatagcactgattatccaggcagtgagatgactaatgaggatccctaagctattaataatcataattaaatacacttgatcacataattaggtaggcctgagaggatgtttactaccatattttgggtataatttaggcatggcttttttttttttttttttttttttttatttgggcagcctcccaagccagggtaagctcagggcccttttttttttttttttttttttttttttggcatggcttttttattctctttgcagccaagacctgtttttacaattaaaaccaaaattttgaatcacaaggttcctatgtctatgcatacttgggaacttagtgtgaggaaataatagttaattgaaatactagtggaactgttaaaccacaaatttagactaccaggagaaactgaattatttgatatattacatgtaatgatgcacgttatatattttacatatattacatatatatttttttaggtgaaatgggcccacttgactcactgaactttattttttagacagagtctcgctctgtcgcccagattggagtgtggtggtgtgatcatagctcgctataacctcaaactcctgggctcaagcattcctcccaccaaagtcctgggattagaggcatgagccaccacacttggcctacttatattacatcta

SEQ ID NO: 56964 - DNA, 1024 bp, Homo sapiens
cttattaaaaggcagaatttgacaccaataaggatattcaaaatattgttttgagcactattagtatagtaattagtatagtagtaattcatgaagaacaacattctgataagttttagtcaaactctcataaaaagaaaatacatttatgaacttgtttataagacatgtaagcttggactatgcagcacttctcattgggagccctttgggacaggatacttgttgtataccacatacaaactaagacactggtagtagcactctgaattgctatgataaaccaaaatgcctttacatatttttctagatgactgtgtaggggttttggggtgcatcctcctacccttgtgatccaatgactagaataaaatttgcatgtaagctttactccagtccaaaaggaaggttctttatatttagaatggatattgtgatattacttatgttttttttccagccttatgcaaaaagagctcgtcaggagttcccctgggaagaagagtacaggtcagcgctgcatacaatagcaggggctttggaagcaactgagtcactactccaaaagggtcctgctccagcctggctttcaatggaaatggaggcgctccaagaaaggatggataagctaaaacgttacatacatactctagggtgaaacttatcactaggcagaactgggtttgatgctttgtcaactgaaaatacttatgtctgtacattttctaacagatataaaacaaattttgtaaagttgaatctagtgaaaataatctttatttgacatttagagaacaggattgtggggaatattcttattaagaactttggtacaatgtactacatgtggaacagtcaggaactgcctaggtccacaaagaaccatttactcagatagtctaactgtaaacaaataaataagctgcctaaggaaacctcagcaatttaaaatcatttatataatttatagctaaaattttttaaagttgtatttcataatagagcttactcttatgttaaagaa

SEQ ID NO: 56965 - DNA, 1016 bp, Homo sapiens
agctgaactgggaagataataactggtgacaatagatgtgagttaaactttaggaaaaaggattccctttttttaaaaaaaatcaatacctcaaaagcaggctttgggacaagaaaaccccaaagtggcctgcttttcccatcccaggagctcattatccagtctgtgccaactgaagtaggagactgactgtgagtgctggctaaaagccctgggtggtgaggctcacagtactggtttccaggaggaagagcctttgtgcatttgactgaggccagtttctatgaagagcaagtagctgaggagaggtcgaatttactgctttttccaggacaattctggaagtaaagaaaatgtaattcaagctggttagcttaattttgtgccattctttaacataagagtaagctctattatgaaatacaactttaaaaaattttagctataaattatataaatgattttaaattgctgaggtttccttaggcagcttatttatttgtttacagttagactatctgagtaaatggttctttgtggacctaggcagttcctgactgttccacatgtagtacattgtaccaaagttcttaataagaatattccccacaatcctgttctctaaatgtcaaataaagattattttcactagattcaactttacaaaatttgttttatatctgttagaaaatgtacagacataagtattttcagttgacaaagcatcaaacccagttctgcctagtgataagtttcaccctagagtatgtatgtaacgttttagcttatccatcctttcttggagcgcctccatttccattgaaagccaggctggagcaggacccttttggagtagtgactcagttgcttccaaagcccctgctattgtatgcagcgctgacctgtactcttcttcccaggggaactcctgacgagctctttttgcataaggctggaaaaaaaacataagtaatatcacaatatccattctaaatataaagaaccttccttttgga

SEQ ID NO: 56966 - DNA, 1025 bp, Homo sapiens
ttgagcctgcaagactttttcaggcatatgtaattaacaaacatcccaaggataacactgcctggcttagagcatttctatatttatgtgaatatactgtatgtttggatatttaataaggattgaatgcactagttattacttacatgcttccactgagttaataatgtaagtattatgtaattatttggataacatgtgacatcgttgatcttgagtaatgttctgctgggatctcttttgtttagtatgcatggatatttccaagtaattagacctatactactacacttccttaatgctatccttcccataagtgtagttcttacctttaaccagtattttatgagaataattattttccctacaggcgatccattttctcagcctattaaatttcccataaatggactctcagatgtaaaaaatacttcggaggacagtgaaaacttcccatcaagttctaaaaagtctgaggagtggcctgactggagtgaacctgaggagcctgaaaatcaaactgtcaacatacagatttggcctagagaaccttgtgatgatgtcaagtcccagtgcactaccttggatgtggaagagtcatcttgggatgactgcgagcccagcagcttagatactaaagtaaacccaggaggtggaatcactgctacaaaacctgttacctcaggggagcagaagcctattcctgctttgctttcactcactgaagagtctatgccttggaaatcaagcttaccccaaaagattagccttgtacaaaggggggatgacgcagaccaaatcgagccgccaaaagtgtcatcacaagaaaggccccttaaggttccatcagaacttggtttaggagaggaattcaccattcaagtaaaaaagaagccagtaaaagatcctgagatggattggtttgctgatatgatcccagaaattaagccttctgctgcttttcttatattacctgaactgaggacagaaatggtcccaaaaaaggatgatgtctccccagtgat

SEQ ID NO: 56967 - DNA, 1060 bp, Homo sapiens
tactggttaaaggtaagaactacacttatgggaaggatagcattaaggaagtgtagtagtataggtctaattacttggaaatatccatgcatactaaacaaaagagatcccagcagaacattactcaagatcaacgatgtcacatgttatccaaataattacataatacttacattattaactcagtggaagcatgtaagtaataactagtgcattcaatccttattaaatatccaaacatacagtatattcacataaatatagaaatgctctaagccaggcagtgttatccttgggatgtttgttaattacatatgcctgaaaaagtcttgcaggctcaaataagtttgcctaactcaacttattaacctcactttaagaaatttccctaagtgtagtagttaaggcactgagagatcctgtgcaatgtgttaatgactttgctctcatttccccaaacttatttaaccacagaactctttttcacaacacgcccattaacatctttcaaaactatcattcttggtacaatttggaagatgctgcactaaggcaacaaaagtctcaaagtaaagtatcagtgcaaaaaagaattcaagtaatgtcaacctgcacttctcaccaactataaagaggaggtaagtatatatccaatagtctggagaaacaagatgagaccaaagctgactacataattacaaataaatcagtctcaaaactcccaaaacacccataagcttattagtctcaggaaaacattcatccaagcaatggaaaagctatataaatttaatatttctacctgtctgtaaaagagtattgtagtaatctcgctgtatgtgcttcttgctgttgatgggcgtgctgccagaaaagaaacatttagggaatatgctagagaaggggttctccaagattggcgagatctgactgtgatggctgcagacgacacacataggagaatctgaaggtaaataaaaactccaaaacatgaaagggacagtaaattgcttcttgatctatcacatggttggtgggcatagttaagtgaaatgggtat

SEQ ID NO: 56968 - DNA, 1116 bp, Homo sapiens
aatatgataatcataaaacagcaatccgcccaagccaaaaattggtcatcctcaacacctcttccatctaatgagaaactgagtactaccccttctgtgtccctctactatatccactgtcacactttccccagcctttgtcatctcttagctaaactattctaacagcttcctagcttatctccctttctgtggtctcttccacactgctaccaaagtgaactttctagcacacacaaattggcccactcttctttaggggaagcagtttcctaagtaatgagaggtttcattgtcttccacatgctcaacatttactctttgacctcagtccaattctgagacctatgatgacaactccatttcagagttaaagtgcttcattcctcttctaaatttccagacacaactacatacagggtaacaattactgctgcagatgtaaatacaaagtgctatgttgtagttactacaacacagagactttaaagtcagcccccagcgaatcacacctccagtatccatgcccttgagtaaacccatcccacaatgagcctgggctttttccaactctaaccgagagaatgaggcaaaaatgactgtcagttcacaacctacactttaagaaggcttcttttgccctttttttttctttagccctggccagccatttaagaagtccacctgccttgctagagaaatcatgtggaaatgtcacatggggggatacaagccccccaagcttcctgaaaattcatggagagaaaggcgcagcctctcagccaccccttccaagataccaaggagccattttggatgtgtcaacccttgtcgggccccagatgactgaagactcagctgatatgtggaacagaaccttcagctgagtccagtcaatccaaagaatcatgagaattaataaaatgattattattttaaggcactaagttttggggtacttacatggcaacggatgactgaaacatgtcccacttatgagctccttgaaagcagagagaatgttaatctatctcataggaaaattatttgaaagacaccatgtgattgtagtcttttaaaacaatttttttaaaacctcatactaggttgaatagt

SEQ ID NO: 56969 - DNA, 1018 bp, Homo sapiens
tcagctgtgttcccacatatgccttcttccttcacactcttcttctttgtaggccattctgttgctggaatgcatttcttcccattggcttctggaaaatgtgaactcatctaagatctggctttaatctcctttctgtgactccttcccctaggcattcccctgcccaacaaaattagtcaccccagtgcttccagggcacttagcacgtttatggagattcttagtttacattctaggttatgagcacctgattgggggcagaaactttattgcattcatcttgtattcctagtgtcctaaatgatgttcgggacatataggctcttcaaaaatagtcttcgaaactagcaaattaatatgcttattctgtggatgttggttttgtctccataactaaggttctcaactttctaatctcgtgtggtagcaagacttaagattcatttggtttagtgagattaatgacagatttgttctgtgctagaaaagccttcttattgttaatatctaagcaggaaaagaaagaagtgttctaatttccatataaggaaatcagatgcacagatgcctctgaacagcagagcgtgtctgttaaaccagatgaaggggagaggaaaaggaactaccatttattactgtgccttgtgctgtgccaggtactttatttgcatttttaaaattagaagcattttaaatttgtgcatctaatatgcggcattgatttgaaggtttaattggtgctgtttgcattgctcattgcttatgtaacctgatgtaagagattagttcaccaaacatatgtatgaatcattttctttaatttatttctctgtctagtttctgaggagtattcagtcaataagagacccagcatctatccctcctgaagagatggtaagatgatatacttcacatataatgaaggtgcctttgtgtaattgagtatgaaattttaaaaaactttcctctgcttactcctttctttactgagttatagatgcctcataattcctct

SEQ ID NO: 56970 - DNA, 1189 bp, Homo sapiens
gacggtcagactagcttcagatactttcaaagtaacacttctgtaactcactcttccagtctgactggcttttcaggcaggagttggagaccaagtagagctttctgcctatgaaatggcaattagtttcaaagaacatagacccattcaagttacctgaggaaaagggggctggttgtaagggtgtcaatgggatgttagggtatctgggtggaattagatttgaggctgggcttccggtagtcttgagatggatagtagtaatgtgccccctaagtatgactaagctacggtcccagtgtttgctttttaaaattttactaccaactgacttcctctggaaagtttctgacttcatgtggctttggtttgccgtagctccacctccacctcatagcatccttctaccttcggctatgcttctaataggcaaaaattgttcttagttcaaattcctgggggagacaatgatctggccagtttatctcttcactcaggccatgaaattgatggctaatttgtgaattaaccgccctttggcccaggataggtacctgccaacattaactgtgcccaagaagaggtggcaagatcaagtgctaagcataatcctccctactcagcaggaggttgtgacaatctggccagcactctatctccagaacagagggattagcattgttgcttttacccatggtcccacataaactttttatttgtagtcccagtagaaaggtgaatgttaccatagttgccatacttggcatttcttttagtactgttttttgcttctctgtcatttttaagaaagatacattgccaggtaggtaggaattcagtgaatttgttacaaagcagatttagttcttattctcagcaacatttttagattttgaaaatcttcaattttagatagctttagcctttatacatgtgtttcttatataacgatggttgtggatcggtaggcactttaaattttgttctaggcatgtgttttgagcagcattacatacccagtgtagaaggtgttgtatggaatttcaccgaagtggggaaaaattccaagtagagggtcaatgtgtaatgattattgagtttatatttgtccaaagaatacagattttaaacaaatttttaaaggcctacatagaattattggccgtatttgtagcagtttgctttctac

SEQ ID NO: 56971 - DNA, 1045 bp, Homo sapiens
tgcccgagcccggggggatcctgggggcgcgcccgccctcgggaaggcggcctcattcttgatccaagaccagtgcccgtcccccaaggcccagctggctcctgtcttggcatagtgctttctgtttagaataaagatgaaacatttctcggaagagcatattcaggaatccatgtgaaattctcggagtcgggtctcgaattttgggggtcactgttaactgctgtttttagggacccatgttcttataaaatgtatcttgagctgaaatcacaattattttggtccataaagacttaattgtgtattgcttgtcagctagcaatgctggactgagttccgcagagggaatatatacctgaaacacgaaagcaagggccggagtaacgttaccgctggataccagaatatcagccagtacagtgcatccttaatactcagagtgcaagccattatctttggaactttcaagctaagggagctaggaccaaggtagtctcgagtaattgctgggaaaagaaaatatttggtagaaacatttccatagagcacacgggtttcttagttgagtgtatgagttgccctttgacctagacaagggttttcttaatctacaagcggtccagaaattttatgtgctgcccaagtaggcaaaagagtggagggagattattaaagggaagactgatgcatattcaagtcagagactgtcaactcagcattttattatagagtggagatgctaagtgctacgaaatacctattacgggatactaggatatccttttctaccttcttgtgactttttaatttcaaagctaatgagcaagattttgtgttttccccgtcctcaaaacaacaggaaagcattttggaaggccaagtgtttttcttacatttcaataaatcaattttagctgaattatcatttttaaagcactggcgggcatggtggcacatgcctgtaatctcagcaactagggaggctggggagggcaggtagcttgagcccaggaattccaggttacagtgagataggatagcg

SEQ ID NO: 56972 - DNA, 1035 bp, Homo sapiens
caggaagagacactattttggtgattcaaaggtccaaaatatgttatctgaatacgaaggaaaaaggtgaaatggcactaaataagtaatcctataaagaaaaagtactataatagttgcatatactagtctagagggatacaccacattttatgtgggttaggagtagcaagaagaaactatgtacatacagagacatgcaccctacaagattggattgaattccagtatacttataaatagccacatattcaaactattatctgaagcaaaatggccacacaaggcaagagcagatgtggcatgtcacagcttacttttccttgcttctcagggcccctagtgagggcatacaaattcctgtgatacacactattgaagtcaagtctttccagatcaggaaagcacaatttttcctgcaacgttgcctttttatattcatagtttctatctctttcaagaacttacatgaagaatctatctgcttctgtttaaaggaaaactctccgggttttgaactaaactcagcattagcaaggctgtatccttttcccaaggaaaaaagtaaagtgtctacatattccaaaagaatgtctccaggttttagcatcctagaaagcctgatttcccccactatattagaaagaagcaaatgagagtttaaagaaacaaactgttatgtttcacagtgaatttaattaaaaatgtatgtagatatagttgatttttcataatacaaaaggacctaggacctatgtcaaagtactctccaaactgatcataaatgttttaaatattttttgctttaaacagcaagttcatctgtgatacataatggagaattccagaaaagatcattttagagtttggtttcaaattttattccttttttccaaaacgatatttgtatatagaaattcgaaaaattaaatgatatcctctacactgtaatacacacagatgtctctgggtgaactgctgactacataaatagatctttaccatagtaacctaaagaccatactgttcaagacc

SEQ ID NO: 56973 - DNA, 1091 bp, Homo sapiens
aaatgggtggatcatgaggtcaggagttcaagaccagcctggccaagatgctgaaacccagtctctactaaatatacaaaaattagctgggtgtggtggcacacacctgtaatcccagctaatttggaggctgaggcaggagaattgcttgaacctgggtggcagaggttgcagtgagccaagatcacgccactgcactccagcctgggcaacagagcaagactccatctcaaagaaaaaaaaaagagaaaagataacattgttgtgaattgtagcatatttgatcattgttatttctgccagtacccctctgtaggttctcattacttcacatttggacagctgtaataggttcttcagtgttcatgattttgcctctcaaccccctttcctactacaattatcttcctaaaacatagaatttggtcattctctttcttagcaaccattgacaactctccagtagccaccagttcttagcaggtttatgaaaagcttcaatatctagtcctaacctccctttctagccttatctcctgccatttgcttatatcataaatctaaaactttaaccataacaaaccatttgctcttcgtcagccactcctctctgttgctcaggctgctccaccatcaggaattctgtctctctttgcctgtgagatcttacttgacttttaagactaattcattcatgaattcatgtaatttttgaatgcccactccatgtcagatacaatactagagcctagggatatagcaatggccaaaacactccttgccctccatggtgtttattttctaatgggaaagaaatacaataacaaaatatgtcaggaggtaacagatgcattaaaatcaaagtattttgtatgaagactttctagctgccaagattgtcctgtagcaatttgtacatgtctctaatatactcttatattaaatatttatcccccctcttttcttctgtagcaatttatacatatgctacagtaggatgacatcaggttattatcagaatatttcttccatgttaggtgcctccaatccttatagtcaaggactatgtcgtatttgttattgccttccca

SEQ ID NO: 56974 - DNA, 1126 bp, Homo sapiens
tcttagactttacagcatgtttagtttattttcatttcttattagtatttttcagtacttaatagtctcttgcccccacctccaacaagaactttcctctctgttcaacatcagaaacattttccttttggcatgtgctttctagttccccaaacagtataagcaaattggaaagtttagctgtcattcttggaaggttacagatcacactagcagcctgagtaatccaagaggttttaagtatcatagcatttagtttaaagtgaaatttgctctgacagggctggcagaccaataggaaaaagaaatatttgtgcttggagaagtgcatatgtagagaccaaaagtataactgatggctggaagtgatttcagtctaaaaaaacaaatcattaagagagtgcataggggtaaaatacacagttcatattttaaagagtctcaaaatgaaccagcaactaaggttagcattacatagtaattagttgtggtgttcaggctttaactcactcagtaccagacagtatagttaaactgtcgctgaaaaaacattgctacttacatgatattctctagtttaaacctatagcagtaatttttgtaccttaaaaaaccaaggtattatgacagattatataaatgttgaaccagtaacagacaaacaattatttaaaggacgtgctaatgactcagtttattgacctaggggttatttaagccgctcagcaagttcccttaacatttggtggtatgaaatgaagcattgcttgatagtatagaactgccaatttcaagaagtccttgtgcttaatggaagaaatgtaagttaaagatgactagatggcataccttcattaaaatattgccagaaaaagccaaagacctttataggtttgagtaaatattcatttcaacttgataatcacatctgacaacttccattaggtacctattagagcattttttctgttaataactacaaataaggaaaaataaaatatattttaatggctccagttatttcttgcacgtcatttttctcttcaagaaagcctattatgagccagaggaatctaaaatttatatttttttccttgaatatgcagataaataataataaaatggg

SEQ ID NO: 56975 - DNA, 1081 bp, Homo sapiens
agtgacatacacaatctttattctaattgtattattttaaatggtattctctaaatcaggggtccccaactcccaggccagtacctgtccatggcctgttgggaacttggccacacagcaggaggtgagtagcaggccagcaaaccttactgcctaagctccacctcctgttgcatgagcagcggcattagattcttataggcgcacaaaccctattgtgaactctgcatgctagggatctatgttgtgtgctccttatgaggatctaactaatgcttgatgatctgaggtggaacagtttcatcccaaaatcgtctctcctcccccatgtatggaaaaattcttccacacaaccagtacctggtgccaaaaaggttcggggctgctgctctaaatggtttcagatctatgtacaatatgagatagatggaccaataatgatgatggcaattattgaaatatatttagtgagttccaggcagtttatgaattgctatttattacatcccttatctaatttactcttcacaacagctgaagaagggagacactattattaagaaaactgaagcatgtaggtttaagcaacttaccccaggttatcttgccaccactcaatcaataaactattcttacctttgcccacctttcttctattacaatgaaagaagttttttcaaaatccaataaacccatttttactctagaccccattcttgtcttttcaaggacttcttttatgttgtcactcttttcccctttactggatcattcctgtcaacatataaacataaatcagaatctgcaaagttaaactctttggccccacatcatattccaactgcttcctgtttctcaattccctttatccaaaacttctcaaaagacttgcatgtgctcttcaacttccccactcttgtcaaaatcaccaatagtcttcatattgccaaatctaatggaccattctcatctttacctctcagctggttttgacacagttgaccaggccctgctttttgaaactcccttctttcagctctcaagataccccatttttctgattttcctcctaagccctttg

SEQ ID NO: 56976 - DNA, 1042 bp, Homo sapiens
tcatccagacgcagttgctcagagcagaagctgcgtgcggtacatctggtccatctgcagcctcacacagagccagcacctgtaccagtgcctggagctaaccaccctgccatagtagccagtcagccagcatgcctgctgtgcgtggtgaccagaccctgcgcttggtcacccacacaacctcgccgctccacacctggctaacccttggcaggtgtgggatccaggttggtagctcaagctgagcacagcctatcgggcctagtgggcagaacgagcccagcgggcgcaaacaatactcagggagaaggtgccgccagccacaatggtttctgggtggcaaagcaacaccccaaggatcctgtgacattaggactttgacttagtagaagaaattcagcataattgagtctataaatttaaaacgtaacccgaatatgactggaacctttaaaaatgttaacatgtcaattatggtacagctttgtactagaaaaaatgacacagaagccaatccagttgtgtctggcaagttaattatatcatcaccatttaagagtgattatctagtgttaaacgtcatatacttttcacatgtattgcatttttgttggctttacagatagaaattagttgtaaatttaaatggaaagaaagaaagtctttaagcaaggatgacggttcttatgacatatttgacctagaaatgctcttattgtaaaaaacaaaaatgatttttaaggtaatataatgcaaattaccgtcataaaggcttgctccttcatattataatgagaataacaaaattgtatataattggttaataagcatcactattcccccttaaaaaaataagggagagaaatagagcatgtcatcttttatttcctttaaatatgagtgtaatgatattgagcttactccttaactcagggatattttctaatttaaggtagatttaatctagcctattgttgtcttgattgatttaacaatgtaatttaactatttatgaacagttgttagatttcttatattagaa

SEQ ID NO: 56977 - DNA, 1024 bp, Homo sapiens
attttcatgtattaaaacattataacagatttgttgacttactcttaatatgtaaacatattttaagataagtctattatgaaacatagtataatattaaaaaaatatcattgaatgcaagtcactgtcatacattttatttacactttgttcttgacatgcacatttgcataagtccctaatacttgttcttagctggatccaggttgggatatttgcaagggttgcttctcaatttaaatagaattttaagtcatgatttaaacatacgcagtagaacctctttatagcaacagtaaggttggataataatacagtgtcctgtttacttttaaaagttgctctgattcgggcatggtatatgatttgatctaaaaatactcagatctgtgcaaatttttgttataattgtattcagttatccaaatgacattattttcaatatatgtaaacatctatttcaagccaagtaataaatgacataggtaggtaagaccaatagaaataattttaagttctttccaccttcttcagtattaatgaagcagaagtgtacagtaaaattttttgagtaaaaccataagaaatagtactatatgacaagtaaaattattcctaagataatgcagtggtcattttactcttaaacttgtgggatggtaaaaacaggagaacaagagtgcaatagctatgtcataacatagttctaattaatgaggaaaaaatcaaagcaaataaaaaatttttatagtataagagtcttgatcttacataatctttacatgaaatcccttttttctttctgtgtactttcatagtagctgtcccaattacttttttagttaagaaggtggaataccttaggagccttctaaaagattcaaagaataaaatgtttaagcctttttactctaaatctaagtatatgaagtctaataagttacatttatcttgcatttaaatcttcatgtatcttatttgatcattaaaaagtgtgtgaggttatagggcaaggagtaatatt

SEQ ID NO: 56978 - DNA, 1021 bp, Homo sapiens
cctcttagtttttgtgatcaccttaatagtgctattaccctgcatccctctaactcctttttagacagctgtaaccaaatgtgtttaaagatatgacagaggaatttaaaaccaagaactctaacaatgacatgaaatatctgaagccttttattttctatccatgctatcatttctgctgtccattgttaaagcaatacactactcagtagtagctgcaacctatgggacaagtagtagatggagaagttctgctgtagcttacagtaatttgcctgtttgtccttcaaaaccattcaccaagaactttctttctgacaagtgttacagatacacctgtcagtgaataacctaatcttgctccataggagtttatgatcaaaacaagaagcatttaaagaaataattacaactaaataagataagatcattaatttgtggttggaacaaaaattaaattcaattctgatatttgttttctttagtaaaccattttagcagctaaaacaatactttaacagtacttcccccagtgttatctagactaaaagatacagcaaaatatgtcattttatgctaactacctgtcattagtgccacaaatgcagttgactcttgaacaacacaggtattaggggaccaatccccctacacagttgaaaatccatgtataacttttaactcccccaaaacataaactaatagcctactgttaactggaagccttactaatagcataaacagttgattaacacatattttgtatatgtattatatactgtattcttacaataatgtaagctagagaaaggaatatttttaagaaaatcataaggaaaatatatttactattcaccaagtggaagtgaatcatcataaagatcttcatcatcattgtcttcacattgagtaggctgaggaggagaaagaagaggagggcttggttttgctgtctcaggggtggcagaggtggaacaaaaatccgtgtataagtggacctgtgcaattgaaatccattttg

SEQ ID NO: 56979 - DNA, 1017 bp, Homo sapiens
tgtaataacatacataaattgtaagtatagctcaatgtattttcagtgtaagcatacccatgttattatcactcatgtaagaaaataaagcattaccagtaccttagaagtgcctcttctccctcctctcagtcattaccacctccttcaaagtggttagtttgaacaaaagatagtttattttgtcaccactagattagtgttgcttggttttgaactttaatatataagtggaatctagtttattttgttctaccttatatttgtgacattcatctatgttgtatacaaaagtttgttcattttcattgttatgtataatattttattatataaacataccaccatttatcctttctactactgatggatagtagagttaggtttttgtgggggggaggactattataaataatgctcctatgaatattttgaaacctttcatttggtgaacatatgtactcatttccattaggttcacacgtaggagtagaatggctgggtcacagagtttgtatgtgtttggccttagtaaactatgccaatctgtagttctgctggttttcattcttaccagtagtgtaagagagctgcaatttttccacatcacctccaatactgggcattgtcagtcctttcaattgtagccatcatactggtatttcattgtgattttaatttgtatttccctaatgactaatgaagttcatcacctgtttatgtttattgattatttagggatagccagtaaaaagatgtgcctatttaagccttttgtgcatttttctcttttgagtttttttaatttaatttgtaagttccttaatataattcattttaataggtcatctagagataatgccccatatttgaagtattccttcccaaaattttagcatatttgtatttactttggtacactcttctcacagtcagttttcagatcagaaataattaaaagaaagactaagtagttgggaggtaaaagtaaagacacgtagttgatagagtgagaat

SEQ ID NO: 56980 - DNA, 1009 bp, Homo sapiens
tataaaattaaggttctgtgatttgaataattaaaggcaaaggagaaattgtgttatagctcagccctttttccatggaaggctctaagggaaactgtaattcaatagaaccaaaaattattttaatattgttttgtcacataaagcatttcatttaagaattttgattttagctttttctattaacaccagagacacaaaaagggatttgtaaagaatattataaataattattttaaattttctatctcatgctgaaattgtttgagtagttttgatctttccctaagagtgcagaaaatctaaaattttaattggttccatggaaaaccttatatatgaatattcctttgttttccttctcttaaatattgccaaatttattcgtttcttattttttaatgttattttcctgagatttcataaggatactaaatttatttctgcttagttcagtatcagttataaatcatttcagttctatcattcctatactttgacagatagtttcttatgtctggtaacttaatgctaccatctgggagatctatcatagccattggcttcagcaaatgtgattatctgcaaattgaattggacttacaaaacttggctttacttaattgttagatgcagtctttttggggatttttatagtgttacgtttttaaaagtgtttaaagatttttttggcttatccaagaatcagatcttcaaaaaaatttttttccttgtcaaaacttattaagccatttgacattgatatgtctcaagggtgcttccttacgtcagactatcctgggttggaagatggcaaggaaattccttgtcatagtgtattcttcagtaccctagaatatgtactgatagtgtttcaaaagtaacttgaaaagttaaattttcctagctttttgtctgatgcatcatgcatatattttgttgcacctctcatttgctttggtttagagatttcataagctgaggattgtttgatatgcttgaggatggt

SEQ ID NO: 56981 - DNA, 1120 bp, Homo sapiens
taacacagcagactttagttattaaagttttatgatatgttatcttgttttctatatgtgtaaaaactattttcctctgtctgctttattttttcctgacttatctacctttaattgccatttgatttctattaaactctaagctccaagagggcaggaatcgttgttttattttggttattgtgtccttctcagcattgtatgaattattttatatgtgtgttttgttttagataacacacacacacaaacacatatcccattcagtaacaataaatgttttttaattaaccaattattaaccagttaaaattttcaaaataatatattacctttttagggctatctctgttgccttggtgagtagaaatgattttctaaattattaattcagtatactaattctttatctctcatatattttacttttctagttgctctttatttgcttctgaatcttgctgaggatactcgtaccgaactgaaaatgaggaacaagaacatagttcacatgttggtgaaagcccttgatcgggacaattttgagctgctaattttagttgtgtcattcttgaagaaactcagcatttttatggagaataaaaatgatatggtaacttacaaagctttttcttgaaatagttcatttttgccattttcaagttagaatattttgaaaaaaattaaacactttattcccctaccgagataattctgaataaagattttataatagcaataactcactgatattgcttcattaagaaatgtattccatattagttaatattccaggtgattgaagctttctgaataaaaatcatttctaatatatagaatggatcttgccatattaaacataatatatagaaagtttgtttaaatttaaaattttacttcagagtcacctggtcttgttgttttaccctaagctattttgccttctgcatctctgactttagtttgtggaattaaaatttagccagatctcttcattgttacctacacttccactttgttacctacaattcttctttgttacctgctgttctacttggcagccacaacctgttgattgtttcttaaaaatctcttgaaactgtaatatttcttcttttca

SEQ ID NO: 56982 - DNA, 1034 bp, Homo sapiens
tttttttttttttttttttttttgagacagagcctcgccctgtcacacaggctggagtacaatggtgcgatctcagctcactgcaacctctgcctcccaagttcaaacaattctgctgcctcaacctcccgagtagctgggattacaggcgcgcaccaccacacctggcaaattttttgtatctttagtagagacagggtttcaccatattggccaggctggtctcaaactcctgacctcgtgatcccccttgcctcggcctcccaaagtgctggaattacaggcgtgaaccaccgtgcccggccagatctcactttttttttgcttttaccttctatatagttaccaccagaacaactgaatctgaacatatcaatattgtgtcttgtccctagctgaaaaaaagttagcatttgtgggtatggtcaagaaaatgatttatttatgatggtatggattcttacatttaataatgctaaagactttatatattttatatcagaaatactgttttaaaacagaatctctgaatatgctgtcttgcctagagagtctgaaaaagattttatgttccttttgttattttgtttgtctagttcacagaaaatcactgccttgtatttttctaagcctaattatatctaatagtttattttactaagagtctatggccaggttctctataataatttataatctataaattattttaaagtagtagtattgaagttattacttttataatacgtgagttgaaaaattctgttatacttacagcattcgacttaagagtctcaatgccaacacagatataacttccctggcaaggaaggtggttgaagaatgtaaactcattcatccttcaaaactaaatgaggtagaacagctgttgtactatctacagaaccgccgtgattcattgtcaggaaaaggtaagtagtagaattcctggcttcctaatgcaaatccaaagttgtttgattatagttcatcaagcaactataaaaaaaagtttatcaaactattgatatttg

SEQ ID NO: 56983 - DNA, 1027 bp, Homo sapiens
tatatccattttgtacaacggtcagattatctccataagttagagcttgtaagtgcaatcagggccattcaggcccccaaatagaaacctcccttattagctggactgctgtatagcattcgctaactaaaaggttatcggattcccctctctcctttcaagctgacctgacagccctttctattcccatcctcaagggggcggtgactacggagccactccttatacacggacgctcaaaactgcaccaaaacttccctgctcggctccccggtgcgtcaaactctgaggccaccgcctcagactgagcctgcgcatacaagaggtgcagagcaagcgcatgcgtcgtgacggcccggcttaggcgactctgggcgggtctgggccgctccagtgttttggggcacagaagctgtgggaggagctggaggcttcaccgtggtaaccacagcgccgctgctgccccgccttgcaggcctcaggactgtcatcgcctctgggtgtgagggtactttggccaccgtccccggaaataaccgcgcctgcctctcaagataccccatcctctccacgccgctgccgctgccgccatgcaaggggaggacgccagatacctcaaaaggtgacgactccccaaggctctgtcctaccctccttgccagggccctgaagatgttcttgggttggctgtgagatgtcactgggcaacgctagtttagcagacgggatgggaagcagggagagaagtcaccgaaaggagagggaaaaggtgaagtggagaaaaaaggagagctctgggggggtttcaaagtcctttgacctgactcggcggagccctgacagcattgaaagatggtttcttcgctacatcaccttattccagggggagagggaggtagggcaaggtaaaccgcgtcttttgttttttttttcgcctcttcccagactctccattttcccataatagataaatcccatgagagcctgggaataaagtctggtgcatccgccctcaggcctcagtttg

SEQ ID NO: 56984 - DNA, 1047 bp, Homo sapiens
gtcctaatgaataaaagaacattatcaagaataataggaaggccaaagtcagtggcttttagtttggagatactgtagtcccttctaatctgtggaggatattccaagacctccaatgggtgtctgaagccagggatggtaccaaaccctatacagtcgtccctcagtatctgcaagggattgctttcaggacccctgtggataacaaaatccacagatgctcaagtttcttatgtaaagttgtgtagtatttgcatatagcctatgctcatcctcccatatactttaaatcctctctagattacttataatacctgatacaatataaatgctatataaatagttgtcatactgtattttagcattaggagatatacctaatgtaaatgatgggttaatgggtgcagcacaccaacatggcacatgtatacatatgtaacaaacctgcacgttgtgcacatgtaccctagaacttaaagtataataaaaatatatatattttcaatctgctgttggttaaatccatggatgcagaacctgtggatatgcagggctaattgtagatactgttttttccatctgctgaccgagatggttattaagtgactaatgggtgggtaggtgtggatatgctgagcaaaatgatgattcacatctggagtgggacaaagtggaacaatgtgagatttcatcatgttacacagaatgacatgtaatttaaacctcatgaattatttccggaattttccctttactattttcagacctcagttgaccatgggtcctgaaactgtgaaaagggccacaggagataagggggtactgctgtatttatttccaccatcgaatccaaatggcctctttctgtatgcctttggtaattggatattaaatacctggcatgaatcttgtgataatttccaaatagctggggcataccataaagcttttctctgagagctgtgcttctcaaacttcagtgtgttctctggggctaaggatttgctattttttttaaagtctcacatatgacaagatatctacatt

SEQ ID NO: 56985 - DNA, 1025 bp, Homo sapiens
catttttatgctttttttgccccctaggcaagaaaaatctcgttgggaagtcctccaacaagaacaacggctaatggaagagaaaaataaacgtaaaaaagctcttttggctaaagctattgcagaaaggtgaggcacctgaaccaggagaggctgtttgtaacctgtaaccagttgtgtcatgtgttatatttgttttcccatgtctcttttaataaactgatattttttcttcaaccattacttttaagactaactaaacaaattatgctttataagtgatactgaaatactagttataatttattaaagagaactttttaagcatagagcatattaaatttgtaaatatagttgcagttttaaagaccttcattagtgctcccagttttaaccatctacacattcataagggaagcagtaaatagctatcagtatatgtaaattagcaacaaatgcaagttttaatttttatgtggggaggccttaatcatttgatgtgtagaggaataaggttttctacataagtgacatactcccatgaatcttaattggatttcctatgggcatttttcttaaataatttgccccgcctccacaagtagaagatacatgatatagtttaactttttattgatgactcagggtcattattatgagcactgtgtgagattcaatttttctttcaccttccagtgtctatcagcagccccttcacatttactgcattgtaccagccgcacacaacaacattcccattggaatcattcttcccatcccccaccactcttgctgagtttgtagtttctgtctaatctcctgtggccttaggaaactaaacttagtcaatatatccatggttgtgaatagtgaaaactaaatgcaaggaagtacattttctttttagacttccagaaaagtctgtcaaactgttactgcttgaagctagagtatgtgtaggggcaggagaagagggaagaaggtgatgggtataagagtagttcagaattttgtctgccagagga

SEQ ID NO: 56986 - DNA, 2072 bp, Homo sapiens
tagtagtcttcaatttctaagagatgggaaggctgttttctgtggttttacaaaaagatgtacaggctcagcagttcttctcataagtgcttttgattttagacagcaccagtataaacagaagtgtaaggaaatacaacgtttgaactattaataaatggacaatgaagtacttgacgtaaaagaatcatactgttaagtgaagttttgtaggcagaaaggaagggtaaatgcctaagagtagaaatcaagagaatgtgctatgtaacatggtggatttatgtggggatttttcttcttccttcacaatgtgtgtgaaaatttgaaatgagtgaaatcatgattaaagggttgcttttttatttgtttgttccctttcttaagtatatattgtacttgggagaggggattgagaaattatgaggttggatgtgcttttaaataaggaaaatgagtgttttgatgttcagctccataaagaattttcgtaactagtagttttcctagagaacaagaatcaaagcaataaaagtttggggaaatgggtcccaagaaagttaaaactaagtggatgttctcagatatataaagaggtgtggtttagtatagacatctatctgttcttaatgtcaggtaagtatcagacaaatgaaaatgggcttagcaagaggaagaattaaagactagaaatttggaaagctctgttgaatgtttcaatgtaaagggaacacagatatattcttttagtgtttgttctctttacagaatgaatatcaatctaaaatgaactatttgctgagtttttttagacttatttgttactttatgaaacatgcaaatataaaatttcaaaaactcaaatgttaaccagcttttactttatttcaatttttctgatttttttctaacttttaaaatataaattataaatgtatatgcagtatcttgctttttcacttacattgtatatggacacatggttttaaaatgttcttattttcccactcacatacctgattttctagatccaaaagaactcaggcagagaccatgaaactaaagcggatccagaaggagttgcaggctttagatgacatggtgtcagctgacattggaattctcaggaaccggattgatcaggccagcttagactattcatacgctcggtgagttggggaaattgaatctgaacaaggagtatgatttaattaatgtttattgccagctgttccaggggcttttatgtatatcatcattgaagcctcaaaacaaccccattcagtgctgtatttattcttcttttgtgctaattcaagtgtctcctcttcagtgaagtcttccttaactctgccctactagttaaccttgttcgtgtgccattagagcagttcttgcattatttatttacgttttagtctttgctgcgaaaccctcagctatttaatgtttggaagtgtttttgctcatctttcagcatctagcaaagtaaatatctgagtggtttcgccaaaactgttactctgacaccaagtctgtgttctttccattaaaatttttgatatctgatatagtcctataggattgaagtctagtcctcactttagctttcatcagagtaagaggatctagtttagtttttaaaagcttatgaatattttaagcatatcctctgtcttggaaatttgaaatattttctctttttttttcctttcaattatactctgtatgaaatggtttaatatatgtttccttggtttcaaccattggcattttttaaaagagaaaaaataccatggagtatttttaaaatgaactaacacatgtaatgaattacatggactttgcagacagataaaagggcaaaaaaatatgtccaatttcagggttttcagccctttcaacattgctttaatcatcctggtttgtcttttttcacaagggaatgctgtgttaatgactcagttttctatcttactctgttacactagaaatgaatcagaatgcctcattaggccagggtaaaccacaacatcagaatgtttatataacaatttattaaagcggaaatgctt

SEQ ID NO: 56987 - DNA, 1003 bp, Homo sapiens
ggtctcaaactcctgacctcaggtgatcctcctcagcatcccaaaatgctgggattacaggcgtgagccccctcgcccagcctcgttttattttatagtgaagaatttgagagccaaagatttcagtagcagcttggccagctggctcatttgaaatttaaagtgctagtaaagttgcagttccatattccaggtgtgtcacttacatatttcaggctgtgaagttcactgcactgcatccctccacttgcaaattttgctctataacccgttgaggaagagtgtgtgtgtgtgtgtgtgtgtgtgtgtgtgagagagagagagagagagagagagagagagggagagggagagaaaagtgctttcaaatgtggctgtaaaaggtccactgaacccattattttgaaaaaatgttatcttgcttggctttcccagggtggtatcagagtgctcaggtgatgatataagtgacaaaatcatattgcatcagttttatacaaaggcagctgtatcccatctgtgggaggaacaagagcaaatgaatgagaagtgagggttcattggtatgaagaccatatgcactggcttttccgggatcgccctgacacagacatatttaaaataaaatacagtacatttgaagggctttgatatataaattcacaaatacacaataattgttaatttctgtgaaggaaattactggctcaaaattactgccatgagtttattgcagcattttatagagctgtccctccttgggttaaactactctccttgcttccacttctcaaattgttagagcaaaggtgtatcaggattcctaatgatgtgaaaagtaacctaggggccacctcctttgtgttatctcacttgttctatttaaaagacaatctttaccaaattgtagtaattctcacttaaagtatacatttacttgggtaaacttaaattcctgaatagaggggtttttatactttgattttctattcctttctttagg

SEQ ID NO: 56988 - DNA, 1032 bp, Homo sapiens
gtgatattattgcaggggaatgataattagacctttagaaatccaaaggggctctcttgctctcttccctctctcatttctcttctctctttctctctctctctctctcccttcctccctccctccctccctctctccctccctctctcttgttccctccctctccctttctctctaactctgatgttggcaaagggggttttcttaatcagactgttttttggtcccagggaaaggaggaagaaggagattgtgatggagaaagggggtctgtgaaacgtcaggcacagcacaaaggctttgccacgtaattacaggctcctattaagtcgagatctgccctcccaggggtctccaattttcttgtattccctacaaagcctcctctgcatgccagtttgtgccttttgaagtgccagagagcttcttgatccaactgagaaggaaaaaggagcccagcaagaagagggggagagagagaaggggaaaggggggaacccaccagcaccctccgtcggactcttgaagccttttttttttaattcttaatttttttttttactctttacaaaaagtaaagtgagaatcctgctctctaatacatctgcaagacatcaccctctcctcctgaaactttagtcactcctgagaatccacaggagtgcagagaggggggaacacgttttcttgaagatgttttaaagctggaacaagccttcttctgttggtgcttgaactcttgcctgggaataacttttttaacctttaaaaaaaccattcactttgattcttctctcccaccccttcttctctcttcttctgtttgcctaactcccccgccctgctggcctccgctttcctctctcccccttgttattatttttagtctgtgcgtgtggacacttttggagagttggaagggatttttttctcctgacttgaacatagggtgactttttaatattgtattttactgtggattatctctttggaccgcgccggacttggcctcaggaaatcaaccaatgctgc

SEQ ID NO: 56989 - DNA, 1068 bp, Homo sapiens
attcattaatacttgccaactgattttagacaaatctctgtgtctcaatttcctcatctataaaactggcacattaatatttatcacgcagatttgttatttggaataataaaatgatgtaagcaaaatgcctagtaccctactcaaataaatgctttattataaattgttataaatgccctttagggcaagcatttatttgagtgccttcagtgggaatggtagtagggtactgggcattttgcttacattatttccaccccacagcatctctgactagtatgacttatttcaggcatggatatatgtccactgtggcttcccaaacaatgttggaggccatttagtgccattgaaattaggaatatttgcatattccaaaagccatactcttacagcatgtcacttattgagtctatttgttttctatctacaattagaaactgatgcctcataactttcagtgatacttataccgccacaccatgagtatctggaagagccaggagtttggctcagaagttgctgactatggttatcacctttaggtcacccttcctctctcagcgtgaaacaataacacagatcattttatatttttggatggcaccaatattaaagattttacagggatttaagatgttacagtgattgaagaagacaaatcccctttcctctagtttctgaattttatagagactctatgacatatgcttgggacacaaggtgttaaggtttcttattccagacctgacatagctagtaaatttctggaggccaaccacgttaatttctctctgtcctatagtgcctctaacatagcactgccttactgctccactgagatttctgtgggtttacttaactttttgtacatgaataatgctcaccatgttaactataattatacataaagttgccattcttttgccaacttagatttcctaaaccagttgagtaagatacacattctgtcctccatttgatatgtgacctgttttcatacatattttcctttgaaatctgataagcctggaagacatacagatggcacttctatatcatgaa

SEQ ID NO: 56990 - DNA, 1080 bp, Homo sapiens
gagatagacatatgaaccctaaatcagctgcatgttatggcttctgcgatggagtcaggatcaaggcaggatatagaagggtcacaaggatgaacttgtcagctcagtgggtaaagaaaaacatcatgggagatatgaactataagctgaatagtggcagatgagtagatattcatcacttagaatagacttggagagagaagttataataatcaattttgctcctttgaacccttcaggtgtgtgtggtgcgtatgagaaagtcagttggatcttagcatttatttataataatattcataagcacaatctatagctaacattaccagcctagtttttgaatttgaaaatgtgagaaaataagtgtttggtaaaattcaacttccctgcttcctcctatatatgagaatttgtgtgataagaataattataatataaattagactttaagtattcaaatgtttttattgggtcagggcagattaaatatgtgccacctgaattatgtaccagagaggccctggaactgtgactctgggaaaggtatcagtaaaattaaatttagaagatattcagagagatggatatttcagaaaatgtaagagactacagagagaacagcaagttagctcgatgcagtctttgctgtgagcatcaaaataaggaaatgcatgaactggtcagacatagtccatcagaaaaggcttgattccaaagagaaggtactcgtggttttatctagacagacaaaaagaggcttgagaggataatgtaatgaaaagatgcttgacaaaatttagggatggataatacactaatttgtgtttttgaaagctatcgagagagcaaggtaatgtagcctttcaagtgagggccatattttattcaccactgtttttccagtgccaatcatagacctggaaaatggttgtgcaaaaggtatttgttgaatgaataaatgaaagaaataaagcagatgggttgcatgtttgcaaccaaagagtggattaaaaaatgtttattagccaaccagagagtgaaatataaagtaatgtcttttagaaactgttgatggattta

SEQ ID NO: 56991 - DNA, 1794 bp, Homo sapiens
agcagaactaaaatattgggaccatggcagagaaaagcaggagaggagcaaaatgaaaattagttaacaaatgttcctcctccctctgggataccaccaccacttgtttctgtgtgtgtttattttgtttttctttcattcatgctttgcttaatgtactccaggcttcttcagataggttcagcccacccacccccatgattgtatgaagttttaaaaaaaactacagcagccaaagaaactatatatatatatatatatatatatatccagaatgattgcctctactgtcctcattgacttgtttgaaccttagtgccttaccctgtcctcttcccagttctctttatagaagctctaggagctttcgaaaagccaaagtctttctgaagaatctgtgctggacagacataattccctttctcattgtctccatctttgttggtcatggtaaggtttttccatcagcctctgaaaaaatagttgtgcacaacatctgctcactggactgtctgatccaatgtaattggctgcgtctggctaattctaagcactaaagtctacatctaagctatagatttaagcttgaagctacagattatatcactatcaccaccacccctcaccctatgcaatcaatcaatcaatcatcttaagttaaagatatttgttgtctttgaatgatttgctgtcacagactatttggtagaagaaatatttttcacctgagagaggaagagaaatttctctagtaacacaaagagtgagttctaaaaggcatgcccacatctctttcgtgccttaaggatagtgagatgcacacttatatatatactgtatatatttatatatttatatatatatttcatatatatatataatattgcaagcttaagtttgcaatttcccaaacaatacaaaaagcaaattacacaccctcaccactgttcttatctctatagtgatgaaacattaattagggatcttgctgcttttctttttctacacgaagttttcattaaagccacagaataattgatagggcagctgtttgagaacaggtcccattttcacattagggctttaaatgaattagaaactatttgaggctataaaaatgtccttgagtttggagcctgagctctggtgaaatgctgatacatctgatctatcatgggaattgcagttagagagagtaaggaataccatttagtcatctatccgttcttcacttagcaggaatatgaaagaaaggcacatgtttaagaggaatacctaaaggtttttctaaattccaacatttaaaaggcaattgtgggctatttttattttttaatattttgaaataaagtttagtgtctagggctgggagccaggactgatcttccatttctttttctttgttcccagccatgcttttgtaacttgccaggtggacttgaccaactacattaccatgctgtgcctcagtttacccatttgtaaaatgggattaataatacttacctacctcacaggggtgttgtgaggctctattcatttgctcctttattctttcctgtattctctgtatgtccagcactttgtagccatgggaggaaagggactataaaagtgtacaatgttaatggaatgatacggtacctgaaagccttgttttctagtaagaaaatgctaccttgctgtacatacttataaccttgtatttggaaatgagaaataggtttatattttcagatctctcaaaaatcacatcatttgaccaaagaataatttaagacacatagaacagat

SEQ ID NO: 56992 - DNA, 1053 bp, Homo sapiens
aatctaacagccaccaatctgaaattgtatttcaaatgttgattctgtagttctttaaataataatgaagctcatcttatacattttgctttcaccaattgattccttcttcttttagcccactattaaaacatttcttactgaatggttcatgtaggcttgctgaacagcacgcattacttgcttcctgaagagttcccccattcatccatttgtcccattagttgctgtggattatcaagttttgaaggaactgtacatcccaacagactgaaacattctaagtgaaatgagtataatccaagtaactggtgaactttggaggtttggagcttgaagagaatggctaagaagatttgaattatagggagggaacagaaatcatacatgaaaaggttttactgagaaggggaaaaccttagatagagggacatgtgaaacaaaatcatttgaaattttgattcagacatccatttccagtggcaaacagcaaagcctgaacccataaacccaaatgataggtgaagttgggtggttttatccaatgtctcaagcaagcaatgtctgggaatatcatagagtaacaagtgctggtcagccaaagaaacattcactgctggtgaaccaataccataagcatgtattatctaagcacttgatcaagaaatatacatgttgtacaagctctcaattttgttcatttattatcaaatttttaaaatacaagtttggtatgtgatttggaaaagatgccttctggatcttaagccagttgtcagtggaggtcctcagggctgcaaatgtcaagacataaccctgttcctcaccatcatgataccagatacaggtgaatacataggaactatctgcctgtgtcctcaatctcccttcaaacaagatgctgatttgtagggtacttggcaggttaaattaaaccagaagaggtgacttaataaaaaagggaatgacatttagggtataaagatctcataagaaatgtaatatgtaaattatatcttgctttatgttgtaaaatatacattgtttgcgcta

SEQ ID NO: 56993 - DNA, 1649 bp, Homo sapiens
aattagaaacttaaaaagtgctctcagcagcccatgctactctgttcctcacactagttttactttcactctctgtgataacttttcaatacaccaagacttctcagcttgccccaaattcactgagacatactggcgaactgctggttcaaccatttacacatccacccaccagacataagagtgctcatttcactgaggcttattatcaacttgtaaacgtggtcaattcaagacttcttagaaaggtctcaggtccaagctttgtcctgaaaagataattctgattgcagaaactccctccgtccagcaggaagcgccagcaccctctgtcggggttgggccgccacggaggcttcacgtgatccggccgtctctgcgcaggagtgtggtcttgcggagatttgacctacgtacttagcgtcatgacgtagtacgtaggggctggctagccgccatcttgcttctttttctcgctcgctcgctccccctcggaaagctgcgaaagtgctttggcggtttgtccatccgcagcttcggcttttccagtctggtggcccttccggccacccctttaaccccagctttccctcccccttctttcgatcagagatcggcggagaccctcgaagtgcgcaaacttgacactcaccctgaccggtaaggaaagcgagggtgtgggggccgcgatcaaagagggccccatcgggaacggccagagtgcggcctggggcgtgggagcgcacccagaccctggcgcccggaggctagggggccgcgtggagagggccttgggtccgggcatttcccttctgtttggttaccatcatctctgtgtctggggaagtcggcctccagcttggggagcgggaaaccggagtcagacccgccccatgtggtctgcagcgggagttctggaccggtctgtcttgctcccacctagaccccagtcctggccctgcgaggggattacgcatgttgccgggtaagcgaagggggtttccgtcttcctggactggcggacgtgaagtcttttttttttttttttttttttagtgtcgggtatgcgtttccccaaacaactgaaggactcagccggggctttcactgtctacctcttcctgtgtagtgagggtgggacttgcaatgagcaatgtatgggagggtctggtttaaagacctggttagatgagaggctcttcggggaatcaagaccaaccctacttccgctagggaagtgctgcccaactccggaggaggatttgggtagtcttttcacactctaggccgctccatcctctaacttgcgtggtgaatctcggtagctccctgtctttgagatagcgttgatattggtggtgtcagggtaaaggccccgttttaggactgaagaaaagggcatggggccactatagagacattgatagagtcttccttcctttgcatgagaggagtacctttaatttaaagggatgtatgtgtgttttgacattatttgggatcttttgagggtctgacatgcctgatgtttgctggcttataaagctacctggatttccgcattggctggttttcagcctgggttcatagattcatacctcgttagagtacttagaattgtacagtaggcggctctgctgtaagatttt

SEQ ID NO: 56994 - DNA, 2111 bp, Homo sapiens
taatagggtgatactaagcacctaccaagcctaaccccaccatttttcaaaactagatttcacctcccatattggtaattaagatgctgctttgactggagccatttttaggtgtgtgtcacagatgcactgcagcatcttttctggctcaccccaaatgcattgatcccctaaaaaattaggaataaattgaacttgaattttgtctttagcatgtagtcaaatagtaattctctccttttctgtaagtggattttcagaatatagcctttttaagtgattgtgtttgctctgcttagcttatgtgtggctgttctccattaggtgaccttttgctatacactgagcacagtaataagtccttttcatacattttttttttaatctccacaacagacctttgagaaaagtgctattaagatcatccccattttacagatgaggaaatgaaatctgagagagtagtctgaccaaggtcacatagcagttattggtggtattgtgtaggttcaattccatactgtctgaacccaaaggggatgctctaaaccttcaacctgctttttaaattataaactacagtaactaaataagataaagcattattaactagtagtttttctttagcttgactagtatatgaatattgttgcatgctaaggttaaagttttgaaagttgtaaaaatggaatatatccactttggacttggggtagaggctaatttttttgtgtccttttctatttgagtgcttagagataacttaaaactaactctaccatgtcgtagatataatttttaaatttaggcgtctgatctatattattggtagaatattccctcatctgtaaaatggtgatgataataggacttccctcagaggcttttataggagtaaaaaaagataatggataatgtatgtaaagggcttattactatgcttagtgcatagtaaaaggtcaactaatagtggagggagaatggtaggatattggtagaagaaaatactctcttccaagcaataaataatctgtaaattctcagggtgatgtatatatttctttaggtacataagaaaatttcacctccccttatccctgatatgtctacttatatgcaggattttgcttcttagcgatttctttatgctctacagtaaatatccctgggatgagtatcttgttcatagctgaaaatgcagaagttctggctcattccagccccctctcttcttcttacccccaccccaccctctttagtgataaaatgtctttgaagattatattatatccctgtctgcctccaagtgccacccctaaacactacttcagtttgttagttaggtaacttgtgttttggatgctatttatgtcatatttgtaaatgacaagaattgatcattggtaaaatgttacataagttagtacagaattgtattcttacagtgaaggacatacaaaaattgtgtctgagttatgacacactttcatttcggtaaatcgtgattttgtcaccttatgaataggacaacacaatgaaagcttatctcagtctatgttaattgttgcttacaagtctgagagttactgtgttagttttatgagtaataacattttaaattcctcgctaatctcatcgatgcatgagccagaacacctttgtggataaaagcgttctatagagagggtaactttagtaaattttctatttaagagacagacctaactctgttgccctggctggcctccaactcctgggctcaagagaatctcctgcctcagcctcccaggtagctgggactagaagtgcctaccattgctcccagcattgccagttacatttctagtccttattttcctccagattatcagaaagcatgttttggggcctgtgactacatgtatttgctggcaaatccagtcaaacaaggactgttacttagtttcaaccggaaatttttatctgattggcagacatgattaactagactcttagactgttaactaagagtctgaacacaagattgtaatgaaattattatgtgaattatagtcagtgtgatatactcatccctgtgtggtgctgctatgtgctcaacattaagggaagat

SEQ ID NO: 56995 - DNA, 1929 bp, Homo sapiens
tttgtgatacaaggataatatccatttcccctatctcagaggactattgcaaagagtacatttatgtatttctatatatcttctgaatttaatattctttgatattacacaatatcaagacatgagtcttgaccatatttaaagcagaaaagagaaccacgaaaagggaaaattaaagataaaggggaagatacgttccctataaggttggaagatcccttctgaataaatcttgagtctgaaggataagagatggatacatgtatgtggttggagaatgggtatctagataagttaataattcattttttcttccctgtttgccagtgaacaatctgaaggtacagggctgctatatatggttatgcagcttgtatactgcccaaagatgctggactgaaggaagcaacaagtcagcctgtgttctgcttacagagtcctgtgccccagcttaggcctcgcagagggaactgtgcctccacttctctctccaaggcatcagctccttgccaaaagtgtctgtatttccccagaaggatgtatttttcctagttacataaaggccctatggagagcaatggatgctctgaaagactccttaaggagacatattaaggatacatttagaacaacatcaaaaacaattgggaaattggagaaatggtcactaaggaacaaaaagctttgaactttttgctgagatgggttaggtggttgggcaagtacagaattctcatttatccagtgtactttaaagatctgtattgtagcttattaaatatttttattaatcaagaaactatattaaatatcatagtttatcatatttcaaagaagagtgataagagtaaaacaatacttaacacaatttaatcttacccaaaaactttgtaattttggggtttaaattaaaatttagatttttggtcatgtggctggtagttttatatataagtaactttttaatgttaggttttataattaaagctatataaattttatagctcttaattgaagaagcacaatagggaaggtacacagttacttctgaaggttaggaaaatggaacagtggcattttattttgaaaacagaggacattgaaaacaaaggaggctttagacaggtgaattttaagtttatatttggaaatttgatttgtggtgtacagttctttaagttttagtacgtatggatttttgtagcccccacaactaggatacagaatgtagaaagataaaacatctcccaactgtagaactagagtcttctggcattttggagacagggaaattctcttgaagaaataactattaaagagggatggaaaaagccaagaatggcctacccatgctgaatgatttgttttctgattagaaagaaaaaatattttgattatactgttatatttatgacaaacttgaacatagaaagaatgaaagtaggagaaagaaaaagaaggagttgggtgttgtggcatgtgcctgtggtcttagctacttggaaggctgaggtggaaggatctcttgagcccaggagttgtggagggtagcgcactgtgttctacatatggactgagtgtctgcactaaattcagcatcaatagggtgtcctgggagtgggggactaacaggttgcctgaggaggggtgaactggtccaggttggcaacagagcaggttaaaactcccatgctgatcagtagtgggatagccattgcactccggcctggacaacattaaggtgaccctgtttcttattaaaagcaagagggtaggggaatttttttaattttatttatttatttatttatttatttatttagagacagagtctctctctgtcgcccaggctggaggcagtggtgcgatcttggctcactgcaacctctgcctcccaggttcaagcaattcttctgcctcagcagcccg

SEQ ID NO: 56996 - DNA, 1106 bp, Homo sapiens
tattttctagatgcatacctcatggcatgttagttacattttgtgctttagcaaaattacacgtcatttcacagctctttgggttatttggcaaattgttaaagtaatgctataagttttagtttaatgtaacttactcacttatggataaactgaacagtttttcctttgcattcagtcgtttgttaatgtttgtcttcatgaagcctggagttgagcataatactctaaacatactgtgacaaacataaaattcagtggaactgttatgactccaaatctgtgcattagatttctattaaaattttataaagcagtattgtcacactactagctgtcacagctagaacctttttcacatgacagtctgggtctgtattctgcatttatgaaatccagtttctgaactgttaatatgactgtataactaattgtttaattctgcctagcattctaagacctttaaaaatcttggtcatggaatacattggtactccttcagatgtatatattatttcatatgccatgtttactttccaagtctttattcaagttattgacatggaaaaggacagggtccaacatatccaggccaaattatttcatattgaccacattcttttaaatataaaatgattttctacttcaaacattgtgtgattctcatttgtattaagtttatttaaggagaagtatgtaaatgactagtactttcagtagtcttaaaaaatcaagtggattgagggaaggaagtgactaaatttttttaaggtttatattttgtggatgctgattcacttggaactaggagtgtggtgaatatttgggcttttttattttaaatgggcaatttagttaaaatttgagtgataaaattctggtttttgaagttaatgcatcagtctcccctcatcatagttcaggctgccataacaaaatagtatagactggatggcttaaaaaacagaaatttatttctgacagttttggaggctggaagtctgagatcagggtgccagcatagtagttctggtgagggctcttcctagcttgcacacagccaccttctgactgtattctctaatggagaagagagcaagctctgg

SEQ ID NO: 56997 - DNA, 1080 bp, Homo sapiens
gagaacatagaacgttgtttctgttctaaactgttaaagttaatagagctttgttgggcacatactgcctgatgatgatacagggatgtaatatgtaggggaatgaagatgttgtcctgtcatttggattccatgtgcataggttgatgtgtcagtcatttcaagcatattaaattggataatatatctttttaaaatagacagtctcagtgggttcactgtgttttaactattcacgacagcatggaattataacccttattctctatgatagagttaagcagttataaccatatataactgatatgtttcacaagtgcatgatagcttattgtgatcaattttgttgtgtattggttattggaatttgacagttaaaaagttctatgaaattatcattgatatgggaagttttttcagaatttctgtgaacatttgaatttactgagtttttcatccttatttttctttcttatgtacatcttaaggactggggttttaaggggtgtggcaggaggttttggactcgatgagtttccaccgaaatgtcggagaagtcaggccagagcacaaaagcaaaggatgggaaaaagtatgcaacactcagtttatttaatacttacaaggggaaatcattagaaacacagaaaaccacaggtgagtaaaatcaagtgacacttatgtttttcatggtttgttttgttactataagtgatacacctgctgctatgagaagctaggatgtacccaagttaatacaatgctatttacatttgcgtttttatgcatgcacacatttttcagaggatatgtgataaacatcttataattgaaaatttatactttcatagagccctttaaaaatatttttgtttttctctgttgtcagcagaaaaaaggtagaactgtgtggctctaaaggggaaactcagtcaatgagattgataggcacagacctatatattagtgggaatttagtatctttttaattatagactagagaaagtcttatgtttcgtgtgtgggggtgtgtgtgtgtgtgtgttagatactgtgacctagtgaatatagtgaaaactg

SEQ ID NO: 56998 - DNA, 3338 bp, Homo sapiens
attacagagtcttggaaaagtcggtatttcacggcgtatgcctccacctgctaacctcccaagtcttaaagcagaaaacaaaggcaatgatcctaatgtaaacattgtacctaaagatggcacagggtgggcatcaaaacaagagcaacatgaagaagaaaagtgagtcaaagtctgttaaagaatgaagcccttcccctttctttgtagggaacttatgtttgagtacctgctatttgctaagtgttatgctgtctgtattacatattacatattttatactctttaaagtcttttgactatagtaacttttggttaattttccctattaaaagtatttcaatttgtcagggtagaacagatgacagaattgggaatcacaaccttgcttatgtcatagcctttattaggctccccgctttcatactaccaccaactcaggtattccctttccaatatgattaagagttgactccgatacctaaattccatgatactaaggatgtctgtctgccaatttactgtgtatctccagcattgaaactgcctgatgtttcataggtgctcaagtaataatttgtatatactgtagcaagaaagttaggatagaattaatagtgtccatcttagtcatccttctttcaacaactatttagacttctgtatgtcaaggattttgccagactcttagctaattgaatgaccaagcctaaatagtggtaatttaaaaaaaataagacaagccattggatacttgatgttttcttgcctatctcttatcaaaattctatactcctgcctggggagatttatatagtaaatttgactacttctgtagtaatgtatcaaatacgtaaatgcttgttagctgtagtaaaattattttatagtaatgagtcagttataggtatgagtgtcccagaaacacattgcattttgtgagcctcttaactactttcttatttttaagcattacctcattacaagaattgaataaaactgtacaccctttcaaaacaccttttactcatgtgaatgcattaggcaggttgctgttacctctttgaataacagtagtaagtacagtggtgatcctgttgactgccaggtggggagtttgcttagctttagccctcaactaatttcaccagtccagactgtatgtatgtttatactgctatttttaattataagtgttcacttcttcaaaacagatatttggtaactgtgtttaattaaaagtgtgtgtgtatgtgtgtgtgtgtgtgtgtgtgtgtgtgttttaaacaaaatggaaaacaagcaaaactcatctcattgggttattcaaaggtagagatgaaagacgataaaaatagccataattcatttaaaggaatgttgcagagagaaaacatttattggagatttaccaatgaataaacatatagccaaaataatttgtacacaggtttaccttaaatataatattgattttatttaaacatacagtatctgaaataatggattcatatttttttttaagaacaccagaagtgccaccagcacagccaaaacctggggttgcagctcccccagaagtagcacctgctcccaaatcatgggccagtaacaagcaaggtgggcaaggagatggtaagtggacattagttggggaagctgcctaggcttgatagttactgaacagccatgcaggagataaggggtgaactgtgttttggtagagccataaagcattgttaaaggatatactcaaggctcttaaaaaggttttttaaaaaatctcttgggctagctaagttccaatgtcaagagccatgtatgagtcaatgatattggttaaggaaaggagtctttaagataccctgtgccccacatcattttatctttacctctgcatatccaagcaaagcttgtaccttcaaagtatccagccatcgcatagattgttagaaaccatactcatttttcatctatgtccccaacatctcctgtttcagacatgctgccacgattcctgagaggagaagagctagaaagtagccataaagcaccactgctgtaatattcccctttcccccaaggaatgatggaatccccagcagaatttagttttcccactttcgaaacaggaactgtctataaaacattctatggaagaaccaatctgggccctcaagctaacaaaactagctgttttaatttatagaagtacaaaaaataggtagataggaagttgggtgaatagtgaggtgtaataatcttagctgtaaattaaatcaaagtaaagtaaatgaagcaataaattaaataaaggcattttagcctcatcttgatcttggggtctttattcatcaaacactatttcagtaatatgatttgaacgaattctgagaattcttagcagaggaatttgatgtgtattgaaaatgtaaggagtcataatgaaagagaaacaagctcttcacttgcatggtcatcttaaatgagtcctctggaatggtactggtagattactgtcttagactttcatctcctcatggctgatcattagcttttcaaaggagtctaggtgaattttaaagtgatatggctatgaacagtcatcactgaaatgtggaataatttaagagaaagaggcagagagctctatcctgggagggtggtttgtattatcttcagtataaaagttacctttaatgtttttttaaaaaaatctataggaatccaagtgaatagtcagtttcagcaagaatttcccagcctgcaggcagctggggatcaggaaaaaaaagaaaaggaaacaaatgatgacaactatggacctggacccagtttacgtccaccaagtaagagtactttctctttaatacaaaatgagatcatatttgtgtattatcttgcaatacaacctcctgcttgctgttgcatatattatttgcctacttcgaaaaggcagactttgtactatagtcacttgctactcaggtatgatttttgcaccgacagtatcactgtaacttgagaacatgttagaaatgtgtcatcttgggcctcgcatccaacttactaaatcaaaatctacattttaacaagatgtccaggtgactttcatgtataccaatatttggatttttttatactagtttttgagcaggcttccctaatgtgtaactatttacttactactgtattaatattcggtgattcctcactttctgagctcaaactgaggaaacaaataattttggataatgagggatagtttatgtacattacaaagcaaaaactaaaaataaaagtgtaaaatgttcgagggatttttaaatgtcttctta

SEQ ID NO: 56999 - DNA, 1405 bp, Homo sapiens
atgatgagagacagacaccctccacccaagacagaagcccacagtctttaataacttaatctggagagggacatgctatcacttctgccatattctacaggttacacagaccaaccctgctatattgtgagaagggactacacttagtgtaaataccagaagataaagatcatttgggctatccaggagactggttaccatgcagtgtttcttagcaaaaccacctagctgttttatttggttaagtgtaattacaccagataatttcacgcaatctgttcacttgggggcatctgtaactaacaataatatactggaaacagacaaatgagaatatcactgtcaacccttccagattgtagaagtcccatcttccttccctcaggaaacctcaggtgtgtcactctgaaacatggccatctgatatatggagaacagtgattttaatttctataccaaatattgataaagcttcatagagaagttctaatattttcttctcccaccccagtatttgcttgtggtgacaccctctgaggtacatcctctccactttggaagccactactacgcaaacaacttgaaagcattagtaggacctggattagacttttcctgctctttcactctgcttacttgctttcattttcctgaaatacattttggtttcactttgttccattttcagatttttatctttttccttttttctctgccttcatactagatgttgcttgttggagagatggtggtaaggctgctggctcaccttcgtcatctgatcaagatgaaaagctccctggccaggatgaaagcacagctggaacatcagagcaaaatgatatcctcaaagtggtggaaaagaggatagcttgtggtcctccacaggctaaactgaatggacagcaggctgctctcgcttcccagtatagagctatgatgcctccttatgtgagtattgttaaatgaacaagcattcaaacaagtggtttttgatctggggtccaaggagcgaattgttatagggaaaagtttaggtctttgttttcattaacatctaactaaaaattagcattctcttttattgtatggtatattgtgagaagggactacacatggtgtaaacaccagaagatagagatcatttgggctatccgggaaacgttaccacgcagtgtttcttagcagaaacacctagctgttttatttggttaagtgtagttgtaccagataggaaacaaatcagcagtatctttattattaccagggattgcagatattttcatatcacattacattcaacattacttcaaaataattattagacccatagataatgatctaataaagaagcacgtacgttaccataccacagatttattttgtaaatacagagaacaattac

SEQ ID NO: 57000 - DNA, 2101 bp, Homo sapiens
gggggctgtgctaatcttctctgtattgttccaattttgctgccaaagtgagcatatacattactattttttaatcattctagactaacagagggagatgaatgattaaatacaattacttgttaaatgttttttgctctgatgcctaggctggagtgcagtggcaccatctcggctcactgcagcctccacctcccaggttcaagcgattctcccgcctcaaccttccaagtagctgggattacaggggcacgccatcacgcccagctaattcttgtatttttagtagagacagggtttcaccatgttggctgggctagtctcgatctcctgacttgaggtgatccttcctcctcggcctcccaaagtgctgggattacaggcgtgagccaccgtgcctggccattaaacgttttcctaaaagaagtttgggagtatgctgacctggccttgaaaaatgatttatacccaattactttttttctaatcattttcaaattgtgctaccaaagacccctgaactttcatgtgagagggtaggataggaaagaggggaaaccacgtgggcatcattcccactttcatcagtgattatatttgaataaagtgttccactaattaacaaaaacatttaaatatcactactgtatactgagaatttaaaatttgtttctaaaatgaattttctggcaaattcctagattttaagcattttttaagaccacatgaaattatgtctggaatgaccagatgaaggatttaatgcaactttagctatgaacatatgcctccagtagtgtctttattaacttcagtatagaagtgtgatgcaactgaaaattctccagagtatccctcaaagtttccccagctgagtttcagctgttgcttgacttaattaacattgcttcaacctgacttaagagaaatttcttctccttttttttttttttttttttttaataaagacggagtttcgctctgttgccaggctggagtgcagtggtgcgatctcagctcactgcaacctccacctcctgggttcaagtgattgttgtgtctcagcatcctgagttactgggattacaggcacgcccaccacacctagctaatttttttgtatgtttagtagagacagggtttcaccatgttagccaggatggtctccatctcctgacctcgtgatctacccgcttcggcctcccaaagtgctgggattgcaggcatgagccactgcacctggctgagaaatttcttctttagacagcataatcatataaacatagccttacttcaaatgtaagaattttcttatctaacacacagttactacttactttttagaaaaactagtcttctatttcaggatataaattatgtttttacagtaatataatttcctattatttacataatttgacttggatataagcatatagtcaatgaccaagacattctttgacccttcttcccttcaaaatcataggatgaatcccttggtgttatttgttcccagaatctatcttatgtcttctcttaagtttagtttcccagagccaagttcctacagagaacagtatctggacctgtttgggacagtttataatgatcatctgtgcagtaacttgattgagaattcacctatgccatatacatagaaaatttctgggtagctctctgtcccccttttccaactcacttccttggattgtggactgtcttttaattttatctgagctgagttcttccccacgcctgccacccctacatttttctttttgaggtgctggggctggggactgatgttatcctccttatccacaaatctgcctctgattattctactcctgcttatggaggaaggccaacagcatttgcttttcaaatattttcactttgccgtttgctagggtgcatgtgtgtacatatcctgttgatacaattactttaatgtaatttatatcttgttgacacagttactttaatgtaattttacattacatatctcattgatacagttactttaatgtgtacatatcttgttgatagttactttaatgtaattttattaatataatacagaagtttttcatatgtgctc

SEQ ID NO: 57001 - DNA, 1676 bp, Homo sapiens
cttgttaagatttcctgaaggttgagtggattgtgtgattctgagttgtgtaattgatcgttttcctatcctcacagtacagttgtcattagtaaataattggctaactcttataagacagaacagaaataattcattcttttaagcatttaaattaatttacataggattttgaaaactgaaaaccaggccggggacggtggctcacccctgtaatcccagcactttggaaggccgaggtgggcgattcgcctgaggtcaggagttcaaggccagcctggccagcatggtgaaaccctgtttctattaaaaaagtacaaaacaattagtcggacgtggtggcgtgcacctgtaatcccagctactcgggaggctgaggcaggagaattgcttgaacccaggaggcggaagttgcaatgagccgagattgtgccattacactccagcctgagcgacagagcaagactccgtctcaaaacaaaaagaaaactgaaaaacatggccctaaaattgatgacacttgtttttctcttcttcctttcatattatggactccccattttctttctttttttttttttgcttattatatgagacttgaacatcctcttgaattattttcctcaaaatatatattttgaagttagttttattcatatcgttatccttttaacatatttgttttatcttaaatatttgagaattcttaaaaactttgtcagctgttacttaagagttacgtattatcctatcattatgtattaatattaattttttcatacacatgtccatgcagaacatattaggtatcttggtgtagaaaacactaatgttgaaatgaactaaattccaatcttttagtattctcccagtttagtatcataaacttttgtatcttttccatgacctgcctttcattagaggccttcgaggaagaggcccacctccttcatgggcctctgagcctgaacgcccatccattcttagtgcatcagaactgaaggagcttgataaatttgataacctagatgctgaagctgatgaaggttgggcaggtaagaggcaaaattaattaagtcctttaaattgttagatgctttcaagcagccagtctgagttttccttaatttaataggtgctcagatggaagtagattatacagagcaactgaatttcagtgatgatgatgaacaaggaagtaacagtcctaaagagaataacaggtaagttgtgatatcttttactaataacagtatgaatttgttgatacaatattagctacttatgcaaagaagctttgttaatagacaattgtttgttatttgtagaatttatatattctcagaagttttactgaatagagggtgcttaatgagctagattaatacagtatacagctaatcaaggaattaaaatttgatgcgtctcaagaaagtttatttaaaaacatttagggctgggtgcggtggctcacatctgtaatcccagcactttgggaggccgaggcaggcagatcacttgaggtcaggagttcgagaccagcttggccaacatggtgaaaccccatctctactaaaaatacaaaaattatccaggcgtggtggtgcatgcctgtaatcccagctactcaggaggctaaggcaggagaatcacttgaatccgggaggcggaggttg

SEQ ID NO: 57002 - DNA, 2092 bp, Homo sapiens
atatttggtttttcagcttatctctgagctgtggatgaagaaactcagcacaagagagatgaagtaatttgcatatgatggcactattagtaaatggtagtctgcattcatttaaaaagatagtcaagtgttttcgttgtgtcattgtttaatctttttataagcattccagctgggttacatatggctcttaagatttcttcaccctagtagcttttaaaatcaatatgttaaaaacatttttttaattacttttattgtttttgcatagttgcaagcagtgattttaaaacctgtcattgttttataacacattaatgaaaatttagtcattgaaacttggatgtttcagatgatcctccgattctccactccgggttctagatacgcttttctggatctttcagtctaaagatagaacttttcttcacccagactaatttgtaggaatttcttctcctttggggtatcattacagcactgactctgtctttttcactttgcttctttggctctgtgctttttacctgtagctgtaccttaattttctcagggctcacatgccatcattttggatatttaataccttcatttctctcccttagacattccaactctggcagctgcttctaaagtatccatgctaaatttcctttgtctctaaatttagattttgagattcactgttgtgcttctagttttattcagcaaatactgaatgagcaacaacgtctggcacaataataggtacatactcagtaaacattggaccgctggattaattattctggtcttagtttggtgaattatctagatgtaatatatttcccatcttatgtgttttcattttaatgtgtatgttcatcagagaaatttctgatatttttgtggggtttttccttctccatgcctgatacccagtgttagtcagaaatagagttgtcataactcatctgataccttaatgtttcagcatccacctccagatcgacaggcagtacctggaagaccaggcccctttccctccaagcagcaagtagctgatgaagatgaaatatggaagcaaagacgaagacaacaatcagaaatttctgcagcagtagaacgtgctcgtaaacggcgtgaagaggaagagcgaagaatggaagaacaaaggaaggcagcttgtgcggagaaactgaaacgattggatgagaagcttggcatcctggaaaaacaaccatctccagaggaaattagggaaagggagcgagaaaaagaacgggagcgtgagaaagaacttgaaaaagaacaagaacaggagcgagagaaggagagggaaaaagacagagagagacagcaggaaaaggagaaagagctggagaaggagcaggaaaaacaaagagaaatggagaaagaaagaaagcaagaaaaagaaaaagaactagaacggcagaaagaaaaggaaaaagaactacaaaagatgaaagaacaagaaaaggaatgtgagctggagaaggaaagggaaaaattagaggagaaaattgaacccagagaacctaatttagagcccatggtagaaaaacaagaaagtgaaaacagctgtaataaaggtttgatagtattcttcattctcttttaaaaactttacaaagagctttatgttggttacagtttggggtttgtatattttaaatatatgtaatcaatataaaagtgattgttttatgatagcatttgcagtacaaaatatgggctagagccgtgttttctaattctgtatatgaacagacgtctctgaagtgtttctcagttattagatgagcttcatttctgttttatctgcagaattgtattggcttcatagtcacatatactgattctccccctgcttttttctgactccaagacatttaactaaacaaaatctcatttgttcacatgcattaatacctctaaaactgaactggcatagagcttaatgagtatgttggattatcataattaaatgactgcacctagttcataatttcaggtttgctgtttaatcagtttaaacatgcaagcttccatggtgtagttgatatgctattaaactgtaatttcctggagt

SEQ ID NO: 57003 - DNA, 1012 bp, Homo sapiens
ctagtgatcactctgttgtcttcagacttaaactcattagttttccttacagataatagtccctttacccaataaataactaaataaaccaacatgctctctttttaagtatttataggccatttgtgttttcatgtagattttaatgaactaccagtaaatactgacaattacattgatgtttattgaaacaaataaaaaatatgtggagttggaaatgtttcattatttaaaaaaaaaaaacatagattttatatgatgaagcatttggatctctgctctccatctctaagaatgcagcttttaggaaatctaaggttttgataatctaatgttacctcattgataactaccaatgttaaagtagaaaataatgttttagagtgtcgaggatattttcttcctcattaacttttattatacctcagtctttgtaaaaatcctgtgtttgataagtgtcatagatgaatactattacctttcaccttttctttgagcagaggaggaacccgttttcactagacaagacagcaatcgcagtgaaaaggaagccacaccagtggtgcatgaaacagaaccagaatcagggtctcaacctcggccggctgtattatctggctatttcaaacagtttcagaagtctttacctccacgattccagcggcagcaggtaatgataaaaatattttatcatgtatgtgtgattgaagtggtttattatgcagtagtctgggaaattagacataaaactgataatacgtaaagcacacaaagttcccttgaaattatttttccttgtaaataaaagttaacgtgggttttaccttgaccttctgtgtcattccttttgatcttctgcctcatttatagacaccatcttccatttctaggagatagatcatacagtgcttgagtataaggtaaaatgttatagttcatctttcagttttttgtcttgccaactcttaactgttaaataccttttgaactcttacttttccttcaaggattc

SEQ ID NO: 57004 - DNA, 1128 bp, Homo sapiens
tgaccaactaaggtaggttaatggaatttaggaaagaattttctctgaaagttatcatagtataattttcatgatgtttgtattgacatccagagtcacagtacttggtgtctgatttttatatgcataatattttctttcttttgaagtaaaacaggctgctattgtgattttgcttattttgcttcctcagttcttaaatgcaatttttatttaacagcagtaataaaattccattcacagaacaacccttacataatttccaccaatcttttactcaggaaaaaaatgcttttaatatggagaattccacctaacaattaataacctgtattctatgtctatcatggttttgtttcgttcatttttcaaaatcctcatttcacctttttctgaacttttgttacaggaatgattcctcctaaaccattaatgagaagagaccagatggaagggtcaccgaacagttctgagtcatttgagcatatagctcgatctgcaagagatcacgcaatttccctttctgagcctcgtatgctgtgggggtcagatccctatcctcatgctgagcctcaacaagcaactactcccaaagcaacagaagagcctgaggatgtaaggtaataaattatttcaatttaatagatgatacagaatattttggtaaaaggaaaactgtgtagtgtttctgaagatcattccaatttaggactgaagcataaatctggtttccttctatttaatttagcatgctacgcttactctttggacatattctctgtattcattagggcattttgtaacctggttctgtactcaattgtatgctgtaatttagtattagatgttgaaattggtaggttcttttttgagataggaacttgctctgttattcaggctggagtgcgttggtatgatcttggctcactgcagcgttcacctcccaggctcaagtgatcggcttacctcagcttcctgagtggctgagactacatgcgttcaccaccacaccccgctaatctttgtggggttttttgttttgtttttgtttttgtttttgtttttgagacagagtcttgctctgtctcccaggctggagtgcagtggcgcgatctcagctcactgcaa

SEQ ID NO: 57005 - DNA, 3743 bp, Homo sapiens
ttatttttaattgtggcagaaaccacttagaacattagatatatcctcttaacaaaaatttaatcatatggtaccatgtagttaactgtaagcagtgttatacagcaaatctccagaacttttttttatcttgcatgactgaaactttatacctatttcctattcttacctttacctatatttcctatatttacctttacctatatttcctatattatacctatacctatatttcctatttccccctactcctagcccctggcagccaccattatggtttctgctttgatgaagttgattatttcatgttcctcatgtaagatatttgtcctgactgactgacttcacttaagcataatgtcctcagggtttatccatgttgtagcatatgacactatttccttcttttttatccctgaataatattctattgtatgtgtataccacattttctttatccattcagctattggatatttaggctgtttccacctcttggctattgtgagtaattctcctctaaactttttatatagcgagagaaagattctcattatggttaagagtcattgctttctgttttagagggattattttgctatatacttacgcatgggaaagattgctttgttgattatacctttgaattcttatcatcataggtctgaagctgcgttggaccaggaacagattactgctgcttattctgtagaacataatcaattagaggctcacccaaaggcagactttatcagagaatcaagtgaggcacaagtacaaaagtttttaagcagatctgtggaagatgttagacctcaccatactgatgcaaataatcagtctgcttgttttgaagcacctgatcaaaagaccttatccgctcctcaagaggagcggatttcagctgtagaaagtcagccttcccggaaaagaagtgtttcccatggatctaaccatacgcaaaaaccagacgagcagagaagtgaaccatctgcaggcattcctaaagtaaccagcagatgcattgattcaaaagaaccaatagaaaggccagaggagaaaccaaaaaaggaaggctttatacgatcttctgaaggaccaaaacctgaaaaagtatataaatctaaatcagaaactcgttggggcccacgaccaagctctaacagaagggaagaagttaatgatagacctgtgagaagatcaggtcccattaaaaaacctgtacttagagatatgaaagaggaacgggaacagaggaaggagaaagaaggagaaaaggccgaaaaggtcactgaaaaagtagttgtaaagcctgaaaagacggaaaagaaggatcttcctcctcccccaccaccacctcagccaccagcaccaattcagccacagtcagttccaccaccaattcaaccagaagcagagaaatttccttcaacagaaactgcaactttggctcaaaaaccatctcaggatactgagaagcctctggaacctgtgagtactgttcaggtagagcctgcagttaagactgtaaaccaacagactatggcagcaccagtagtcaaagaagaaaaacaacctgagaaagtcatcagcaaagaccttgttatagagaggcctcgaccagattcaagaccagcagttaaaaaagaatcaactttgcctcccaggacctattggaaagaagctagagagagagattggtttccagatcaaggatacagaggtcgaggccgaggtgaatattactccagaggtcgaagctatagaggttcttatggagggcgtggcaggggtggtaggggacacactcgagattatcctcagtatagagacaataagccaagagcagagcatataccctcagggcctctcagacagcgagaagaaagtgaaacacggagtgagagctctgattttgaagttgtccccaaaagaagacgacagcggggttcagagactgacacagacagtgaaattcatgaaagtgcaagtgacaaggacagtttaagtaaaggcaaacttcccaaaagagaggaacggcctgaaaacaaaaaacctgtaaagcctcattcttctttcaagcctgataatcatgttcgaatagataatagactgctagaaaagccttatgtaagggatgacgataaagctaaaccaggctttcttcctaaaggagagcctacaaggagaggcagagggggaacattcaggcgtggtggaagggatcctggaggccgtccatcacgcccttccactttacgaagaccagcttatcgggacaatcagtggaacccaaggcagtcagaagttcctaaaccagaagatggagagccgccaagaagacatgagcagtttattcctatagcagcagataaacgacctccaaaatttgagcgaaaatttgacccagctagagaaaggcctcgaaggcagcgtcctactcgaccaccaaggcaagacaagccacctcgatttagacggctaagagagagggaggctgcttcaaaatcaaatgaggtggtagcagtgcccacaaatggcacagttaataatgtggctcaagaaccagttaatactcttggggatatttccgggaataagacaccagatttatctaatcagaactcttcagatcaggcaaatgaagaatgggaaacagcttctgaaagcagtgatttcaatgagaggcgagagagggatgaaaaaaaaaatgctgacttgaatgcacaaacagttgtaaaggttggagagaatgttctacctccaaagagggaaattgcaaagagaagtttttctagtcagagaccagtagatcgtcagaatcgacgtggcaacaatggtccacccaaatcaggaaggaatttctcaggtcctagaaatgaaaggagaagtggcccaccatcaaaaagtgggaagagagggtgagtactttgttttaaatatagttgcttttgcacctttaaagaagctaaaagtagagttcttggttgaattatgcaaagagccagtctagataaaggaccaaaaaacattgttcttcccaaatgctttattctctgttctcaaagtgtaagggtgcttaaggaagagaggttaaggtgtcttaggagtctttgcctgctacgttacattttccagaagagttctcttggaaacttgtagctttgggaaaatgttcacatctaaggagggacatgtactgtgtccttatttggtaagttatctgatgagtagccctcccttctttctcagtttctcctaataaacctctaatgctacacaggtgtcctctgagatttaaattaatgttataaccatatactttgtcactctagagagaggcccagaaaacaaatccctgttctactaccaaggacaccaataacataattgccatggcaatggatttttttaaaaaaatattttttctcaagtaagctaaacttggcctgttttttgttgttgttgttgagatggagtctcgccttgtcacccaggctggagtgcagtggcgtgatctcggctcactgcaagctccacctccagggttcatgccattctcctgcctcagcctcccaagtagctgggactacaggtgcccaccaccatgcctggttaattttttgtatttttagtagagacggggtttcactgtgttagccaggatggtctcgatatcctgacctcgtgatccacccgcctcggcctcccaaagtgctgagattacaggtgtgagccactgc

SEQ ID NO: 57006 - DNA, 2053 bp, Homo sapiens
gtgagggacggagtctcactctgtcacccaggctggagtgcagtggcgcaatctctgctcactgcaacctccaccccgctgggttcaagcatttctcctggctcagcctctctagtagctgggattacaggcgtacactaccatgcccggctaatttttgtatttttagaagagacagggattcgccatgtttgccaggctggtctcgaactcctgacctcaggtgatctgcccacctcggcctcccaaagtgctgggattacaggtgtgagccactgcacgtggcccaacacatgaacttttgagggatatgttcaaatcacagcattagtttgctgttccagataatttagaaaaaggaaatttttacttggaatttgaacattcccttaaaattccaagagaatcaggataaccaaaataaacagaatagtttatttcccgtaaccaaactattagaattttaagtaacaatactcagggaaaattttgataagatttttgtgccatgtaaatctcaactatgtagcaagatttttgtgccacatagatagataacaacaactttgaacctgtagaaatggcagtgacgattataattaaatgttttttataagagcaccatatagaagaaatgaactcattcttaaaatgtttcaggttatgaccagggacctggtaagcttttatcttgagtaatactataggctaagatgcaaatgaattagtaaacccatttcccatgatcattttcacttggaaatttaaaaaaacaacctgaaattattcttttaggaaataagaactattaagaactgtaggggatacatttggtttgtgaagtgaattatttccatattaaagttttttaaataattatatcaatgtgtaaatctgattacatttttttaaatgtacatagttgtaaatatagaatgctttttaaaaatttttgttttcatatgctgcccacttttggagagcatccatttgtgaatactttgaacttgcttggatcacagaaattttctgctataaacagtgttaattagctcatttataatatgatagacaaatagactctaagaacttctggtataactagaattctagaatttaattgctggaaagaactctagggagctagtctactttcttgggaaacccggttttagtaaggttgtgctgaacaaaagttactaatgcttgtttggttacagttaagagttttctatcccaacagtgtttcatcttagaatgaactttagaaactgccaataagagcatttttcttttgtttgggtaggtggaaatagtaatatctcaagttatttttttgtaggccatttgatgaccagcctgcaggcacaactggggttgacctcatcaatggcagctctgcacaccatcaggaaggagtacctaatggtacaggacaaaagaactccaaagattctactgggaaaaaaagagaagaccccaaaccaggccctaaaaaaccaaaagagaaagtggatgctctatcacagtttgatctcaacaattatgcaagtatgtcttaggtttctttcattttatttatttatttatttatttatttatttatttatttgctacattttaaaatgtagatgccacaattaaagaagttttccaagaaggaaagatttggacattcaaggtatacatagtggctgattatgaaacactaactgattgaacttaaactaaaataactccagcttttagcgtagccttgaatgcttaataaaatttttgttaaaaataatccaacagcattgcactgttcttccaaaaaagaggaagaaaattcagtaaccactctactttgccagatttgagaaagcacagaaatttgattcttagttatattggtatagatgtattattaaaaacaaaaggaactaaatgttaaactcaataattatgtccttggtaaaattggtgtctaagatgtggcaaatacagaataaataataggacgagaggcagtgtcactgtggataaataggaaagccatgaagtaatagag

SEQ ID NO: 57007 - DNA, 1003 bp, Homo sapiens
actttgggaggctgaggtgggcggatcacctgaggttgggagtttgagaccagcctgaccaacatggagaaaccttgtctctaaaaatacaaaattagccaggcatggtggtgcatgcctgtaaaaacaaaacaaaacaaaaaagacagtaaaaacagataaaaactatatatatttctgaagtggtgatagaaattaagctattcatttcaactcattaaagttatctttaagagttagtcgtctttagttctttttcctggtaacactgtttttaagtaatatctctaacctaaaatgttaaaaagaagaggacattggaaactaaaaagtagtgttcgaattttccataaatgctacatgtagttgggtgaactaaggaagttgaaataataagataggctttacacacacacattttagtgtaagtgaaaaactgagatgaaattagaattatgatgaggtctttccatcagtctgaagtaatgtgtgcatgacatcctttgaaatgtttgacttagacctttcatggaaatgagaatatgcttcattttacagagttaatgatttttaaaaggattttaaaaacaagtagaagtgttttataaatcagaataaactgggtttttttcttttgaaatcaagtttcccttcttttttttttttgtttttttttttttttgagacacagtcttgctctgtcccccaggctggaaggcggtggtgtaatctcagctcactgcaacctctacctcctcggttcaagtgattctcctgcctcagcctccttaatagttaggattacaggcacatgccaccatgcccagctaattttttgtatttttagtagcgactttagtagagggtttcgccatgttggccaggcagctctcaaactcctgacttcaagtgatccgcccaccttggcctcccaaagtgctgggattaaaggcatgagccaccgtgcctggctgaaatcaagtttctattagaaaaatggaat

SEQ ID NO: 57008 - DNA, 1164 bp, Homo sapiens
gagtcgcactctgtcacccaggctggaatgcagtggcacggtctcagctcattgcaacttccacctcccaggttcaagtgattcttgtgcttcagcctcctgagtatctgggactacaggtatataccaccacacacatctaatttttgtatttttagtagagacagagttttgccatgttggccaggctggtctcaaacttccggcctcaagcagtatgcccatctcggcctccaaaagtgctgggattacagacgtgagccactgcacctggccagttttaggatttttattttcaactttaagagtatgaaatcttttcagatctttacaatgaatggccatgcaatagggtgagaaataggttatacactataagttataggaactaggcctttggctagttttttttttttttttaagtactactgtactaaacatttttattaattttcatttgaaaaacagaaaatatcttaaatcctttcccacacccacaggtgttgttataattgatgatcatcctgaagtaacagtaattgaagatccccagtcaaatttgaatgatgatggttttactgaagtggtatccaaaaaacaacaaaaacgtttacaggatgaagaacgccgaaagaaggaagaacaagtcatacaggtttaaatcttgtttcaacttgttgctagttatctagatttgttgcccaaagtgtatcagcaaatgttcaaggtttttatacttgtcaaggctgttttcattattcaagtgttaaaagtgacatcatcttcccaacttttaatcattttgaccagaatcaaaggaaattttaaataaaatataaggactgtagctccttatattttgacttacagcaaagaccatctttttttttttttttaaatactgtaagttctagggtacatgtgcacaacatgcaggtttgttacatatgtatacatgtgctatgttggtgtgctgcacccattaactcatcgtttacactaggtatttctcctaatgctatccctcccccctccccccatcccacaacaggcccaggtgtgtgatgttccctgccctgtgtgcaagtgttctcgttgttcagttcctacctatgagtgagaacatgaggtgtttggttttctgtccttgcaatagtttgctca

SEQ ID NO: 57009 - DNA, 2563 bp, Homo sapiens
cagttcaagcttcccagttgctttgtttacctactcaagcctcagcaatggtggacaccactcccccagccaggctgccaccttgcagtttgatctcggactgctgcgctagcagtgagcaaggctctatgggcgtgggacctgccgagccaggcgtgggatataatctcctggtgtgccgtttgctaagaccgttggaaaagtgcagtattagggcgggagtcccgattttccaggtacagtctgtcatgacttcccttggctaggaaagagaaatccccccaccccttgtgcttcctgggtgaggcaatgccctgccctgctttggctcaccctccgtgggctgcacccactgtccaaccagtcccagtgagatgaaccaggtatctcatttggaagtgcagaaatcacccgtcttctgcgtcaatcacactgggagctgcagactggagctgttcctattcagctgtcttggaatggcaacgactacttcctcaagaccatctttactttaacaacatatcgtatgctagggacaccttatttgccccaaggcaaagttgagttgattttaaattatcttggaaagctaatgaacacaaatatcacgaaccagtagattttggattcctggcctacaaaagtatctattgtaatttatattagttcatttaaatacacagaatgaatcaaggtaaattattcatttaattgcctataacctttggaaccaaattttcagaagtcatttatttagaaaggtaaaatagttgtgcatctaccctatatcataacgtaccagccacactgcccaaattaatgcctgtggcaaatatatgagttaagactgtgagtagcattttgttagctcaggtaagttttgctgccagtgaatttactgcaaaatttcttagttcttgaatttcagaattatgtacctgtatgtcaagaatgtacaatacctatttgtcttttgtctcaatatcattttggcttctcatcattcaaaatcttattagcaaccctgacattttgtggtttgagtacctattttgaaaagtaaaggagccaagttagtgggagttgttaaaagttgcatttatgaactgttgcattcagctgcattattgacaaaaatggtccccgttaattttttaaggtctggaacaaaaagaatgcaaatgaaaaaggaagaagccagacttctaagcttcctccaagatttgccaaaaaacaggctacagggatccagcaagcacagtcttcagcctcagttccacctctagcttcggctccacttccaccttcaacctcagcttcagttccagcctcaacctcagctccacttccggcaaccttaactccagttccagcctcaacctcagctccggttccagcctcaactttagctccagttctggcctcaacctcagctccagttccagcctcacccttagctccagtttcagcctcagcctcagtctcagcttcagttccagcctctacttcagctgcagctataacctcttcttcagctccagcctcagccccagctccaacccccatccttgcctcagtttcaaccccagcttctgtcaccattcttgcctcagcctcaattcccattcttgcttcagccctagcatcaacttcagctccaacgccagccccagcagcctcttccccagctgccccagtcatcacagcaccaactatcccagcctcagccccaactgcctcagtcccacttgcccctgcctcagcttcagccccagccccagcccctaccccagtctcagccccaaatcctgccccacctgccccagcccagactcaggcacagacccacaaaccagtccagaatccactacagactacatctcagtcttcaaaacaaccaccaccatcaattaggctgccttcagctcaaacacctaatggcacagattatgtagcctcaggaaaatccatccagaccccacagtcacatggcactctgacagctgaattatgggataacaaggtggccccaccagctgtgctgaatgatatctctaagaaatgtaagttgcaaaagagaagtgaggggtggggaatggcataggaatactgaggtttcttttcaattttatttatatactctttaagtgttttctagccatctcattttttattgtaggaaaaagtaatagtaatcctctcaactttcttaaaatttttgttttaagcatgtttaacaagcatattatattttatggaaataattttgtgttgatgagaaaataataggcaatgtttgggggggtcttgtacatgcatatctcatttgattacagtttgtggacactgcatttttaaaaattaaaagttcatggtaactgtcaagcaagtcttctggtgtcatttttccaacagcatgtggtcatttcatgttctgtgtcacattttggtcattcttgcaatatgtcaaatttttcatcatttatctgttatggtggtcagttatctttgatattgtaattgtttcagggtaccatgaacacccaaataagatagtgaactt

SEQ ID NO: 57010 - DNA, 1912 bp, Homo sapiens
ataaggtgtgtctcacttttagacattaaacacttattttcaatttagtctcaagaaagatcttaatgaaacagaaaataaaagtgcaattattgttttctggacttttctcccatgtttctatcttgaggacttaagtagtataagtatttagaaactgtttatagcagatagttattctaacataatttctcaaatgtgatattggtaaatgactgttgggggtcagtgattcttcattcattcattgaatgaacatttactaagcactcacagtattctaggtagtgttctaacctgcgggcttacaaaactgggactaaaaacagtcaaaaagccctactgtcatgggacttccattgtcctgtgaggagaaaccactaataaaaaaacatcgtgatcagcactgtggagaaaaacgaagcaggaaaggtacataaggaattttccaaggttcacaaagacagtttaatatagggtgaccacgaaagcctacttagataatgcttgagttaaagacttgaaggatataagagagtatgctattcaaatgtctgaggaaaagagattccaggttcagataatagcaaatatgaatgccatgagacaggagcacacttggtttgtttgaggaagttcagggaagtccatgtagctggaatgaagtaagagatggaaagagaatagatgaagttggaagtcacacctgagtagcaggtggatcctgtagggcctatggaagaggtgggaagacactgaagggttttgagcaaggagcaacaggatctgacttttcaaattattctgggttgtctgtgaaaaataattcataggtggcaagagtagaagttacgatattacaataattgaatgatgatagcttaaaacctgggaagtggcatgaaaggtcatgagaaatagttggtttctgagtattttgaagattgagctgacaagatttactaaagtgttaaatggagtatgagaagggacagaggagtcaaagttagctccaaagtttttgggttgaacagtaggaaatactagaattttcagtaactgagattggacagtttttgacatgttagatttaagatgcttattatgcctctgagtggaaatgtagttggatatgagtctgtagttcagaagagttcatctagtttgaagataatgaatttgaagtcattagcatatagatgatgtttaaagtgatggaatggtataaggttaccaagggagaatgagagtagttaggaaagagaatcaaaaattaagtcttggggctttctgactccaggaaatgtaggaattagagaagctaagtgattagagaagtatcctaaaagtcaagtgaaagataagttcaaagaagggatagattaagtgtgtcagatggctgctggtaggtcaagtaatataggtgttcaattgatagagttacatgatggtcactgatgactttgataagaacattattggtggagtagtagggatgaaagcctggatgaaagagtgagtttaagaggaaatgaaaggaaagatgagtaccattttctctccacatctgtagagattggttctcaccaccatagaaaccaaaacccagggatgctcaagtctcatataaaatgaagcagtatttgcatgtaacctatgcataacctccctgtgtactttaaatcatctctagattaattatatacctaatacaatgtaaatgctatgtaaattgttgttataccatattatttagggaataatgacaagaaagaacagtctgttcttgtatagcactgacaaccatttataatttttttctgaatattttccatccatactgggttgaatctacagatgtggaacctgcaaataaggagagccaactgtataaagaacttgaacgtcattt

SEQ ID NO: 57011 - DNA, 1793 bp, Homo sapiens
tactgtcttttatttccagtgtattcatctgtttgttggtagtggtgtctttgtgtgttgcttttacgtttgttttaaatgaggaaacaacttgaagctgtgctttgcccatgatcacactcatgagagccaggactttaaaaacttaagtcttgtgctagtttcatcttatcagttgttttctagtacagacaaacaacagttaagagaaaattatcctaaaatataattaatgtcggtctcagttaatatgtagattgtcttaaaccttctattgtacttaaactgtatagtgcttcataaatcagtcacatctgaactatactttgcaagcaagttttaaaatattcttttactagggagcgaagaatggtcaagaaagtggactcgaaattggaactgacacaattcagtttggtgctccagcctcaaatggaaatgaaaatgaagttgttcctgtgctttcggaaaaatctgctgacaaaatacctgaacctaaagaacagcggcagaagcagccacgagcaggacctatcaaagcccagaaggtaaatatactttataatccagataaaattttatgaaggccactgacatgaagagcaaataatacttttaaaagtgaacttaattttaatgaatatctttgatcatggtgcaatgatgaaagatactcatctatcataaacatagttttatcataaacatttgactttagcttccagatttgagtccagtagaaaacaaagaacacaaacctggtcccattggaaaggaacgttcattaaaaaatagaaaagtaaaagatgcccaacaggtggagccagaaggacaagagaaaccaagcccagctacagtcagaagcacagatcctgtcacgacaaaggagactaaagcagtctcagaaatgtctactgaaataggaacaatgatctcggtatcatctgcagaatatggtactaatgcaaaggtaagccacatgtagggattaccagttcaacagatgcaagccatgtctaaaatgaacgagaagaacagcaacagtctgcttttttttttcctgctgaggcatataactctatagattatttccgcaaagaagattttgtttcatgatttgcatatgtaatctaaagaagttctttatagcaaattatatttctttttgaggaaatttactctgaattctggactatttgagtagcttaaagtgaaaaacatctatacaaaatctgaatactttgaaagatggctctatatcacttttaatataaatagaattacagtagagctttatcttgcccactggtgacattctaaagtcaggaaataaggcagacttttactaactccagtatagccagttttttttcatagttggaacagattactgtttctttggttgaacactggaggctgttgactcacatttaggggccacattgaatgaaacgtgtatctaaaaatgctcattaagacaagatatgttgattgaccatgggaacagacactcatgggaatagcaaacatatctgcgattttatattgactctgggacataaactctgagaaaaagttacatgcaattttttatattatctgaatattagtctctttttaattgccatacagctgaattcatataagtaatagcttatgtggtcctactctgccatatttcaaaatgagatttgtgacaggaaacaaggagtgtaccctaaaacctgagtaattgcaacaactaagatcttggtaattgatagtaagctaagaatgaatgtgggaaacacaca

SEQ ID NO: 57012 - DNA, 1162 bp, Homo sapiens
agttgaaatgctatcattttgatcgtgagtccatgttgtattattccattgttagttgattgagtgagttgagtcttaaagtctgctctcttcccctgctttcttccagaacaactttacaactattaggctatcattagaaagtgagcaatttggccaggcgtggtggctcatgccagtaatctcagcactttggtgggctgaggcaggcagatcacttaaggccaggagttcgagaccagcctggccaacatggtgaaaccccatctctactaaaaatacaaaaattaatgtcatggtggcgcacgcctgtaatcccagctacttcagtgactcaggcacaagaatcacttgagcctggaaggcagaggttgcagtgagctgagatcatgccactgcactccagcctgcatgatagcgagactcaaaaaaaagaggaagaagtgagcaattaattcagtttaaaatgtattttttttctattactacttcacaggagtctgtaacagactatactacaccctcttcttctttgcctaacaccgtggctactaataatacaaagatggaggatactttggttaataatgtaagtaatcagtttgagatgtggcaagtttggattggaacctggctattattatcaagcacattatttcatgttttatttactgtagtgatcaatatttaactcagggaaagagttgatagtaaatttgtgtttaggagtactgtaatataattagcaaaaatagtcaaagctgagttttttatttttcctctgaaagccatctgctttccatttaagatgaaggtttgtggtgcgtaggcttggtttcgtgtaaatactaatcttattaacctggtattggtaagaagttgttttagctctcacatttacaaatttaacatgaacggttggtgattttgttcttacataaaacctttttataattcagtgaaacccaacttatttaagataactaaaattagaattaaaagacaactatagaattcccaaagaatcaagtatgtctttaaaaaagaaaaaataccagcgtgttaacaacattcttgttgtgtagattgagctatattgtattgtatacataagtacgccaaacactctgatatgctctaatataaggtgatgttaagtcat

SEQ ID NO: 57013 - DNA, 1035 bp, Homo sapiens
tgtttcaaaacaaaaaacaaaaacaaaaaaaaacagcaagtcaccaaatattatgtatcatacatagaaatgtgtttaaaatttataccaaacttttaaaattaaatgtcaatcctctaaatattttgctagattctagtaggtaggtttaaaattggagtagaattgctggttcaatgggtagattcattttcaattttagtagattatgtgaaattttaccactgacaaaatctgcgtatctataccccattggcggtatataaatttttttttcatgccttcacaagtactagttatgtttgtgtgtacctgtctactagaagttttccatcttttcacatttgcatcttgtcacgtttttagtttttccatggctgtattttcagagggtgcacttaatttggaatctgctacaaaacttggtttttatttactgtttggaaaattctgaaattaggacacttactactgcttgtttatcctgatggtctacagctcaaatcccagccttctatatggacacaagtcatttattcaatacccaacatgcacgattggctccgccatccttggctcaacaacagggtttccaaccaggtctctctcaggtaatatcaaagacttcttccatcctgtatttgttccttcgcatttctgtggttataatagttatcttggaacataaataatagactctgaaattacaagctacccacgattagcttgatattctataagcaaaatttaaaatttttcccaaatttaccaaagcttaatagtaataatgtagaataagtagtgggttgaaagggaaatttagatgtttacattcagttttgttttaaaatggagctgatatatagtattaattttactcttttcatgtctcaaatttttatattccagtgttaatgatttatctgtatgatgttgatatatatgtttacatactttctcaatgcattgcagccaacttcagttcagcagattccaatccctatttatgcaccactgcaagggcagcatcaagcc

SEQ ID NO: 57014 - DNA, 2356 bp, Homo sapiens
tactgtatgtaactgtatgtactgaactgttaggactgtaggtgtagtaggtttgtttatatttaatactagcaccagcaaaaacacttgagtcatatgttctatgatattagaacagctatgatgtcactaggtgataggaatttttcagcttccttatgatcttatgggaccatcaatatatatgtggtctgttgttgactaaaatgtcatgcagcacatgactgtattgggtcatttgggatttgcattcttaagattttcagattccagatgaaattaacttctaacaatattttctctttaatccttatgtagatctcagccagcttttatgcaaagcagtttatcccagccatctgtggtcctttctggtactgctattcacaactttccaactgtccaacaccaagaacttgccaaggcacaatccggtcttgcctttcagcaaacatcaaatactcagcccattcctatattgtatgaacatcaactggggcaggcatcaggactaggaggttcccagctgattgacacacatcttctccaggtaagtcaggggactagagcaatgcaccctcattgtattcctatgccacagatcattttaaggaaacatttttaaaagaaaacatgttagaagatgcaatgaaaaaaacaaagtcctttcatttatctaatactaaaaattgctagacattgctttgaagtcataatctccacctctgaatttgaaatttttttcagtcttactcatgttttcttaaaaaattttttctaggccagagcaaatcttacccaggcctcaaatctttattctggacaagtacaacagcctggtcagacaaatttttataacactgcccagtcaccaagtgctctccagcaggtaaactatggcatggtaaatttcctcaattttctttattattatttttattgcttttgttattgtttgggaatttaaattgaaccaagatgcaagatggaggatggtttttaaactgttcactgagatgtcctgaagaattccactgggtccacgtagaaggggtttcaggctcatgacaccccccttctcaccaccatcaccccctacttcagtcattcctgtttttttatatcttccaggttttttgttggtttagggggttttgttttgtttttttctgtcacctaggccagagtgcagtggtgtgatcatggctcattgcagcccaacctcccaggctcaagtgatccttgcaccgcagcctcctgtgtagctgggactacaggctcacgccattatgcctggctaatttttcttcgtagtttttgtagagacagggttttgccatgttgccccaggctgatcttgaactactggtttcaagcgatctgcctgcctcggccttccaaagtgttgggattacaggcttgagccaccacacctggctgctttttgttttttgtttttttttaattaagggggaaaaaacaacttaggtttccgtgtaattatttattctattttaacaaaggattcaatgaatataaaaccttgaaaaccattgtccagaatatagttacattaagtgtgatacaggtggtttacccattagtgctagggagaagcctcccaaagaccatctggcaggttagctatacatacaacagtgtggcagactgtgatcgagcataaatgacaaacactttcttaagtgtatgaatgcaataataattttcagtgaaaagtatatggtacgtttaaaactatctctaataatttcattagcttattctttaaaagtggtggagggctggtgggggaacaaagtcattagtcattttcttataactgttgttgtttgctattttagggagtgataattcatgaatatcttattgacattcagattaaatatagtgtttatgtgaaaactgagagattcttgttcttctcatagctcattttgaccagccttgaaagtattatgtaaaatgtctgtttggaaacttgtgaatactgcttatattgtgtcctcatttactttgtgattatttgacatgtcctgtggataaattcaaagatagtcctaattctttcagtttctattctcttcactacaagtagcattaactaaactatgttgtacctttaatagaagaatggagatacggttgagggttgagtgtctcttaccgaaatgcttgggaccagaaatgtctcggatttcagattggtttttttttgtgtgtttgcgtatacataatgaggtgtcttggggcgaggggcctgtctaaacatgaaattcctttgtttcatacatactttatacatataacctgaaggtaattttaagcaacattttaa

SEQ ID NO: 57015 - DNA, 2181 bp, Homo sapiens
gatgtgttctatgtattttattttattttattttattttattttattttattttattttattttattttgagacagagtctcgctctgtcgccaggctggagtgcagtggcaggatctcggctcactgcaacctccccctcctgggtccaagtgattctcatgcctcagcctcccaagtagctgagactacaggcacatgccaccacatgcagctaattttcgtattttttttttttagtagagacagggtttcaccatgttggccaggatggtctcgatctcttgacctcgtgatctgcccgccttggccttccaaagtgctgggattacaggcatgagccactgcacctggccgatgtgttctgtttgaaatcttactcaaaagtatttgaagagttgtgtatagttgtatggatatgtctgtagtaaacagaaacaaattgcttcagtttctctttacttattttctaggttacagtacctttaccagcatcgcagctttccttgcctaattttggatctacagggcaacctctaattgctttgcctcagactcttcagcccccattacagcataccactccccaagcacaggctcagagtctgagtcgtcctgcacaagtaagccagcctttcagaggattaattcctgctggaacacagcatagcatgattgcaaccacaggaaaagtaagtaaagagacatttgcacaggttatttgagaatttaaggtagtgtgttcagatatatgcatctgtgttatctaaaaaactaaaatgcgtcagtttttaccaccctgcaaaaatctcaaaccccagtatatttacattttatctatttacttttaatgtgtttggccccatctagtttttacctaataacaaagaattcacaaatttattggaagaattggatttatagtgtctcttgggcttatttaattataagtctgtttggtcaggtaattccataatacttgaagcctaactataggagttttgtactaaggttctttgccctttcctagattacgtcttcacgtataggacatgtaaacacagcacttagcttgtggaattaaagaaatgttaagtttattttatgcttctcctcagatgtctgaaatggaactaaaagcctttggaagtggcattgatataaaaccaggcacacctccaatcgctggtagaagcaccacaccaacatctagtcccttccggtaaaatgggcatttaaatttgcttatgaaattccaatttggtcactatttgttaaatacttatcagtcctgtgtgacataatcccttttccaagcagaaaaggaattattaagacattctttttgatagttttgtctaaaatgttaagcttttaaattatttaaaatgtgtttattgtactatattttaagtaaattcttttgttacagagcaaacctttttttcttttattttttttgagacagagtctcacactgttacccagactagagtgcagtgccatgattatagctcactgcaacctcaaacacctgggctcaagcaagcctcctgcctcagcctcctgagtagctgggactacatacacgtgccaccacacctggctaatttttaaaaaaatattgtccaagctggtctcgaaccagccaatctaactggtaactggtatcctttcttacctctgctcctccaatgtctctcttctaccagaatgttttggtaatcatcatagtaaatttttaccaactaccaagtatgatgaaaataccaagaacggtgtttgcaaaaatctaacagcattatttacttggtattactatactgactagtaatggcttctttccaagggctacttctacaagtccgaacagccagtccagcaaaatgaacagcattgtctaccagaagcagttccagtcagcccctgccactgtgagaatgacacaaccatttcctacacagtttgcaccccaggtgggcagacataattaagaaatgagtattatttacttaaaaatagttgctaatctgataaattattatcttgccttatgttaaccagttaagaagtacagtttttaataaaaaattgtttctgaatttaacaataaatttattttataaagatagtctgcgatttatagccagacatggtaattgtttagttctaaagcagacaa

SEQ ID NO: 57016 - DNA, 4685 bp, Homo sapiens
ccttttgaaaagatagcctaattaaaagtctttctatccccccttcagaatttacaactgagatgctaggaccaactgaagtgccatagcatgctttgcctagtttttctgttaaactctccaagcatggcctgtttattccttgtccttgttaatggaatggcacaatctgtacacttcctttcactggtaggatgggcacagatttactctgggatgagccaacctggtctagttggcagttttttttttttttttttttttaacagttcaatgttgtatgttttgtttttttcactcagattctctcccagcctaacctggtccctccattggtaagagccccacatactaacaccttcccagcgcctgttcagaggccaccaatggcactggccagtcagatgcctcctccgctgaccacaggcctcatgagccatgctcgtttgccacatgtagccaggggtccttgtggatcactatctggagtcagaggtaatcaggcccaggctgcgttgaaggctgaacaagacatgaaggttagtacagtgttaacagccaacagatcaagaatctgtctctgaaccatgtcttaaaatgcctctggacccataactgtatatccaggcattcattgtcttagcagacttaaccaagctaactacttttattcattcccccttttttttcttttttttcccccattcccattcctttcatcttttttttctttttgtttctttttctttttctttttttttgcaactgtagtcaggaaatgaattaatgtcttaaactgtggccaaatgaattgttatcaaataaatatttgagggagatctgagtttagatgcacacttttttttggaatagcaaagaagtaatatcaattattatagacttccccattttctttctttttttttttttttttaatatatattttcttcccccctttcccctgactctcctcctcccagcagcttaaaatgtaaatcatggttatatgaaaactctggaatgggtaagatgtgttactatcttagtacttttttccattatgagtcatcaaagtacagttttcttctcaaactgttttcatacccttattggcctaccacatgaggtggttgtattccacagtggattgtgcagttatagatgaagaactcagaaaagcactttgggatccttcatgatgaaaggcactgataaacatgaggtttgctaatgcagaaagagtgcctttaggagtctgtgtggggacagttttgtagcataaaccttacatgtctgccagtacagccagttgaatccgtttatttctatatttactttaggcttgactttcagggatcttagtaatttttgcctgttttgtcactacatatgtcatcagatcagactagaacaaagaaaagcttactgctttcaaacagggaaatgtgcatagtaatgctttactctgaattagaaacatgtttatgataatcctattagaaaatttgattgattgattaaagtgtctttttgggtcgacatccctagtgtttctgatcctgagtaatcaaatttaaagactacccagcagcaaaacttttattaaataattatctacttttattaaggctgtatgcctaggatttccatctgtttgttataattagaaataccagtgtgagtaaaaatcttaggaagttatttggccttggattccagttctactcctggctccttggctcttgattttcgcatattcccatgttggaaataacattagagcttaatagtagtaatggggtgggagagggtacaaacttcttgaaaattgcttcagatctttggatagtacaggttacctatagaacataaagcatttttttaatatgcaagaaggatggaaacttaagttttaattgtgaatgttacagtggtaaaatttacagatttgacgtaagtatatttttgggggcacatagtcaaaactaagaaattatttaccagctcagaatgtggtaggagctatcagaacttagtgatcaagtgaagtcgtagttactaatttctgatgctcttcccctgcagaagagagctgtgggaagaggactcagccacaagacatttggtcctaggtgttggtaatgccacaatataagtgcttccttttcattttattgtagaccacatattgataactagaagttttaagtgttacatgtatgtttttagatttgcaagcaggttccctaaataaaatttaatatgagagggcagaccttgaaaaggtggtgggaggtggtcctgtggttttttttttttttttaaatcacatgaaatatttcaaaaataggaagaaatctattcattaaaagctcaaagatcaatgaggtacttttggctttggccaaaccagtgtggggaaaactgatttgtgattggtaaaagaatttgaaccaagattgatttgacaggctttggtaatgctgcagtattttcagttgttctttctcattttttaaggcaaagcagagagcagaggttcttcagtccacgcaacggttcttctctgaacagcaacagagcaaacagataggaggaggcaaagcccagaaagtggacagtgattcaagtaaacctcctgaaacactgaccgaccctcctggggtctgtcaggaaaaagtagaagaaaagccaccccctgcaccctccatagccaccaaacctgttagaactggaccaatcaaacctcaggcgatcaaaaccgaagaaacaaaatcttaaaggctatggtttattgcaggggattgggaggggggcgggaaaacatggagaattaagtcagataatgctggcagccaaaggggcaaaatggcctgtgacattatcctgttcagagcttggagatgtacaagggacataggagcaatttacactgacacacagctgctgtaccagtgaaaacgaggctttgcaagcttgtacctactatataacatgtgcttggttgatggccatgcatcttcagtcagaatttatatataaatgtatgcacccatttttttgagtgcatataatttagacctaaaaatccttatgattagatgaaacaccaaaaatataaggaaaataacacagcagaggaatagctcagcctgaacagtgtgatggtcccagctactacatcagatgcggtttttttgctcccttatgttcttcggatatggttatggcatttgtaggcttggaggtaaagaactgaagataactggtgctggatagaggagccttattttttattatggcagcttgctatttttataacatggtgattgagttgaacacaatcaaagtacagtagtaactgatgtccccttcttcctggatgaatgagcagataaatattgatgtcagcatccttgaaccatatcaaagtgagcagtgtttggctactgcttctatttgaaatggtgctgtgttttggttgtggtctgaagctttgaagcgctacttagcatctcctttcttccatggagctctcacgattcaaacatgacagatttggtaaaatgctggttaggttgagtcttccttgcccccactcagtcatctttgtatgaatcccatgatttgggggtttttttctttttttttttataccagtttttagctggtgtttatgaagaacagtgagtacctagaactgtgccactaattaaaggaaatcctaagaaggtgcatttctttacagagctgtgtcatgccatcctttgggccctctgctggaaaagtagaatcaagtctcaaataatgcctttttaattgtatcctctagtattatagatataggacagtactgtatcatacctctgtgaatgtaaaatatcttgtacctgctttatgatacgtagtagtgaccgtgctttatcagagctgtttttaatgatgttattctagaatgttttctttccagatgatgattcagaagctaattttaaaaaacggtgccaggtaccacaacagtaacagaactttgcaattttctggggttttgttttttacctttttccccccttttttttaaatggagtgtgctggatgtctctataattttattcagatgactgcagaacctggaaaagctgttgctgctattgatgcataacatactgctattggtctttttatataaatatatatatatatatacatatatatatataatttgaatttttggaaactttagctgtgctgtcaactttggaaaaagtatcccggtttactgtgttgagttggcattgtacagaaattaacagccatattggtctagaaacgttaaacttaatttttttccatttgtacaggggtaacgcactgtattaaatatgtaaggtcttatctacatgggtttgattacagaaactaataaagtattctctaaataatgattcttggagcttataatcatttcctaaaatctgaagcaagagggtttgtcatgtattaaaaatagtggtcaagagtactggccagtcgcagtggctcatgcctgtaatcctagcactttgggaggccgaggcgggtgaattgcctgagctcaggagtacgagaccagcctgggcaacatggtgaaaccccatctctactaaaaatacaaaaaaaaagtacattatacagccgggagcaat

SEQ ID NO: 57017 - DNA, 1033 bp, Homo sapiens
ttggctcattgcaacctctgactcccgccccaggttcaagcaattctcctgcctcagcttcccaagtagctgggattataggcacctgccaccaggccagctaatttttgtatttttagtagagacagggttttgccatgctggccaggctggtctcaaactcctgacctcaggtgatccacctcccttggcctcccaaagtgttaggattacaggcatgagccattgctcccggctgtataatgtactttttttttgtatttttagtagagatggggtttcaccatgttgcccaggctggtctcgtactcctgagctcaggcaattcacccgcctcggcctcccaaagtgctaggattacaggcatgagccactgcgactggccagtactcttgaccactatttttaatacatgacaaaccctcttgcttcagattttaggaaatgattataagctccaagaatcattatttagagaatactttattagtttctgtaatcaaacccatgtagataagaccttacatatttaatacagtgcgttacccctgtacaaatggaaaaaaattaagtttaacgtttctagaccaatatggctgttaatttctgtacaatgccaactcaacacagtaaaccgggatactttttccaaagttgacagcacagctaaagtttccaaaaattcaaattatatatatatatgtatatatatatatatatttatataaaaagaccaatagcagtatgttatgcatcaatagcagcaacagcttttccaggttctgcagtcatctgaataaaattatagagacatccagcacactccatttaaaaaaaaggggggaaaaaggtaaaaaacaaaaccccagaaaattgcaaagttctgttactgttgtggtacctggcaccgttttttaaaattagcttctgaatcatcatctggaaagaaaacattctagaataacatcattaaaaacagctctgataaagcacggtcactactacgtatcataaagcaggtacaagatatttt

SEQ ID NO: 57018 - DNA, 1087 bp, Homo sapiens
catgaaaaagacttggagcaagtaactagcccctgaatcttggttttcttacttttaaaaaggggatgtatacagacttacccgaaaggatactataaacatcattaattaatgtcaataaagcacttgggtgttgtatttactgggtgctggtcacacagaagcctggcttccacaccagaaaggcgtctacctcttcattgctaggcacagcagttcagacgccccatttttaaattaccacccattgcatgagcttggataaagctcactttctcatctgtaaaatattatgataataatagtacctactttataagagtgttatgaaagattagtgaagtaatcctggtaaagtgctcagcatggctcctggcacagggatgtgcctaataaatgtcagctattattagcatcataacttgcacctcttctgctctgttggctctttccctctagcatataaacaccttaagttttttccatctaaaataaataatatcccttagatattaccttttattttttctcctttgatttatttttctctggtcatatcctccattttggctttggccacatacacatagccaatgtcaatgactaaggagtctgtaatatacacctgaccaaggtgcaggagcaaggaaagcatgtggcatagaagaggcgcatgaggtcatgagccagggtgtcatctgtttaaatcttggctccgcaactttctaggtgtgtgaccttgggcaaatttcttgtcatctctgaaactcagctttctcaccaataagctagagataaaaacatctgccttgcaggactgcagtgaggttaaaacgcataatgcacataaagtacacagcgcaatgaaaggcacggtaagaaataattatcacccaaaatataaagttcattgcaacttgcaatcctgttgaggtgaaaagactgatgcatgaaaaatgattcaagagcaagttgagaggtgtctgccaccgtctttaagaacaaagacagagtgtgtgttgaagcctttgacttcactcaaaaaaataagtcattaaaaaaacaactttgggccgggcgtggtggc

SEQ ID NO: 57019 - DNA, 1049 bp, Homo sapiens
gcaccactacacctggctaatctttatatttttagtagagacagtgtttcaccatgttggccaggctggtcttgaactcctgacctcaggtgatctgcccaccttggcctcccaaagtgctgggattatagacactgccaccatgcctactggctaggcatggtagctcacacctctaatcccagctactcaggaggctaaggcaggagaatcgcttgaacccaggggacagaggttgcagtgagctgatatggcgccacttcaatccagcctgggcaaaagaatgaaactctgtctcaaaaaacaaacaaacaaacaaaaaacataaaacaactacaagtcaaagcactttttatctccacaaagggaagagcaaaaaagtagggctgttagccttataaaaatataattttcttaatgaaaaaaatgttactagctcagtgaacaatggcttcttttataaggaaactgggaaaatatcattgttttccaactttttccctttaactttcaatctttctggcgatccttaaactaaacctgtttattatcctgtaaggtgaaacttttatttcccatcttgagtcaagaggtttcttcaacattgtcaaggtagatttaaaacaaaagtttaaaatcctctatttcagacaaagatcagccaacaacaatgaaaagccaaccatttacttagttttgtttcatttctgatacttaaccttatattcttctatctaatttattcaatggagcattttccccatactatgtctttccttcaagtagtgtccattgtttcctagcgttcctaaaaagcttgttgtccccaaaagtttatgttatgctgctttccccaaaagcttacattgtcttctaagaccaatctctgtaaacacagcccaaatcccagttcttgatggctttcacactgagctgttttcaggtccaccaccagttctaggctcagccaagttggctcagtattatatgtgcctaaagttgcctggagacatactggtgccaggaacaaacttcaggcatttcaaact

SEQ ID NO: 57020 - DNA, 1011 bp, Homo sapiens
acagaagcctattgccttgcagcaattttgttgttataatactgattaattggttactccttcttattataactcagtaatacctgtggtcatttggttcctctatcctgacaaagttcactggaaattgccctcagattttataaactgggggatttcttaattagataaaagttcattactgaagatggaatattatataagatggaggaagggtaattaatagacatgagatatagaaatactttgttagccctgctatagattgcctattgtagtctttctgtgcatttcaatagtctgtattaggaaattataacttcagcacttttgatagcaaaaattggcatctttcaattctgtatagtatgtgactatcctgtaaatgataatatgtgtacagactgagaaggcaggaatataaagtaattgaaatctctcattgccggtatactctaaaacatgcttgatgccttgtcagcatcattgcacacattgactctgtatttacatctgtatatacactatgattagaaaatatgcaagaaattgtttttccatgttaagaacaaatgccattagaagatgtccccttaattgtattgtcagagtattactatgtcaaggatgactgttctgttaacctaattttgtgttttcacatggaaatgtgattggactccatttttctgtgagttgagagtaagagcataagtcagtttgaaagcatttacaagtttgttttagaatgtagtaagggctgaaaggtgctctacttcttaacttgttttttccatgttgtagacaaatgaaatttgtctaaatgcttttgtctaaaaatgcatttgtctaaatgctttagattgatgtagggtttagatcctctttaatactttgagatagtcttattctgattttttttttcttctggaaaccaagtagaattagggatgggaatacaaatgcatttattctggcttctgttttattccaagaagcttcttggaacaa

SEQ ID NO: 57021 - DNA, 1705 bp, Homo sapiens
atttatttaagatgccaatgttagacatttaggttgttttatgatattttttgcttctcctttcccattgattatttattacctcagataaaagttcagtcaatcctcattacccatttctaaaagtagacacaactacatttaggaatattgcttcaaacatagcatatatatctgatgttgatatattgcttttttcatgttttctcttacagttcttatagtcatgaaataccgtacttgatttgatgacagagatcttcattaaacaagatctgggacagtaataaaagattgctgcataatttaaatgaaacctatgtgtatataactttcaaaacttctttttcaagaaactaagaggcaagtatcacttcaaattggaacgttgagaatgtccaattatcttctccctttctaacaaaatgttcttttaataattatgtttaaggcaaagagaactagcctctatttttccatatttcaaggatctaatttgaaactagatacttgccagttcattatttgtgtatataaacactgattataatatttcatattaatattttaatggcataaggacttgcattattgcattagggagcgggtcatgctgggggtcaggaagcctgtgtagagtaccaaattatatgctgaaagagatgcataaccattctgtcaatatttgcagaaatatagttcctttcatattacagttgttttgcaagcaatttccacatttataggtgtaacaaaagctaaatgttgtaaatgttgttgccctcaggtataactaaaaacattccagtaaatatatttttgactgtgtaagagaatgtgtagtaatttttttggcattggattatggaaatggaaatttttaaacagtgtgaaaaaacatggtatggcatcataaaactggagataataaagttattgaagagtgtcattggagtatttgaaaatgaccaatatatagctgccagtcatggtccagtctgttttctgttaaactccaataaagagagaccagtcagtcctaatgtgagtaaatgaaatttacaggtaacttacttactccttaattttattttagttaatagcctctaacttccaactatctcatttaccaaaagtacaaaaagtagcaaaaccatctattaatactttgaattttatatctttgcatttcctgttcatccttgaggagatgtatgttgcacaatcaaattttgcatcagccaacagtaatgagtagtagaaagtcaggaacctatgtgtatatatatatatatatatatatatatatatatatatatatatacacacaaacacacacacacacacacacacacacgcacacatatgataatcagtcagtcggtaaccaaatgctagagagtgaccattaacctaagcctgtttttataatgaaaaaatgtgttaactttaaaatatgccaacctccttgtgtcttttaaacaagtcagagtgaaaatacattgtcccctaaggtgtggggagaggaagctttataataaaattagtgattctgcagaaacttgtgcactggatatcttgacaatatgaatataaaactccctaaattaaaaatagggttaatagaaattatcagtatttaaatagggaaaaatgattttatgtttattttatttaggttttatttctttggtcatcttaatgc

SEQ ID NO: 57022 - DNA, 1038 bp, Homo sapiens
gaagccagctggagcagagacccctaccccagcagaaggccatcaggggtgtctgatgggattctgtcctgggggcccttcagcccttagggcagtcccatttccagtggccaagcttgtggccgagggggcaaactgtgtaaggcttttccccatttgtcccattgggacagtttgcctttcagtggcctggccttctgcactgatggcagttacctggaggatattctgagggcaacccagactgggctgggggctcataaagcagccagcagttgagcctgccttttctccttgtgttttctgtgtttttctttcccgttagccctgtcctttttattctgctctcagttataaaagactgaggaggctaatttgagaatttcctgcaaaggggccatgctgttaatatatgacacaagaaaattagatgtgccctattttttctgcacctctgagcttactgtctgtctggcttttttaagttttaatttccaggacttgaactcgctgccatgtccactaaagaaggaaagatcttcgtgggagggctcaacattaacaccgacgagcaggtgctggaagacgacttcagcagcttcgggcctgtctctgaggtggtcattgtcaaggagactcagtggtccaggggttttggtttcatcaccatcaccaacccagacgccatgagagccatgaacagagagtccctggatggtcaccagatccgcgtggatcatgcaggcaagtctgctggggaaccagaggaggtgactttggggcccatgggcgtggtcacagctactctagaggtggtgggaaccaggactatgggagtggcaggtatgacagttgacctggagggtatagatatggatatggacagtccagagactataatgtcagaagccagggtagttatgactgctactcagaaggaaattacagaagcaattatgacaactgaaatgtgacatgtgcacataatatacacaaggaatagctcttctgatccaggattgtccttccaaatggctg

SEQ ID NO: 57023 - DNA, 2478 bp, Homo sapiens
cacccgacggccccagatgagcttcttgaagatggacatgacgcagatggagtttcctgatgcctcgttccaggtggtgttggacaagggcaccctggatgctgtcctgacagatgaggaagagaagaccttacaacaggtggacaggatgctggctgaggttggccgtgtcctgcaggtgggcggtcgctatctctgcatctccctggctcaggctcacatcctgaagaaagcagtgggccacttctcccgggaggggtggatggtgagggtgcaccaagtggccaacagccaggaccaggtgttggaagcagagcctcagttctccttgcctgtctttgccttcatcatgaccaagttcaggccagtccctggctctgcccttcagatctttgagctgtgtgctcaggagcagcgcaagcctgtgcggctggagagtgccgagcggctggccgaggcggtgcaggagcgacagcagtatgcctggctgtgcagccagctgcgccgcaaggccaggctggggagtgtgtctctggacttgtgcgatggggacacgggggagccacgctacaccctccacgtggtggacagccccactgtgaaaccatcgcgggacaatcattttgcgattttcatcagtgagttgggattgctccctctcttccctggaggggctggcttacaggggctggggcttgggctggggctggggctgaggctgggctggggctttggtgggattctggactgttttttgtcttgcaggggtttgtacttccagaggattagactacccaaggcatgatgaaaggagagtaatagctctctagcaacctacttggagttgagacctattccttttcatctgccattgcaaaggcttgatgaagtgtgagaatggggttggtagggaagagagagaatagagataaatttaggaggtcacatatgatatagagatgctagttactttgtagcatggagtaatggaagtaatgctggactagcaagtctaagacataggttctagtcccagctgtagcctgtgagctgcaggacctggggaagttgctgtgcttctctgcaaaatttggagaggcagcatagggtagcagctaaaaaagtgagctctggaaccagactgtttgggtttcagttttggctcagtcatttcctgatggtgtgacattagacaggttacttttctttctctgccttgatgggattgtaactctggtgtagttgtgagaagtataaaagctcttagaaatggtacctggccttggaagtgctgtgtaaatgttagccattattactgaaagcagtaagttatatcagatttatcttaataaggataaaaaagatagtaggaggaagtgctttcaaaagtggaacattgtagacaaatgcaaagtgtttatggtcttggtgttacggtaatttgtttcctggtgactgagctagtttttcaagtattctataattctgtctgtccatgtgtggaaataaatagtgcagtgaatacaagcgtgggtagagtctggggctagactgcctgggtttgagtcccagcttcaccatttacttattgtgcgaagttgggcaaatagtgtaacttctgtttctcagtttcctcatatgtaaaaatgggaataatactactacctgcatcttggactgttggaggattccattaatatatatttgtcaacagcttggagtcatgcctggcatggcttatttgtgttggcattactgctgtttttcttgtggtaggtgtctgcctccttcccctacggacatgcccacacttcttctccacccttggtcctgccttatgtctgatgggctgctttgccctagatgttgtgaactagagaattgttagctcctcagtgggtcacagttggggaagatgctggtcttggacagggactggctccctgccgtttgggccatattggttgtgggcttgatcactttccaggactccctgtaaccaagttcttttttctagtccctcagggccgggagaccgagtggctctttggcatggatgagggccggaaacagctggcggccagtgctggcttcaggaggttgattacagtggcccttcaccgaggtcagcagtatgaaagcatggaccacatccaagctgagctgtcggctagagtcatggagctggccccagctgggatgcccacccagcagcaggtaacaaagctttcgtacggctttcatgggtctctgaagtcatgttagcagccagggaggcagagggagccttggcaggagctaggactagagtctgtgactcttcatctaatcctggaggggtatcagcagctaagggttaaatggcagggaaactgtcctttgccccaggcaatgagaggaaagtgagcacagtagcgtctgtgtctgggggagcctctcagagtccatagacatggcaggatggaaatgctctactca

SEQ ID NO: 57024 - DNA, 1147 bp, Homo sapiens
tatcctggtcaccatgggtaacgaacaagtgattttactaaaagaacttcatgatgaggagttgatccttttttttcttttttgagatagggtcttgctctgttgcccaggctggactggagttcagtggtgtgatcacggctcactgcagcctcagcctcaacctcctgggttcaaaccatcctcccacctcagcctttggtagtagctgggactataggtgcaagccaccatacctggctagttttttttttacattttttgtagagacagggtctccctatgttgcccaagctttgatccttcttgataggtgggaaagcaaaggtatctagaggcttggtgcaaatagtaacagatctgaaaaaaaagaacccaggctcctgggttcctggcctgtggttttgcccactaggctgactcgtgtttacagatgaatgtaagtttgattcttcctggccaactttggggttgatgacccctatttcaaggaagcccagatcctctgaggagcttcatttgtggcctctcaccagtgcctgagtctgcagggtcaggagatattggtgattattaactagtcttataggtctttaaaaaaagaaataaagatagggggaaggagtgggaaagtttagggggaaagtatatttttctcctaaggttcagaaaagtgggggaaaaatagatgagaataatcaggggaaaggaatatctctctagatttggagtggttgtttctcccatggattttgttatctttattcttgtgtagattccttctcataatcacagccccttcctgagggttccctctagcttttgttatcctggactattgagagttcttttaggggttactgatgagaaaaacccctaaaagaacttggggagaatcagctgcatctcactagttgtttgggagatctttatgtgtccagttgattttcaaaagatgaattaaacctttgagatcagttcaaaggctccagaaaagtactttaatagaatggcaaatctgtggagtagttgttgtctagaaccgtggtatggggatatatacacacaaaagggaaggggttataatttctcttatttcttaaatgagctgctgttttgaccacatctctggttgtaccttcaggtc

SEQ ID NO: 57025 - DNA, 1029 bp, Homo sapiens
tttggccaggctggtctcaaactcctgacttcgagtgatccgcctgcctcagcctcccaaagtgatgggatcatagacatgagccaccgtgcccagctgggaatcacttctttctcaaagctattctttgagaagctatttgggaaactgaggcttggagaatggtaaaataacatgtgagcagcacagaagagcaagaaataaggctggagtttgtttatggctcacatgctccccatgcttttctccatctgcctttctatgctgtgtattctctgcaaactcatcaccaccgtgtgttttagtccaccagtctccctgggacaggaattggtattttcctcaaagccgatccttgtctttcatatgtctcctgatgtgaggtcattctgacttttcttcctaccctataggtgtttttattctcaaccttgtgtgccgagacttggggctaaaagactcagtgctggctgggctcaaggcagtgttccccctcctatatgtccggcgaattgagggtgaagtgaatgagatcctgttctgtcagctgcaccctgagcaaaaacttgccacaccagagctcctagaaacagcccaggctttggagcggaccctgaggaagcctgggaggggttgggatgacacgtatgtcttgtcagatatgctcaagacggtgaaaattgtgtgactgcttaggccaagcagccctcctgcctagactgaccttggactcccagcctgccagagaatgaagaaatacaacgcacagtacttttgaagcttcgtatttttcttggtttcacactcagctacatgtgacctccagcttggtgaggttgcctgaagattagggaaaataaaaatgtccttcccatcttgtcctcttcagtaccacttgggttggtttgtctttgcttcctacaccacgtccttgagtggagttccctgctgaagcccctagcacacactgcatgccttaacaagtgtgtgcaagcccctcagaactcaagacatccaaattttattgcg

SEQ ID NO: 57026 - DNA, 1059 bp, Homo sapiens
agtatgtttactggtggaaatggatacaggtcatttcagagacagaggctgtgattacaaatggtgagtgacagaaaggcagagagggaataaaaaataatttcaaactttgagtagatccctggaggaaggatagtaaaattcatagaagtaaataagtttagagagggaaggaatgcattctctctctacttgcaactggtcagatcttccattctaccatcaagctcagggttatccatggaacatcccgtttgaacactctgtctatgctgattttgaccttctcagatgtcctgatgacttatggttcaaaactgtttaaaacttgaatatttctgactgtttcattaacattagcttttgcttctgggacagactgcaaacccttaattagtattccccacagtatcttgaatgatagtgttttaggtaccattatggactgaacgtttgtatctcctccacaaattcatgttgaagcccaaaccccaaatataacgatatttggagatagggccaattaggaggtaattaagattaaagaggtcataagggtgaggccctgatcaaataggattagtgtccttataaaaagaggcactggagagctctctctctctcttcctctgcacaaaaagaagaggccatgtggatacagagagaaggcaaccatcatcaagtcaggaagacagcccacaccagaacctgaaccagctgaatcttaattttgggcttctagcttccagaactttaataaataaatctcttttatttaagtgacccagcatgtggtattttgttatggtagcctgagcagactaataaaagtacttaacttgtattgagtttttgctaattaaattgttgatctgacttagatgggttggtactgagagtgaggatcatgtgtttaagtaagagatttatttttacatttatgagaaaaaattcactgatgcactaatattcttagcttgataagctagtgtccttagcccatgtgcctcagtttttgaggtatccattctttcacctgtacttctctcttcattttct

SEQ ID NO: 57027 - DNA, 1351 bp, Homo sapiens
tgaattgataattgatattaaaatagaattactctcaactcaccagaattaaattttatatctgcatatttaacactattagctcatataaattataagaaaaattttcaaaggatctggttttaattttttggatatgaaatgaatttgccttttctgccttttcttaagtactattttgtaactatattgcactaactatatccaaaacacattctgagcatcactgtgagtaacagccttccagtttgtacccttttgattcacagcatggccctatagttaattaagaggtggataacttaagctcacaactgcctttaatttgatttcacatccacagttataaactttgcatttaaaaggaaaatgagacatttaaataggttcctgttgtttcacatataattggtaaaaacatattcccttgtaggatcctattatcagagcatcaaataccaaagtcagcaacttgggttgccaaataaattaggctcattaattattttgaaaagggctgctgtttccatgtaaatgataattttctttttcatggacaaggttatggtacttatctactaaaagaaacatgcataaacatagtttttatctttaacttcagtattaaaatatgcagttttttgcaaagaggaaaaacatctggttcaattacgctgaactctgactacatgtgggccagtaataatatgaattggacttaagaataaaccttgtgtttaatctctttttttccttaaaattttaatgtgagttttctgttacgcaaattatccatgttagcacatttggaacaaatgtataaatgtactttctgaataaagtcaaaagtctaacttgtttttagttccataatgttttaatgtttaattatattgtgtatttttctccctttccccttactctccaaaatcaccaaatctggaaaacaggctgattgtatctgtctatgagcaaaggaaacctgaaggaaccaagggcctggctggacagagttgtcatgtgtctgcctgtctacacttgctgtgcagaacatccgctcacctgtacagcaggcacagacaggcagtcacatgacaacccagcctgaatgacaaccagccattgaaagaaagcagccctcacaccatagcatctacaccaagagctacaaccaaaatgaggggctcgggggcctggggttttaatctgttggtttaatacttaactcatgtattattttattttgattcaagtattaaaacccaccaaaagtaaagtgagtggtgcctatgaaatataataaaacccatttctgaaaatgttcctgtgcattctatagttctcttttcct

SEQ ID NO: 57028 - DNA, 1033 bp, Homo sapiens
ttttttgacttagcgtgacagccagtttcctggagttgctttggtttaatttcactacagaagacttagaagacaattcttttcttacatttttttccttaagaaataaaagacaaaaagaaaacaaggtgtaataaccacactaaaaattacatggtatgataataatacaaatagctcttttatgttttagctagtattttaagtaataataaactaatattcaacctataatttgggagattaaaaaaaggtcaatatggttttcagtctttcatctttttaacaagtttaggggcaggttcaacataacaatgaagtgtgcatatgtcacatagttactgtaagtgtgttttaaaaatctatcagaaacataaattgtccaaaagccttatgaatagaacaattgttttcagcaagattttttttttcccctgaaaaactgttgtggtttttctggctcaaaaaatttttatatcttgccttaataaaactgttttatattaaagcataacatacaaactcacaaatatttctttttattttttcaggttgcatgcatcattcctttaattgagcagagttaactggatcaaattatttatgggagagagaggaaaagttataaagaattatagtaatttttaatttccaccaatatactctttgtaagtgaatcactctataattactttctgttgcactgaatgcagcaacaataacacaatagtattttaaggcactggtttttggcatactctaaccttgtaattatttaaataacagccaagtttactcatgtttttgattctgtcaagaaaaaaaaaaagttcctttactcgaaagtgatggccgaaacagaatcggaaatttgttttcttgaaattacataaatacacagaaaatggcacttattagcttttgttaaaacattaccttacctaatcactgcataaaagtccagatttgtagaaaattgtaattttctcagtatctaaaactattttgctttccattaagtttctatttgcta

SEQ ID NO: 57029 - DNA, 1028 bp, Homo sapiens
agtgttcagactacctgttcaggacaatgccgttgtacagtagtctgcacattggttagactgggcaagggagagcaacgccatggaccgctggggacaaaatgggctgtttccaaggagaagacatttgtttgctccttttttgaatctcatatccagtgtttttcttcacaggttttgcacactagggaccaagaagccctcggggacactgctgagaaaagactgccgaagggaagaccagcgggtaaggccttcttgactgctcacctggtctgtgaccaagggaacctaggtggggagcccatgatttgtgttaacatgcaagggaaacagaggtacatgtgtgatgggtagagatgtatttaattttaaaagagcaaaagtgtgtggtatatagcgatttactgttttttttttttttatttctgaagattgataattcaagtgttttcttaaaggttttcccacttcaaaatgaaatatgaaaaaactcattccagacacttaagaatagtttaatgaggctacttttgaattgtttaataataattcaaagatttaaaaacttatatggatgaaggctgtatgtataacttttaacatcccaggactgaagtcatttttccccaaagtaaagaatacttgctggtttttaaatgctatatggatagtgcttttctgaagatttccttctgtaatataaacaacaggaataatagtacctaacaataaaagaagaacctgccaagtcttgcctaccagacaatgcagatgggatttgcccagagaagagcaccgacccacaacttattgagtcagcaactgagtaaatcagggaataaaaacctctatctttagatacccctgtaaatatctgttttacattttttttaaatcaaagagtggttaataattgctgctcagctgagccctcttgcctatagcttacaatgcttccacttctctgagcatttaaaataaggcactttgtctagaaacccactgataaaaaaggaatttgtaaa

SEQ ID NO: 57030 - DNA, 1054 bp, Homo sapiens
agaagaggctgaattctaaatatatatccaaggcagagccatcatatgtttctgagaaactgggtgcggaaagtgaaggcaagagaaaaatccaaggtgatgtttaagtttccagcatgagcaactgggagattggaggagcatgtctgggtggaaagaccaagagtttaattttaagctggggttggtaggaagaagcctggatatagatttgaagcccagaagagtaatcagagttggatgtgtacctttagggtcaacagcatatagatggaacaagcgcacttaacattttcacgataaaattcgtgactaaggtgttcaggatcttgctggaaatcaagattgatgatattgacaacagcaatgtaaaagaaccaagcacatgcatttgctaattaatttgtgccaatttgggaattattcaagtgcaaacacccatacactagtattctgtgcaaatgtatagacataagagaccctttttggggtacaatagtccactatccaaatctactcaattaaatagttttctaaagtttgtgtatttcaaatgaatatgcttttactataagaatctgtgtattaaaaggaactgaaaaatgcttccaattatttttcaatccaacataaattaattattctcaagctttctcacaaaataattgctccctccaaaggtggcaaagcatcaatcgtttcctcaacacacacactcaatcatttcctacaataaagggagaaaaatgacatacagtctggcaagattatgcttatgaaaccagtttgctagtgaaaataagcaaagtgaatttcagcaacagaaaactggcctaactcctctgggttaagcatggggagactgatcttgtgtcccgggaaaagtcgcagtgataatagaaactaccagagaaagaacattttaacctccaaattaagtcaatcactgtggtctgctggggttcttctctagtcagcatgtgctggggtttgttatggaaatgccacagaactttagaggcagtgaagtaaatggtacaatgagacactggct

SEQ ID NO: 57031 - DNA, 1063 bp, Homo sapiens
ctccaaccccggcggcggccttaagattcccgggctgggatccctgctgcagagggggtaacggtgtctggcttgccaagcaatatttgttgtggtctatcatggaagaaataaagtcgggcaatatgaattttttttttctcaaatttgccggatggctgtggtgtttctgactcttagttttctcattgtgaaaaaggaatgattatcttcttcgatcctctcaagagtttccttgttttgagtagattgatagctctttaaaggatgctaagctcagctaatggaagaagagtctagtttctttgaggctttgattttggttaaactatagagctcatacctttctgtatggtgcagcttactattgtctttggattggtaacttaaaaaatacaaataacatgcctttgagaaccaataaaaactatggatattatccctataaatttacacaaatccagatataagcatgcaatgtgatatacctaagggatatgtgaaccactgagttaagaactgctttagagggagatacaatgtgagacacaggctttgggataagactttggtttgaatcctggctctgctctgttaccttagggcaaagttacttaagcatcttgaatctcagcttttttaccaaagcaggactaatactaacttacaaggtggtgaggattaagtgaaagaagatacataaggcacttagcacatagtaggtactcaataagcgatagctaacagatgtctattattattcaaggaattataattttcaaatctgaaatgcagttttaatgtcccataaggtgactaccacatacatttttctcagacttttagtaaactgagttgatttgactttatctcagtactactcttgacctttcacaactttcgtaggttcacagtctctctttttctaggaacttggctgtgttgtcctgcctcagagacaaattcatctattgtaggcctagcccctgcctttgaaaacaaggaaaggttggtagaacatcaacacagcatggaatttccagggaggtctcatttcaaaact

SEQ ID NO: 57032 - DNA, 1900 bp, Homo sapiens
ccaatcaacatctagctcaatggggcagtccattgccacagggaaagggcttggtgcagcttccctcacaacacacacgtcattctaggccattccacgaactgtgctcaaaagaggaaaacagtgcaacagttccaaagctgatcagtctcgtggtgagcagcgaaactatagacttctctaacaaaaccatggattctaggagggactgggaaagagaaaaacgaattctggaaggcaaactacaactcccaaaggcccttgcgcggactcagcgcgcgagggacgaagggcggtccactgtaaggggaaatgctgaggatcactgggctcctcccggctttctgaacgcaagccagcaagtgggcgggacctggggcgggcggagcggcgaaagcatctgctcctgcgctttgtggtctcctgcctccggcttctccgcctgcgacgtcgaagggggcgtggcctgcgcagaggctggtgggggtgcgggcgccgcgggacttgggtgacgcgtccctttccagctcagcggtgtgtgaggtgtcgcggccccgccggcgattggctgttgagaggcgagtacgcggcggccgttggtcgctggcctcacggagcaaggcccccggcgggcggggaggatatggggcggcagtggcggctgcaggaggcgggcgtggacgagccggtggctgcagcggcggcggtccccggagtcctgtgaagcgcccctgtccgcgcctctgtggggccctcagagagggctgccaggacgcgagccactgaggagccgctcagccagcgccatagcccttaggactatcggtcacattctcgcgctcctgctccggctcctccatcttggcctcggcagtggcggctgccgggaggatgtgccgccttctggcagggggaagaaggaggagaagatgaagaagcaccggcgggccttggccctggtctcctgcctctttctgtgctctctggtctggtgagtagccgcgacgacaagggagttcccgtgaggggagtaaatgggagggagcagcccaggtcacaccccctggtcattttggcttttagggtccgggtttccaaggcccccgtggaagggacaaaccgattacttctcgactctccatctgactggtctggtagtgctctgtgcggagattttcatggtgtattttggaatttacagagactcagtgggagagagagaggtgccaaggtagagggaaccaccaagtgcctttgtactcagttcctctaccccttggagacggtgcagggtttggggtgggtgttcagattgatggtaagtaagttgctccgatttgccgccagtctttgcgttcttagtgtggtaaggggataaagcacgtcggatgtgatgcgttccggacgtgcgattttaaaacgtgagtggtcatgaaggtaagagtaatgtataagcagtagttctcctggacatttctcgcacagcgtttgatcccaagtacactcgggccgctgtttttggaaacttggggggcgtgtgtgtatgtgtgttatgaagcactttttcaattggtttggtggagagggtgtcttagatgtagtgtgtgtagtagtttttggtaatgccccttagtgacgggaaggtaaatgctgtattttcaaggcgggaagagtgctttgtccctaaagcactccttaagttttacggagtttctgttaatcccaggcacttctggagttttttgaggagcagagaaagcttgtaagtcgagggactgctgtcaccgtacttggaaaagccattctttcctcccagggaatttcttcaaagatgtgtgacaattgatgactgaaaagatgcttcttcagtctaggcgatttgctgtttgttatattaaaa

SEQ ID NO: 57033 - DNA, 1660 bp, Homo sapiens
tgtcccttaattagtaaaaccttgtgcatccaccttaattgtctataagttatgtacatgtgccaatatagtaatagtatattagtgtatgtaattaatgcaagttagatatttaagaaaaatgagaaaaaaataataatttctgttaacggtaccttttgttctcattaaaataataatttttagtgagagctatgtgattgacctactagattattttatgtcatagtatagaagaggaatagcttcaactacttaggagtcagccctgtcattttcttgttggctgtgcttgcattattaaattctttgcagtaatttttttaaaagctgcttcccgatgttgtgagggtcaattcagttaaaactgaataattcctaagtctacctaactggggaaacataaaccacagtgaatcatggtgtgctgtaagtaaaacccattgtttgtgggacttccactctttccctgggtttctgtatgaatccttacattaatcttagtaaaacttattttttaaaactaaacaaatctattcttccttcaccccaaaggatcatcttggagaagcttatatttagactttcgggaagagcttgacatttaaacaagtctcatacatttggcaaatataacaggtacttacaaaggtttttaggaacagcaaaggaagaattcatatcctacttgtggttctgtcactaactgtatgtctttggacaagttacttctgtgaacctcagctctcatccataaaatggtctgcaggatggatagttcacaatgagcgaattttgttgtaggcagagagaacacttacccagttatctagagcgtgagtgtatgtgaggagagatgggaagggaggctagagctaggttttgaaaggatttgattatcatgcagatgaattctaattctaaccacctgacagaggatgagtaagtgaagtggtttaaactggagaacaggagcatgaggtcacatggatcttttaattagattgctgtggagggtaaagtggaatgtaggggacgtactttggaggcacgaggtcctaagtcgtggtcccactagaagagagttgatatctaaatcaagatgttggcctttttgtccttagtagtaatttttctgagtatgtcagaccagtttttatcagtttaagaggtttatttcctggtttgtgattacatttctgtacccttttgctttttctctcatgattgctggtctattaatatacataagtgagcagaaaaaaatttaaaaactagaacaatatataagctgttttttcttttttgaggtgatgaatagagcatattggaaacatatcgataaaacattttgaaaattccccaggaaatctggaggaatttttttgcttgtttctgcttctgtctctaaactttcaaggtacggaatctatttcttttctgaataatatttgaaataaataaaataataaaacaatcccacttctccaaatcatttgatgccttttttttctttccttgaataaaccaatgaaagatgacctttacaaaaatgatttttttagtggaacttaatgtgaaagactgaggaaaaaaagtttatctttgctctaggatatatattctgaagaaagcacctggtatttttatttataagagg

SEQ ID NO: 57034 - DNA, 1005 bp, Homo sapiens
aatagagatttttgaggaggtaaatgatttaattttgtgaaaggttggcaagctggcagtagtgcagtgcagtgcagcagataacagcattaggctaggattctaaataactggattttagtttgcctctaaccaaactctgttcaacatcccctttctgttgtccatctcaatgcaaagagatatttacttaggcttcagtgtgctgtatcctatacaggattctggtggacaaaacaaagtaactgctttcttggagcacactgtcactgagagtacattctagggcctaaaattatgaatctgtgaaataaagttcaatgagaaaagaaatgttaagcattttttgtttgttttctgtttgtttgcttgtttgttttaacttgggcaactagaagaattggtggtggtcaaaaagaagtggaagagttggcaaagggcttggaaggggaaggagctgttagttggaggtgaatggaatatccaagtggagacattttatgggcacttaaaaatgcagacttgaatgcagataaaatttggcctggagtgccaggcacggtggcttatgcctgtaatcccagcactttgggaggtcgaggcaggcggatcacctgaggtcaggagttcgagaccagcctgaccaacatggagaaaccccgtctctactaaaaaaaatagaaaattagccgggcatggtagcgcatgcctgtaatcccacctacttgggaggctgaggcaggagaatcacttgaacctaggagacggaggttgcggtgaaccaagatcgtgccattgcactccagcctggtcaacaagagcgaaactccgtctcaaaaaaaaagaaaaaaagttggctggagttatcctcgtaaagcagaggtccccagcccctgggctgcggaccagtactgctccgtggtctgttaggaccctgacctcacaacaggaggtgaacagcaggtgagtgagcattactgcctgagctccacctcctgtcagatt

SEQ ID NO: 57035 - DNA, 1046 bp, Homo sapiens
actgttaggttctctatgcaaaaataatttggaagcttctatgcttttaaacagttgaggtaactttaggattatctgttcttaaatatttgttagaatttataagaactggtactttccgaggaggttagctatttgacagctttctgtgtaccttgtgtgataattatcagatactgcttctggtgaagactttcctgttgtaccttcatggaattcataatgtcttacttggaatgctgataataatgtttatgtttttcttatacgtattgattttcgtcattaaattgttaaaaggtattaggataggaaccatctgtctgtttatcgcctcaaattctagcccatatagaaatatgttgacttaacaacttttcttctttctttctctttctctttttctgtttgttggtggtggtgggtgttttacaggcttcccagctggcgtgtatgttgtaaagagagttcttcagcttcagcgtcatcatattactctcaagatgacaactgcgcactagaaaatgaagatgtacaattccagaaaaaggtgccttaaataaagttaacattataatttgtgtgtcagctttctgagagtgtctgaaaacattcagaataaaagtaatttcaaaaatgccatgccataatttttggtggagattcgtatttttctttgctattactcaggtaattcttaaattatgacggctcagagatatttatatgtttattcttgttgcttgtatttggaattttgtaacatccttagtcctgtagtatagggtagtgcatgttcagagagctgaaaatgagtgatttgtttttaatgatctataatagagtttttaaagaaaccccaattttgcaaatgagaactattagaagtgagtattccagggagaatctacagtcagtggctttgtagtttgttttatgtaattaggtgcagtaaatataaagactccaaaaaacctcatggtcttaaaacatgtattattttaccattctaaatgataaatggagagtattgacttgatttggct

SEQ ID NO: 57036 - DNA, 1154 bp, Homo sapiens
tgagactctgtctcaaaaaaaaaaaaaaaagcatgtaaagtatctcattaatttttaaattttgaatacatgttcatatggtaatatagtatttgataataaggcagtagtcattttctcaaggcctccatcataaaaatgcagatgactatttatatttttttgtgaatttctcggtgtaaataattccccaaatgatcatactttatattctccggactgcgtgcctcgatgtttgtttgtgctcttgtactggccctccttttctttaatgcctagctcttctaattcatcatagtccttagtttctttttccttgagctgaacatgagtacctctcacttgatattcatttattgagcatttaaacacctactgtgcgctagatactgtgctagacactgggaatatgaggatcaagagaacatagttcttactgaggacatttatggtatagttgaagaagagagggagacatgaataatggcaattgagttgttatagatgcagtgataaaagtgtacagagaacactggaggcataggggaaagggagtagttaattctgtttagggttgatcttggaggaggaggtgctgatagaggttttcaaatatgaacaggtgttaggtagatttcacattgtgttttggaggactgaaaggcccaggtcattcaagactgaaggagcagtaagaatcatttattgcttcatggtgttacttgaacatatcttatatcgttgcttattgatacacattatttcctaaactgctcagggtcaagaactatgtattgtactgttttgtacatgtccatagggtttctttgttgctactatcattcatcaattagagaagagggaaatctctgtaggtcctgatgcaaagtaggaaataggtagggagaaagtgctttcctagtttatgaaatgccatgaaaaatgcttagggcctgtattttcatatgaaatgcattccttagggcggtaatattggaagaaaggatttttataaaagtactttttttagtgaacattgtttatattgtcatttttcagaaatgctttccataaatgcccgttctgctaaagagatgttatattaatctcaacatttaatttagctgacttgtttttttaaacagaatacagag

SEQ ID NO: 57037 - DNA, 1053 bp, Homo sapiens
taattatcttcagaatacaagttaataatacaagattaaatttaggctcttcagtcagaactattttaatggaacattttacctttcattatttgtgtgcaaaatacaaccagaccaccttatattttagagtgtgattcttataattaaggcagggcttatcacagtggaacagttttactttcttttctccttctgagttctaccttgacttcatgcactgtagaatttcttgaaatagtatcaacacagcaatttaaacttccctcaggtaagcaataactaagttacagagatgaagtatattccataaacttaacaaaaacaaaaataaatagggtccatgagtagttcagtgtgctgactaccacatccatatttattcctctttaatttggggatcttttgttctctgctttctttttcacgtattttcagtgaatcttcacttacgactaactaaacttcattctggagactttcactatcacgggaccaactgttttgacgatgtttcttacaaatataggagctcaggatttcatagtctaacatcttgaaggaactacttttctcagtgataccaaatcacgcatatgttaaagtttagttgtcagatatcacatccatgaataaaattagacaaacgttaaaacacatctttgaaggtatttataataatgtcaaatgtaaaattcaagcatggcagctaactttgtcctagatttgcttgttctccttagcagactgaaatttctttattaccttagagacttaaactgtttgtgagtctatgctaatcggcaaaagagtagaattttaattaactgtattaattactttctaaatgaattagtatcccagaaaaatcatgacagataatgagcacattatgagtaatagccaatagttttatgtagtatctacttcagaataactctgtcccgttaagtttgtgtgagtgggagagaatttgctttctgatgccttgtgctagcctcttatttcaaggatctgtgagacactgattgccgtacttatacagagaatgct

SEQ ID NO: 57038 - DNA, 1054 bp, Homo sapiens
ctcaaaagcatgctcttatgtagcaaatataaactaaatgagacttatattgtttaccagagtttcctatctaatagattttgtacacttctcaatatagtgttagtgaacacatcaaaactttgttttaggaatacagaaatgattcaataatggaataaatgtctgtattcattattcagtttaagaggaaaaaaagtcacaagattggatgcccttcctcagtattccttctcttgtcttcagatataaccactgtcttgaatttagtattttttttgtttagttttagagcttttcaaataagtataaataatatatattatatggcatagtttaatataaatgacattcttaagtaacattttattcaacattgttttgagatttgttcattgtttccactgctctgtttatagtgactactgcagttcatccattcctcatttaatggatatttaggttattatttttggtattaaaagcaatgctctaatgaacattcttatgcatatcttttggacacacatgagtgttttcacttagatttatacatggggtgtatttagggattatgcacatcttaatattgttaaattttaaactccttttagcatagatttctcttggctcaacagatatttcacacttggccacagactatcacactttaaactccattagatttgtataatttatgtcagcatgccccaacccccaggccacagaccagcaccagtccatggcctgttaggaaccaggcgcacgacaggtggtgagcagcaggtaagcaagcattatcgcctgaattctgcctcctgtcatatcagtggtggcattagaatcttatatgagtgtgaaccctattgtgaactgcacatgtgagggatctaggttgtgcactccttatgagaatctaatgccttatgatctaaggtggaacagttcatcccaaaaccatctccctgccccatccatgggaaaactgttttccatgaaactggtccctggtttcagaaaagttgtggaccactgatttatatgatatctcagg

SEQ ID NO: 57039 - DNA, 1022 bp, Homo sapiens
ttaaaacatctaaaattatctagcttcctttaatggatgtattaacttatattttaaggtggatgcatggcaagtatacaatttattcatttgtacaggctatatatgagtaattgtttgctttagagttttataaattatttttttcaacgacctatgcttatatcacttaacaagtgaaggaacacatcctaaaaagaatgtttaaattatctcaagagaaattcaacttttaagtaaaccaaaacctttctttttacgttttttattttttcaaaatataatcattcattataaattggaactttaatttgacagaaacatttgtatttatttctaaaatttatttgtattatttgaaagttgaagtcttcttactttttggtgtttctttcagagctctgattatacaaaaccaggagacattgaccctacatcagtagcaagtcccaaagatccagaagatataccaacatttgatgaatggaagaagaaagttatggaagtagaaaaagaaaaaagtaaggaagtatttgagttctttaaattttttttttaagtatatggtgtagtttaatatgctttctttttttgattggtaaaacaaaataaaatttacttttgaaaactttttaaaggtgaaacttaaccaagttgctgttgatccatccatccatcatgtacctgtatataattacatacagttttagttttaattaaaatccattcttgtaaattattaagtgagcataaaataaggcatagcagtgattttcatcacaatacgaggaaaattgaggcatggaaactattttaaaattcatatggaactcaaaaagaacttgcataaaatccttgggtttaaaatattctttaacttaccaaaaggtgttttacatatgatgtttcaagaacatacctaaagaaaagcttgcttatgttatgaggcagaggagggtgactaaaattataatttattccctgtgtgatgggttattaggtgcagcacaccaccatggcac

SEQ ID NO: 57040 - DNA, 2082 bp, Homo sapiens
aaaaaaattgatatacaaaattttcgatatatttaaagtgaagaaataattttctcttacgtgagttaataccatagaaataaaaactgtgaaacctttcttttgaatgcattttggaaaaatgtcaaaatatcctcttttaaaaaaaaaacctcattttgtatatttgttttaacttgcttgctattttgctatgatgataatacacagaaacgttttagactgatatgaaaactcatccatttaaatgccttaaatagattagttttacattttaattgaaacagtagatgacttaaatgtaaggagcagccattatttttgagtccaaaagccagtggccctcaaaatatgaccaaagttgatgtttgtcatttattgtgaagagattagtcttaacgagtgttttgttttggaagtctttaatgaaattgttgttgatagggtatttggcactagcatggtggaagaatatgaagaaattgctgattcccagtatcactcagaacgccaggaactatttgatgaggactatggtaagtgacatcaaacagatgactgttaggtatattttttttactttttaaaaatcgaatagtaatgggggagtatagcttacttaaatcaatatgactgttgtcttcaggcttttgttttgttgtttttaactctaatcaacttttacttaaatctgttttctaatatgattgctttgtattcgtattgctttccaagcttatctatcacttatttgtaactgaaactcccttctataacattaatggtataaattatgattatatccctatgccagggccaaaaatctgttaaactcacaagatactgaaatagtagaaatgagctttaatgcctgtgatttcccatgagcctaagagcaagcacattttggcttcctgtgagccattgagaaatcctgtgactctaaagagttagaggaaagttttatgacactctccatttcctctttaagtccttattttaagatgtgttaaactattgtttgaacaatctaaattttctcaagagtgaaatgaagacattgactaagagttggtaaagtatattgaaagcttgaataaaaacgtcttataaatgtggttaaaattttggtaagcattacagttattttccttggtttatatttgtttgttaaatggtttcttaatcttacatgctttttgtgaacatgttttagatatatgattcatatttatcataaaatgttttaaatgtcagctgactttgacaggacataatttgagcttttaaatatgttaccattggagctagatctcagcataattacttttattttcgtttttaacagattatccactggattataatactggagaggataaatcctcaaaaaatcttcttggttctgctacaagtgagtattttgaggattttctattcattctactactttttcattctgacacacacagacattttgtcatggtatggttgaggagaattctcccagtgttgaactttgagttgaaataaaagatactgtcttttgaaaagtatttttatagaaatgcgataagaatatatgaaaagaaagaggagagagacaaatgcaatcgtaataaaggtgtttcttctactctaattaggcgctgacattttgggacagattccttatagtgaagaaagggctatggattttcttggggaaagaattattaaaacagtcataccacagttaatctatgggtatggttagtttgccatttagttacaaaatataaagggtgctcctaccatcatgataatgaataccaataagaatactagtaataatatactccttgtaaactaagaaacaatgaataagatatactggtgctttagtttgttgttattccaaagtcgaatcccaacctagtggtaggctcactaaggagactactagaaagaccattacctgactgacactttatttttcatggttagattctgtgtaggtatatttcaatgatgtttttgattatttctgaaaaatgtaaaattaactacaagtagttttctttttatttgaaaattattaat

SEQ ID NO: 57041 - DNA, 1063 bp, Homo sapiens
acattactggaaggaaggtcttctattcccagtaccattttttatggagttctgatattttgttatgctcatgtataaatatatctatgtagatattgaggtttgtaccacttttttcatgtaaatatcctccttcaaaagagaagtagggttagcaggtatgcaaattgctttttacaacactttgttttatgaccttgacttttcattaatctgccccatacctgtccccagccaattaactaaagaatttgtatgctttatgatttaaaaagattgctgttttggtcaatgagttttttaaaagtcatcaaagagatttgattctatgcaatatcaatttagaatttaaccatattaccatagatatgataggctaatcattgaaaatgttttctgcttttttttggataatctctgttttgtttttacctgtgataatcacataatgtaggaaaagcatttgcttttttacacttttttaaaattttaaactgtagagaatttttaaagaaaaataggtttttctgtaaaataagaattttggtcatcacatttttttccctgtcccagtacagactgtatgttgagttatacttgagtttatagtatgctgaagacagtgttttggtaaagtgtctagggaagttttacaagaaaagtatatttaaggccaggcgcggtggctaacagctgtaatcctagcactttgagaggctgaggtgggcagatttcctcagctcaggagtttgagagcagcctgggcaacacagtgaaaccctgtctctactaaaatacaaaaaattagctggacgtggtggcatgtgcctgtagtcccagctactcgggaggctgaggcaggggaattgcttgaacctgggaggcagaggttgttgcagtgagccgagattgcaccactgcactccagcctgggcaacagagcaagactccgtctccaaaacgaaaagtatatttaaatataaaattccttttgaacataaaaatttagatacacactttacacttttggctaaaatttatttgtgtcctatattggacttta

SEQ ID NO: 57042 - DNA, 1050 bp, Homo sapiens
gagattttgatgtcctaatggtacttcaagtatgttattcttttatgtgttaaatagctacttgatttagaaagccatcttttccttagagaatgacagatgataatatttttggcaagaagaaacagtcttgcctttttgtttttttaaaaaatgcttagatccaagtgaacacttaaaatgactcatttatttcctctcatttaacaactctttcagtatctagaaggcatattaatcacgtaaggttacacaacattcatagtcacctgacttgatttaattatctgagaaattgagaaacgatatatattacttgtgatcttatatgatcatttcttcctaaaagaactttgattttttaagaaaaagtctgcagtagcaaacctatttggcttttttcttctcttccaagaaatttgttttagtaaaatattttcatggtacagcttttaaaattgaactcaacattgggcatctttcttaaaataggaaataaaagtatatctgagaatgccactgccacagctgcacctaaaatgcctgaatcaactcctgtttcaactcctgttccatctcctgagtaagttataatgtgatattaaatagaattttgttacaatggagagataagtatattagtataaaaaaaggaatttgtgatttgtgtgtgaaatgattacctgtagagagctctgaatcataggatagacattctgtggccacttagaaaatctgagttgcttcttcccattagtgtatatgcatactgggaatataattcagatcaaactttttttggggggggtattatatattactttcattattcacaacagtgactcttttccatactggaaataattgaccttactctgcaggtataggcttgaggacaaattttaaaggcccccccttttttttattaagttcaagtttaaaagcattgatctgtggtatccctagaaagctaccaaaatacctagagcagtggttcttgaataatgtatttgccacacagcaagctcttaactgttccatttctctgaa

SEQ ID NO: 57043 - DNA, 2623 bp, Homo sapiens
attactttcttctgtctttgctattgtgacattagtctttatttgaagacatttcctggcatgcttagtaatttttcagaatgggaaaatgtgtgtttgagcataattatttttggtattgaaattaccatattttttcatattggactttttatgtataaggctacacccagtaattaactatctttatcttggaaggaatcacaagcattataatttataacactgtccccataagcttcatccccccactctcctgtatgccacatacatactccacagcctcaaaatgggatagaatattaatagtggcactagtagtttaatagcagcactgttagcatatcataagccagaattgttattaaagtggttaggtatttggcttagaagattagcctagatgatagcaaaattattttaggaagggagatatgtttcttgtccttaaagtagataatcctatgtgtgtaggtgtgtgtgtgcgttgtgtgtttaatgctgtattggagttcctcaaatcattcttagaaaaattatgtttgagaccaacctagctgccttttgaaaatagggtattcaagtacaaagtgcactcataaatattaagaatcctagattctagttttagctctggaccttatttaagctagtttattaagctagctcttagttggcttaatttctgatgtgtaagggatagtgaagcttgtaaagattcagtgaatatttatgagaggaaaggaacactacattcagtgaatggaagtattcacttagaaacaattcttaaacagattaaaagaaagcaagtttgatatggtaaatatggtggtttgagtcatctggctagtcacttgataaatagtatttctcttatcatttctgagcagtatttgtttttataataaaagtgttttgtaggtgaaacatttatccaaaaacaaatttcttctatatttccaaccttttatcttctgtatggatacatttatttttctttaacatatttcaactttagacttctaagtaagtgatttataattatgatatatgtatttctaggtatgtaaccactgaagtacacacacatgacatggagccgtcaacaccagatactccaaaagagagtcccattgtacagttagttcaagaggaggaagaggaggcaagtccatctacagtgacccttctgggcagcggtgaacaggaagatgaatcatcaccctggtttgagtcagagacacaaatattttgcagtgaactgaccacaatttgttgtatttctagtttttcagaatacatatataaatggtgttcagttagagttgctctttatcggcagcgcagccgaactgctttgagtaaaggaaaagattatcttgtgttagctcaaccacccttactacttcctgcggaatcagtagatgtttcagtattgcaacctctgagtggagaattggaaaatacgaatatagaaagggaagctgaaactgttgttctgggtgatttaagtagtagtatgcaccaggatgacttggtgaatcacactgtagatgcagttgaacttgaaccaagccattctcaaactctttctcagtctcttcttttagatattaccccagaaatcaatcccttgcctaaaatagaagtatctgagtctgttgaatatgaggcaggacatataccatcaccagtgattccccaagagagttctgttgagatcgataatgaaacagaacaaaagtctgagagctttagttctatagagaaaccatctattacctatgaaacaaataaagttaatgagttaatggataatattataaaagaagatgtgaactccatgcaaattttcacaaagctgtctgaaacaatagtgccaccaataaatacagccactgtacccgacaatgaagatggggaagccaaaatgaatatagctgacacagcaaagcaaactttgatttctgttgtggattcttcttcattacctgaagtaaaagaagaagaacagtctccagaagatgcccttttgagagggttacagaggacagctacagatttttatgctgaattgcaaaattctacagatctaggatatgctaatggaaatcttgtacatggatcaaaccaaaaggagtcagtatttatgagacttaataatcgtattaaagccttagaagttaacatgtctctcagtggtcgctatctggaggagcttagccaaaggtaagctttattatgaattagcacagtcagcttcacacagtgagttaagcagcatagagtatgacctgtgattacaggagaggatttaattatctcatgatataatagaggtaagcgcaattttagcaagagagagaaagaaagctacttgaatgctgatcagtgccttaatgaattgattttttgtttttaattttaaaagtactttccagtgacaaaacacttttattaggctggcaacaagtttgaattatctatactcactttcaccttttttcggttgcttaactttagccactttttctgcttgattcccagagggctcatggaaaaaaatgatagtatatagaccttaaagcttttagtggaatttgaccagatatcacttaag

SEQ ID NO: 57044 - DNA, 1009 bp, Homo sapiens
attcttcagaaaattttcaatttgtctttgcgccaactgctttgctttaaaaacactgacttcttaaatatttctggttatatgctagtttatatatatggaacacatgttaatttgaaaagtaatttaccaaattctgttatacagtatttcacattgtagcagtgggtgacaaaaataaataaataataattcttgttggggagggttagacacggtcccagatacttcgtgttttgtttatttctaaaatttctgttcaaagtttacttactcattgagattcctattaatacatttgttttggaataacttaatggttttttttagattatttgacttcaatttataatgttaatagtttgtagttaatattcaaaaaaaaataaattcctttatcataggatcagcggcaaactgaagccatccagttgctacaggcacagctgaccaacatgacacagcttgtttcaaatttatcagcaacagtagcagaattgaaacgggaggtaattgttattgctggtattgcgagacccaatgcatgtatagaggttgtcataaagccaggcttgttaacatgaacatggtacctaaaactttgaccaaacaaaattgtcatttgtagtgaactttttcaaaaaccagaatatggcatttttaagttttgaaaatatattatcatagtcttttgtaaaatatggctttcataatttaggccatacctataatataggtataaaacttctagcaggccttttgtaagcattgatagtagcaacacgtacttcattttcaattcaaaaaggcctataaagttgcttaacaaagcaaacatttcattgatttaaaaactttttattgagcatctagtgtatgtgaagtgcgagctgtacactcctaggttgtggtatacggtagttaatagtccctggcctcacagggtttacgtcctgggggagggatagaatacatttagtaaataaataaatagatgataatttctcct

SEQ ID NO: 57045 - DNA, 1109 bp, Homo sapiens
aaaagtggagaacagtgtaaacttgttgaattcagaatatttgtaagttgtagaaagataagccttaaggaactaaggttgatctctaagttttgggcttacgtaactgggtggttgatagttcattttataagatgggaaagactgggtaaaagcacaattattttttctccttgaggaggagatagtgtaaatggaaagacaaacaaaatgtgacaaaatgttaacaattggtgagatagataaaggtgtaaatatatttcttgttttatttctaaaacttccataggtttcactcctatagaaagaattggaatgctgcaaagaattttttttctttaatgtcatagtttattttcaaagagcatgccctgcatttctggtctttgaagcacattaaaaaaatacttaaaatgatttgtcctttgaattttagatacccttatatttttcctaatatgatttcctatgattattatttaaccctcttctcatctcaggtttcagatcgacaaagctatcttgtcatatctttggttctttgtgttgtcttgggactgatgctttgtatgcagcgttgtcgaaatacttctcaatttgatggagattatatttcaaaacttcctaaaagtaatcagtatccaagccctaaaaggtaatatcagcattatatttcacaattttattttttttactatgctttgtatatttttgagaaattttaagcaaataaagggagactgaggtaatttctttccctatatgattatcttgaaaccaaaacattaaaaacatcattcgatagtaagatggtcctatgcctaacctggctctgtagactataatagagaaaacactaatagtaagtgcatgaaacccctgaaatatttggttgagaaagatgcttaaatgtggaattcaaaggaagaagagaatactattttaatacagtaccttttagacaaagatctctaaatttttttttccacctgtattagcaataactggagtgttagagttagtcccgtgtggtatgtacagttctcaataacctctgtgtagcctcaacaaaagagtaaattatatgtgctttactcgttgtaaccaat

SEQ ID NO: 57046 - DNA, 1070 bp, Homo sapiens
agggatgttttgatattttcatatatttgatgactttctcaataaatctctgaaatataatgtaaaaaattataattggttgaattgtattaataaatttcccaaatgtgtagagcttctgtagtgaatttactatgtgtaagcttttgtctctgtcagaccttaaattgtttatttttagtggattgaataggactaaagtctcatagccttttaaaaatgtgtgtctattttgtcagtgtgggggtggggttgggatatatcttgaagctgcttagagtaatgaaaccttagaaactttgggctaaaactaataaatctaatttactcactatgccagaagtgttcattcattattgcttagtgatatatattgcatgttcaagctgtttttagattgggatttcatagttttgatcatagtaataaacagagaaaaatatcttggatctctttttgtgtttatttctctaactggcttccaaacacggtcacgactacttgttgcacattgttaatctacctttgtgacacagtttagaggctagtcttttagggaagtattcaaatgatctgtaggtttggtgtgagcttacccaggaatgtttcttttcttatcaggtaaaagagtgaggctgggcccaaagaaagatcgttattgtattggttgataaccagctactagttaacaacttaaggaagtatagttatttgaagacgaccagtcaagcataggaatcatatcatcttccaccttgcctctttttgcttactaatttaaaatgcataaatatatagttaacctgatacaaattcattggttctattactagaggataataaggaatgaatgatttgtcttattttagtgtttaattatagcaaatccaccaaatccactttacattttacatctgcttttttttttttttacttacagtagacccaaatgatttgtacattgtagaacccctcaagttttctccagaaaagaaggtaattgtttatttctttttaagtttattgctatgttttgtgataataaatgaagaaaagaggttgaaaggttt

SEQ ID NO: 57047 - DNA, 2733 bp, Homo sapiens
ctatattcataggtagcaggtaagcaatttaaagagttttgattcagtagtatttacaaaatgggaagatgatgctagtatctatatagaacataacaatgtatgtgttctgtgctgtttataatactgttttacttttcaccaggaggtggcacttctctattagctcagctctctaggtgtttgataaggttactatgggaagtatcattactaacttttcttttacttgtgttgtagaagaagcgctgcaagtacaaaattgaaaaaattgagaccataaagcctgaagaaccattgcaccccatagccaatggcgacataaaaggaagaaagccctttacgaaccagagagatttttctaatatgggagaagtttatcactcttcttataaaggtcctccatctgaaggaagctcagaaacttcatcacagtcagaagagtcctatttttgtggcatttcagcttgcacaagtctgtgcaatggacagtctcaaaagacaaaaactgagaagagggctttaaaacgaagacgatctaaagtccaagaccaaggaaaattgataaaaactctaatacagactaagtcgggatcattgccgagcctgcatgacataatcaaaggaaacaaagagatcaccgtgggaacatttggtgttacagcagtctcgggacatatctaaaattaattgaacttttcatacagaagacttttttgttgttgttctttgaagaacagtctgtagtatttgaagggtttgggggagggagaaaatattaatgggaaaggcattcagaaattatggtttctacctttttaaaaagtagatgggattgtgtcaatcttggttaatgagctacagttttacaaagctgatcacttcctataaggacaatggtagacattttataaagatgttttttcacaagattaattactgggacaaaagtaatttggaagcccagttccttaggtgggataggaatgaaagcctaaacctcttcctttagctttgttcctatttcttgcaccttcccatatttatgtgccttttgtctatttataatgccactggaagaggagggataactttttctgttatttgatttcttttataactttgttaggtttttgaagctgcaaacactacaatgctttgagggggtctgtgcctgaagctcaggagtgtggatcagacagtctaaagatcctaaaaacttgccaactggatctttgtttagcaaactcactggaaatgaacacttaatggaatttttaagtctgttctgttaggtagatggtgatgctcttgttattttcacttattcagactggattacttcttacttagttactaactcaatgaggaaaaatccctacaggatctttttttgcaaacaactgatatatgcagacaaatttttgacaaattcaccttttaaacacacttaaccatttgtgaaggttttctttagcttacattttaaacatacacaataaacactaatcctccaaactttcactgtttttattagtatgaatataaaatttgaaggtttggccaattagtacaagtctcatgatataatcactgcctgcatacatatgcacagatccagttagtgagtttgtcaagcttaatctaattggttaagtctaaagagattattattccttgatgtttgctttgtattggctacaaatgtgcagaggtaatacatatgtgatgtcgatgtctctgtctttttttttgtctttaaaaaataattggcagcaactgtatttgaataaaatgatttcttagtatgattgtacagtaatgaatgaaagtggaacatgtttctttttgaaagggagagaattgaccatttattgttgtgatgtttaagttataacttattgagcacttttagtagtgataactgtttttaaacttgcctaatacctttcttgggtattgtttgtaatgtgacttatttaacgccttttttgtttgtttaagttgctgctttaggttaacagcgtgttttagaagatttaaatttctttcctgtctgcacaattagctattcagagcaagagggcctgattttatagaagccccttgaaaagaggtccagatgagagcagagatacagtgagaaattatgtgatctgtgtgttgtgggaagagaattttcaatatgtaactacggagctgtagtgccattagaaactgtgaatttccaaataaatctgaacacttgtctttattaattactggctcttctgtcttttaaaagagaactcagaaattattaatctttgaacagagatttaagtttttgccacttttaaagttaaatatagcagcattccattcaatattgatcacatttcagccaactacaaaatgatggtacttttacataaacattttgctccctatgctatcagaatttcagtttttcatatctaaatacagcataacattttgtaacatgaggtttattttttcctctctcacataactacatgagaaaaaaaacttaagtgaaaataatagatttatgcctattaagaagcaaaaactatatagatatttatccaatgggatttttagtgttccctgatgatcaacctcattttatttcttctaatgttaagtaaagcattaaaacagtatgaaataaaaggaaactagggaattggtaagaacaaggatgcaaagtaaaacaattcttttaattga

SEQ ID NO: 57048 - DNA, 2740 bp, Homo sapiens
ggctgcttcttcgccagaaccaaccggttgcttgctgtcccagcggcgccccctcatcaccgtcgccatgcccggaggtctgcttctcggggacgtggctcccaactttgaggccaataccaccgtcggccgcatccgtttccacgactttctgggagactcgtaagtggccaccgcgtagccctgtcctggcctcggttgcgccggactcggaggtgccttccctgtttcttctccctgccgtcctcccggccgctcagccccctgcgccgccctcgccttcccccgcactggttccggcgcgcgccaggccgtgtggcctctgctcagcgtcggctgcgctgctgggagctggcacccgttcggcctgccctgcgcgggccactcgatccctcctggcctccccgcctccggcgtggctgggcaaggccacgccaaggtggggggtggggaggataaaattgtgttctgcgggttctggaaactcaccgcccgcgggagggtttgttgtccatttaactcgtcttagtaaactgtgcaggtagcgtggtcaggccgagggcgcaggggcggggcggcattgacgatcacttccccggactagtgcccagggtcgcaccgccctcccaccctccgttctggaatttgctccctggggaggatgggtgtctaaagccaaagtcggaggacacagctgctggctataggttacaggaaggccaacgtatcatctgagggtgcagtggtatttgcaggcttctgggcacaaaatgtgaaatttaaaaccactagctgccaagtaggtggccgaaagactttttgtccagagccgcctccaatggccaagatatgatttgataacagctttaggaagagccaagaacactctgcgtaggtgtgccttcagagattccagaacttgcaacacttggagggaaggactttctgacgctgttccgctggagtggcctattcttgctagtgatggccgttccaggctccaggacacgtgtactccccaactttgagactctcttgttttccagtggcttgcccctcactgtcccctccgctttctaccttgcttctagcacatgagcttgctgatgatagccaaattgatgacctgtgatctgacttggcagttttaccattatggataggagtagtaaatcggtgttgcccttttttttttttaacagctcctgaatcagcaaactggaagttgcttagttttcatcagaagcattccaggcatgtctagttatattatggttctggagtactagtggtcccactacactgtggggctccaaggcttgacaacagttcttccccagattatatcctttttatatacagtatccagggagacaggcttatgaaattaatcagtgattggacagggctgtgcagagaaccagggacagattcttacacatcatatgcctatccaaccctttataacctcttaagtcccttttccagccactgaatagggaaaagttaagctttgtgaaagataggactaggccagaaaaaggttgagaaatggaatattcaaaccttgaatgcagaaaaatactttagaaatacagcttatggccattcttatacttaggatctaggtagtaatatttctccagcaatccttgggatttttagagttgtgttccttcccatttctacctgcagccctcatcccccatccccatgaaacataaactatttccagaactcttagcttgtatagattaaatattagcataaaacgtatttactgtgccaacagttataaatgctgtcactttttaagctaaccatacttttttggggttttgttaatgtttattggcctctagatccatctagatttgatcaaaagtggtactttatcagggagccatagttaggaacacggtagaaatatctgcatttattaactaatatacaagtctgcctaggatcaggtatagtattccctaccttaccgggaagagaagtttgagccttttatatgtttataacacatggatttttgcctgatttttccaattttctattctgtatatgatcccaaatcagactgtcaatttttgatccaggtatttttgagaagaaaaaattaaaatgtatttctctaccttacccctgatcattgtaaacaactaaagaggttgggtgctacattgggtgagtttaccttatcgctgtttctttaagtggtagaagcagcttcttcatagtacatcttcactaagcaaaatatgtgttttccaggggtcttctggggcttagtaagtgggaaccattctcttgaaggaggaaaccttttgtcttttgaaaatgggtaagaaaatgggagcatgtcactgaattactcttaagtgcagcagtaggaagacttggaggggaaggaaggccaaggtaagacattcttggagtttatcctatttgtagccatgaggtaaactggagtttcacttctgagggagggaaggacgtgaactggcttaaaaccagttccttttgcatgattcagcaaaacagtctttatggactcacagtggaaaaagaactcctaacttttctaatttatcctccttttaacgatagaggaggaaacgccctgttccatttcttctcaacttctggagaccttctgttaagtctcatctaaccattaaatagatcgttttccatagaatctaaggcctagattttactcatagtgatatta

SEQ ID NO: 57049 - DNA, 1341 bp, Homo sapiens
aatatctgagactagaagaatcatgtgtaggagaaaaaagaagggcagttatctgtcttgaagtagaattttttttcattccttacacttctcagtgagtggtaactgtagtttttgctatcatttttcattttcgtttttgcagttgaacatacttttttcactcagagagttggagggacttgcccaagactgcccaatggcaatgagatttcaacctcaaatcaatgttctttttaatgcaagatgataaagagtaggatttagcctaatttaggatagaataaagccaaataatttaggataggttctttggtgttcatgggtgtaatctaatgcccatgatgcaagtggcagagtagagaattagtgcacagcaataattaaagtgacatattgccaaaggaagcggttatagcccattatataataccttttaaaggacagacgcatactcaggtttattttacctgctgagcttctgccttagaagttttcagaattgtgattacattgaataggaaaaaagtctgaactatcagaagcagtgccgcaactttgacaaacaactgattatataataatctgcctctagcatgagactatattaattattatttagctctggtgacttcataagcagccagtgacaacagaaagttaagataataaaatgaaggaatgttacaatttgttatcatccgggagcctgaggcaggagaatggcttgaacccgagaggtggaggctgcagtgagctgagatcgcgccactgcactccagcctgggcaacagagactccacctcaaaaaaataaataaataaaaagaatttgttgttatccacttcagagctcattaatgccacatttgtcacatctccgttgagaaatccacaatggttttgtatctgctatgccatcaagcccctgttttactttcaagcctacacacaatagacgttattccaattttaaatcctcttttccattacttgctaaactctatccaactaagttcctcactctcctatcaatagtttatgtacagagttgcccacatgtttcattaatatcgttcctggccgggcacagtggctctcgcctgtaatcccaacactctgggaggctgaggcaggtggatcacaaggttaggagttcaaggccagcctggccaagatggcgaaaccccgtttctactaaaaatacaaaaaaaaattagccggtgtggtggcgggtgcctgtaatcccagctattcaggaggctgaggcagagaattgcttgaacctgggaggcggaggttgcagtgagccaaggttgcggtgagccaagttcgcaccagt

SEQ ID NO: 57050 - DNA, 1045 bp, Homo sapiens
tgggccatatccttcttcataaggcagctctgttttaaatttttatttgttctgtcctccgcccactagaaaacaaacccaatccctcatctgaataaatgcacaactattcaaggaacaatatcaactcccattagtattatttttatgatagtcatccccaattgacacagcctttccctcgattaaatttgcatatcagtttttcttactgggaaagccagaaccaaatagaattcccttctacgtttagaaaataacagggagaagaaaattatctgtattccagccatccacattagcagttggtgtatccttctagatgctttgtttttgtcttgtttttatacccttgaacattattaatgactgcagagctttctaagtggctttaataacactcaaagaactcttcctatttatgcccctctgtgctttacaggtgtttgtttttggtcctgataagaagctgaagctgtctatcctctacccagctaccactggcaggaactttgatgagattctcagggtagtcatctctctccagctgacagcagaaaaaagggttgccaccccagttgattggaaggtaaagatgtttttaaaaagcagtttctctacttgcctgaagggccagtctctaaatggccaacttcaaggtctgtgttacctgtttctagcacgcaagtacactgggaggatttttcctcatggctgagttcaagatttgctgaaaggcccttttcaaggtctttataacaccttttatacacaacacaaactccctatatggctttccaacttttagataatttggaaaaattattggtcagaatgattccttttcctaatagaaggtttaaaaaaaaaaattttatctaacccttccctgatggcaaaatatttatcgcacaatcttaattggccatttccgttaagtcatggctgtaaaagtactggtgtattaatgtcattaagtatttaatttctcttaagcttcattcttttaaacctgtgctagaattctccaaaatttgttcataaa

SEQ ID NO: 57051 - DNA, 1046 bp, Homo sapiens
tggcttattaaatgaaaatggcactaaaagtttcttgagattctttatactctctgccttcagcaatcaattccattcatacatcagcactctgctggttctgtttgaaatatgttctgtatttaaaactcaaatcttgttggatctctgcagggcttgtgaccaatgaagtcatatttgttgatggttgacaaagcttgcttcactccatcagagaatgactatcaatttttttttaactgtcctatcacgtcctctcctgtcacccattttgaagagtggcagaacttgaagttcaacttcctctgtaaatatccaagtataaagcccaggaacttctagaataacccagatgcgctttaattttttttaatatgttttgatcacagaacttctagaataacccagatgctctttcatattcttttaatacatcttgatcacagctgggggaaaaaaagctttttaattctataccttcctagtagataagtgaagagcagggaaagagacctttaaatattttgctataaaaaaatttgtgataagtttctatcaaaatggggagattgcagaaaaggcttcccttggctcccaaggaggtgtagcaggtgtgagcaatattagtgccatgtgcctttcacacagggtttgcatttatcagtctgttttccgatgatgtgtacatgaaagagtacaccatgtgaagagaagagagaatgattgaaaatgttttagtatagaactcttcttgcagtgggttgctattttctagattttactttttagggaacaaaataaaatcctttgttaaaactgggtcagagaattctgttgtcatattttgaagtatcagatttatgtcctaaagggcagaggcttccttcttcctaggattggcatgagtaatttcttccaaagacagatacataagattttatataatgaaaatggaggaacagctgaagaacgtgtgatgtcaccacatatcttggtccactttgctccttcatgttacttgtttggatcctacagtcccatgatgt

SEQ ID NO: 57052 - DNA, 1050 bp, Homo sapiens
agaccccttagtataaaataaacctattttccctctttattaatctttcaatccttatcctcaaactttttatagcttttgatatatttgctgatgctatttttaaactccttgtgttggtacttttatgtcaattatgattcctctactctcttaaaactgcttttctaactccttcaccagttcctcttcttcctcttgcccccagttgtgagaatttctcaaaattcaatcctaacctttggtaaagcaatctgtaattctctattccatgaccttccctgtcaccagtattatgaagaatgagtctttccctctttagggcacccatagtgctaatagcctcatactgtattctacttaattgttcacaggtttgtccttctgtgtgaattgtaagctttttgagggtagggattttgttttgttctttttttatacctaaaaagtccataaaacagtaagttagtaaataactgaatgaattatcttttagtaataccttatacatagaactcattacctcttcattaatttatagagcttgtgcacctttataaaaatgactcccaacacttatctccatatcttgccccattttaactcctactcctctagcagataagccacacatacatccaacatctctacgcctaatttctcctctgaccttctattttctaagccttcacattgaatgtcattttactttctggcatgtgaaccaagtgattacaacagattcctggatctcatgtcaaagattcctttgatgtgagaatctgaacatttatttatatctatagatttacaattttagtccattttgagagttatagtatctcttgttacatattgttacattgaattatagatctattcataggcaactttaaatgcccgtaggctttgagtttgagctgttacataggtagctgcatggctttttctgaacatccacaaagtaattactattcaaagtgcatactaataaatcaatgaagcctccacattatttgggaagtagtcaatcaaaggctaaattcaatg

SEQ ID NO: 57053 - DNA, 1099 bp, Homo sapiens
tgctgctagatattctcagactgagtgtgttgaattcctggactgggcaggtaaggaagctcacaaggggttagcaaactgactgatgtgatgagtttttctcctatgagttacaggatatgtcaccttttttcacagtgttttgtttgtagatacaaccacagtcacagttggtgataatacatgaaatttccccctctttctttgttttgctattggccataaacattgtatttattaggaactgaacatattggaagctagttgatttaccaacttctgtctcaccaataattgtctatgagaaaataatttctataagaagattattgtatgttcaatatgtatgttcaaggccattttttgagagactcaggcaaagtgggtcatttcttaaatgtttaaaaaatagcatatttgagtaatacatttgattcctcaaatataaaaggttgtaacaataattttagaaaggtttatttaggctaaattaatttatagtgctaatagtcagaatagtagctacccttacggcatggggaacttctgggatgtaatgttctttttcttaacctggttgctggtacatgggtatgtttctttgaaaattcattgagctgtatgcatggtttttgtacttttctgtttgtaagttatacttcaatacgaagttcaaaaaatagtactattttgaatttgctaatattttgcatatatacttccacaaccctgtaaagtatagcttaaagagatttcaggaagatgtacctttgtaactaagctagtatttatgaagtttacagcatttattttgcatggttatctgcattcctgtttttagcaagcatttattgaattcccattgtgagcatagtattgctgtagatacaattggttgttcctaccctctggatatttgttaggtgggagattataagttatggacacattcaacaattatataaaaatatcagaaagactgtgattaaaggttaaaattggcagagcaagtattctgtgctatagagtggtggaagaataggaagtcagagcatgttgggcttgagctgggccttgaagaatggatgggatttgaata

SEQ ID NO: 57054 - DNA, 1048 bp, Homo sapiens
cactcacgcctgtaatcccagcactttgggaggccaaggctggcagatcacgaggtcaggagatcgagaccctcctggctaacatggcgaaaccccatctctactaaaaatacaaaaaattagccaggcgtggtggcaggcacctgtagtcccagctgctcaggaggctgaggcaggagaatggcgtgaacccaggaggcggagcttgcagtgagctgagatcacgccacttgcactccagcctgggcgacagaccaagactccatctcaaaaaaaaaaaaaaaaaagagaaagagcctgtgttatgtgagctgaagtcataggttgttttctttccttgggacattttccaagtatgagtgtagaaaatagcttaatagctggcacagatataaattctaagacgtttttctaatgactaagtaaaatgttagattttcattgcacatttgactatagcaagtccgtgtactcagtatatcgttagtgtgatttcagatcttatgaaaaaggcttcacttaataagaacaagcatacagtctggtttccctcactgcaggtatgatccgaaggagaacaagtggactcgggtagcttctatgagtaccagaagactaggtgtggctgtggctgtgttaggagggttcttatatgctgtaggtggctctgacgggacatctcctctcaacacaggttagtccctcccaaaggcaatcaggttccccaaaagcagaacattttcctggagagtcctcctacaaaacgtgtagaaactccaggttatcctataatttactaggaaaatgcctgatttttccctccagcagagtgcagctctcagctcttcctcagctcccactgtagtcatattctaagtacgttccccaaatatttatttcttcccctgctttccaagctgctggaaatttataatgaattttaaaaactactttcttatataattagttccttttcctccatcacaacttctcctcaaaaccacaacgtactctaatccaagaataaataaaaacttagaactacaaa

SEQ ID NO: 57055 - DNA, 1277 bp, Homo sapiens
ggaaagccacaactctcacagagatttaagtgacatgctttggatcctacatatgtctcacagctccatatgactcagtggtcacaaaactaaagtcaggctaataacagcgtgtacgttttgctcctacatcacatttttacagtcctgttcattaagtaaagatttattgatggccaggcacggtggctcatgcctgtaatctcagcactttgggagaccaaggtgggcggatcacctgaggtcaggagttcgagaccagcctggccaacatgatgaaacctcgtctctactaaaaatacaaaaactagccaggcattggggtgggcacctgtaatcccagctacttgggaggctgaggcaggagaatcacttgaacctggggtcagaggttgcagtgagcagagattgggccattgcactgcagcctgggtgacagagcaagactccgtctcaaaaaaaaaaaaagatttactaagtgctccgagccctggggatacaaaactgaacaacaacaacaaaaattcctgccaagcgcacgcctgtaatcccagctactagggaggctgaggcatgagaatctcttgaacccagaaggtggaggttgcagtgagccgagatcacaccactgcactctagcctgagtggaagagcaagactccgtctcaaaacaaaacaaaacaacaaaaaagttccttgccctgctggagctaaccaattgtattgagggagacaaacagtaccataccagtagatggaagtgctgtggcaaatatcaaagcaggggagggggctagggagtacagggaggggaatctgtttttaaaggtgttcagggaaggcctcattggaaaggtagcattttagcaaaacctaaatacggtaaaggataggtaatggcagctttgggcctctcactggcaggatattttcttccatatacagctttctatttttactaggaattttgattaagcataatttctgaagacagccaaatttactgtcacttaatcactataatcttatctgaggacttgtttcttagtaactgtcactaaatagaattagtaatagatgacaaagtaatagtcatgaaattattgaggatcatctgttgaaagattaataactaaatatttgcagttacatatccaagacttaaaaaccaactctacctcatagctgataagggtctagtattcttctccatggaaagtccttaattttgaagatgatcttgtcacaaactagatgctgactttactcaaatctgg

SEQ ID NO: 57056 - DNA, 1381 bp, Homo sapiens
tggggagctttgaccttggagctttgtacagcttgagaaaacattagaacaaattttattatttgccggtgcctcaacaaatggaaatacaatccaatgaaagtacttcacctgcaagatgcacaataattttcaactctgtgcagaagaatatttatttttggttttaatttatcatggttttttgttgttttcgttttgaacttatccttcctcccacaaaaaaagaaaagaagaaaaaattccaagcagcaaaacttactttgtttgtaaggtattcatttaggtttgaaaatactatttaataagggcagaagggctatatatgatttggctattatttctagacactccatccacatgattccactaacaaggattaccaggaataaaggtaggtatgcaaaatgtattagctacccattattctcgcactaaccaccagaagacttgaaaatcttaaaaaaaaaaaacaaaaaaacaagaaaaggcaacatctcattttaaatagtacaattcagaagggatactaaatcaataaaaaccaggactcagacactacagttttcatcagtgtaattttatgtcttgtttctttctatatgaacttgtttatttagtctttttttcataatattctcatagagtttctgctagatctagagctctgctcagtgcctcttataaaaacaatatataagtctcatatgctgtcttgagaatccaagagaatcacatgcagctctgcaacagtttttgctcaaaaatgttactgactaaagcaactgtccttcctgtttccttattgctaccaaggaccagcagggagaaatgtcttctcccagcagtgaattctgttatgcaatttattcttgatgctcaggcctggttaagctgaggcttacctttaataacagcctccaagggaatgaattattcagttaatgtaatagcacacattaaagagtgtaaaatcaattgaggcattttattaatatcttggttcttttatacaaacaatgtatcattatcttcattctataaggtcattgttactacttctctcaaattgcactttctggtaaaaagttaaaaatttttaaggaaaaaataatttcaatggttaaagttttttttcctcattgtattcatagacaaatttttttcaatatattttgcaagaaaaatctttgaataagactaactgcatttaaaaggaataacctccttctccctttccccaactacaaaaatgtttggcaactttgtgtttacatttaaagatcatttgcacctttttcaaggaaaaaaagtattgagtaaacaattgtttacatatatcatttatgcttttttctagcatgtataacttttttaaata

SEQ ID NO: 57057 - DNA, 1004 bp, Homo sapiens
ttagaaagatattggggacttggctgggtgcggtgcagtggctcacgcctgtaatcccagcacttgggaggccaaggcgggcggatcacctgaggtctggagtttgagaccagcctgaccaacatggcgaaaccccgtctctactaaaaatacaaaaaaattagctgggcctggtggcacatgcctgtaatcccagctactcgggaggctgaggcaggagaatcgcttgaatctgggaggcggaggttgcggtgagccgagatcgcaccattgcacgcaagcctgggcaacaagagcgaaactccgtctcaaaaaaaaaaaaaaaaagaaaaaagaaagaaagaaagatactggagacctcaggggtccacagaccatactttgagaaccactcatacagaggcttgatgaaaaaggcttaaaactaagctttttgaaagcaggggctgttcctgtttagaagtccaagggttcactgatctaaattcaccctgaagatatgtgtccttttttcctaggaattcaggcttaaacagtctttctaggataggggtattagtaggttactgttattggaataatcccaaatattttatgatagttcagtgaataaccatcctttcttttttacatttaaaataatctaagttcctaaccttacacagctaaataattgaaagatcaatattaaggacatgtaagacaacttagttgaagagttttgtcatttcttgggaccattcttttcagtcatttccagcagggccctcaaagcaatttacagagccatttctcacaattgggcagacatactcaggtttagtgggtcatttttgcctcctgctgcttctttctctcctcttctgtatttctttccttcttgcatttttttctttgcccatctgtttcctcagttaacataaagtttgaaaggttcgtcccctactccgtcacatcttgttcaggaaagaccccttttacacagtggtcaagaagtattatct

SEQ ID NO: 57058 - DNA, 1087 bp, Homo sapiens
caagattttgccatatatcatgtttccactgtataagaatattgggggccgggcctggtagctcacgcctataatcctagtactttgggtggccgaggtgggcagatcacctgaggtcagaggttggagaccagcctgaccaatacagtgaaaccccatccctactaaaaatacaaaaattagctgggcatggtggtgcatgcctgtaatcccagctacttgggaggctgaggccggagaatcacttgaacccaggaggtggaggttgcagtgagctgagatcacgccaccgcactccagcctgggcgacagagtgagactccatctcaaaaaaaaaaaaggccaattattttgataagccctgttaatcattagggagactattccctctatgtttttttttgcaagtattacattggctcgtcttatttttaatgaactaattttgagaagatggaatttagaagtaaatgtacttttgaatttaaggagcctgtttactttctttgtagattgtgtcaaaatctcaattgccatctgagaatagagaaggtaaagtgctgtggactggctggttctgctgtgtatttggagacagtcttctggagactgtttcagaagatttcacctgtctgcccttattccttgcaaatggagcagagtctaacacagcaataattggaacttggtttcagaaaacctttgactgttatttcagtcctttagcaatcaatgcatttaatctttcctggatggctgccatgtggactgcatgcaaaatggaccattatgtggctactactgaatttctttggtctgtaccctgtagccctcaaagtctggacatttctttcgcaatacatccagaggatgcaaaagctctatgggacagtgtccacaaaacacctggggaggttacccaggaagaagttgacctattcatggattgcctttattcacatttccatagacatttcaaaattcatttatcagccacaagattagttcgtgtttcaacatctgtagcttcagcacatactgatggaaaaataaaggttagtttgaacaatctagttaagtaattttt

SEQ ID NO: 57059 - DNA, 1123 bp, Homo sapiens
aaatggcaattttagttgcttcactgatacggaatcggcgaggcgccaaggaggcttcctgcgtggggccgcagagcgagtcgggaaacgattttaaactgaagaggcggcggagggccgaattcccttttctcaacggcttgatttcagagctgggctggtctctgacaggctcagctggagagggacgggttgggacgcactgtccttttgcccttccccctccgcgagcagaagctgactccgcaggagcgagggtcgcagagctgggtgagcggaaatgtccctcccagagtgaagtcgcagggcccgccccgcgtctgagggagcggaggtcttcctgggtgcgtttgtgtctcttgtgaacccacttgtggagcgagagggaatttgggagggccaggggttagtctggcctctgtcttagctgtcattttggcggttttttttttttttcttcaggggatttcagtctccacatagttttggagccggacttttgaagaatgattcgtgaatccggaatgggtgacagcgtcatcacggcattttattggtaaagatgctttgtattggtcccggacctgctttaactttgtatttgccctgttgtgtggtcattatcttacaatacttgcgtgttgaggtgtgtttaaacactacgtgcttaacactggctaagtattggcattggggcggttggatttaggtattggtggcaatgtagaaaagtgatcaagtcagagccccttcacggactaatcacaagagaaacaacaaagctttacttgtgtgctgtgaaccacaactgcaagtggaattgtcaagagaactagccctgccaagctcaggaaaacttctgaggagatggcacatggaaaatggataagatttactgagacaaacgggagtagagaagtgtttttaattggcgataaggtgaataaaaaggcagggagaacagtagagtgatcatctgtctagagtagggggtgcatgtttgggtatagggctgtcatttaacctcttaaagaattgtctactggaactttcttcactcccatccccccaccccccaatgttgtatacaaaaccttagaggaagtgtatgcagaatgttgga

SEQ ID NO: 57060 - DNA, 1530 bp, Homo sapiens
aaaataaaaaaaaaattagccgggcgtggtggcgggcgcctgtagtccccgctgctggggaggccgaggcaggagaatggcgtgaacctcggaggcggagcttgcagtgagccgagatcgcgccactgcactccagcctgggcgacagagcgagactccatctcaaaaaaaaaaaaaaatcatttttcacagaattataatagtgttttctagtgtacaagtggctgttaaacactagattcatactaaagctaaatagttcctacaccgtccatttctgcagtttctaaaatcctatttcatttgaggaagaaatgtgcaatattaagaattgggtaattaggattttaggtcaatgcaaatgctagaagatcaaaaaaattttgatttcctaacacaagacagaaatttacattcagttattcacttggcttttgacacatttgcaggtaaatttaatagtgaatgaattaaattacatactctgacttattttattttataaatttcccctgtagccctgacatacctaagatatattttgagaattttcatttttaagcaacctgcaagtgatgtatttttaatcttgccttttaaagtttctttttttttttttttttaaagaattcagtagctttgttgtccggaccaacacatgtggagagttgcgttcgtctcacttaggccaagaagtcaccttgtgtggatggattcagtaccgaaggtaaattgagaaagacagtctaagaatgcatggtggtggttttcccagggcaattccaaacctttactaatttacaaccagtccgaagaataaaacgttttgcaactcctgcaggattaagaacttactgaattttcaactttgttttagttttgaaagacccaagtgtcattctcagtagacattttgaaagacccaaatgtcattctcagtaggtacatctcagtaacatctgttgaagggtataacaacgaagcttgatccaccagtggactgaaatgatactgggcttactaagactgaagagttcctataaccagtaattaaaaatgggccagcctcctataaaccagctgttaaactccaatagcatgggggaaaagctcatcttattccatgtaggtagagaagaagcctagaaacataaacagtgattccttaagatcagagcccattttttgttgttgttcatctctctattccagaacatgcctgaatagaacattaattcacatggaagagattcaaaatacataggttatatgaccttcttaaagaatatgtcccagcctggcgtgtaagcctgtaatcccagcactttgggaggccgaggcgggcggatcacgaggttaggagttcgagaccagcccagccaatatgatgaaaccccgtctctactaaaaatacaaaaaaagttcgccaggcggggtgatgctcgtctgtaattctagctactcaggaggctgaggaaggagaattgcttgaacccagaaggcagaggttgcagtgagctgagattgcgc

SEQ ID NO: 57061 - DNA, 1078 bp, Homo sapiens
cagtggctcacacctgtaatcccagcactttgggaggccaaggcgggcagatcacgaggtcaggagttcaagaccagcctggccaacatggcgaaaccccgtctctactaaaaatacaaaaattagcggggcatggtggtggcaggcacctgtaatcccagctactcgggaggctgaggcaggagaatcacttcaacctgggaggaggaggttgcagtgagccgagattgtgccatcgcactccagcctgggtgacaagagcaagattctgtctcaaaaaaaaaaaaaagacatttctaaacattaatagttactcgatttatacagtctatgaaattataaaactacagtttaatttggaaatgcaattaagaattacttggataggaaatgatacacaaaattcattcatctagtaacaaaattggaaattcaattccgcaagcataaacttaacacctaccgtatacaatggtgtttaaagtctactatgtccaagtctttttagggactcaaagataagcaggaaattgtctctgtcattgtaggaactttgttctttagtcattcattgataaactgaagtaacaacttctactagttagttatactttgggtttgtttttgttttttaataatctgtcttctctctctttctctctctttgaaagggtgccaaagagtttttagtaccatccagggaacctggaaagttttattctctccctcagagtcctcaacagtttaagcaacttctgatggttggcggtttagacaggtgagctttttttatgctagcagttgtcagaaaaggaaaagagaaaaacaaagggaaaaaaggaaacacaaaatcctctctgttctcaagagaaggatagaaaatttatgagagtttggagaatacttataaaatgccctcataatttatagtcatcctttattaaaggtttattgggtggccactatgtacaaagctctatggtagtagatgtgagaggggatttaaaaaaaaaaaaaaaagaataggttctactctcaaggtgttaaggctagtaagccagaataggataatgaataa

SEQ ID NO: 57062 - DNA, 1082 bp, Homo sapiens
aatccaggctgtgtcatttcctgcctgctctgtcaagaagttaactcaatgtttacgtcttctgtttgcagtgctctttgttaggaaaattacgactggaatgtgctgaccttctagaaacaagaggagtggtgctccgtgaccccactctgttctctttcctttgggtggtagatttcccactcttcctgcccaaggaggaaaatcccagagagctggaatcggcccaccacccatttactgctccccaccccagtgacatacatctcctgtacactgagcccaaaaaggtaccgtatctatacttccaaatcaaaaggaaatgtgtatataaaggcaaagaacttcagacttcaaggtctgatgaaagataggacccagttctggaagccccagaagaaattgtggagtttgagttagtagtaatacattgtctttaaaaatctacagggtcttcaacccgtagaacagaaaaccagacattttctctaacataaagtatctgtgaatcttctaggcccgtagccaacactatgacttggttttaaatggcaatgaaataggaggtggttcaattcgaattcacaatgcagagctgcagcgttatatcctggcaaccttactaaaggtaacaaacatcatctgctatcctgggcttatttttttaccagaatatttttcagttttgtgttgttgttgttgtttgcttgtttgttttgtttttgagacattctgtcacccaggcaggtgtctactggtgcattcatagctcactgcaatctcagtctcctgtgcttaagccatcctcccacctcagcctcccaagtagctgtgactacaggcacatgccaccatgcccggcaaatttttttatttttttgaagagataagatttccctatgttgctcacactgctctcaaactcctgccctcaagcactcctcctgcctcggcctcccaaagtgctgggattataggcatgaaccactgcatctgacttaaatcagcctattttattaaacatttgttatgattggaggattcacaagatacaaaatagcatcagctatctctctaccttt

SEQ ID NO: 57063 - DNA, 1042 bp, Homo sapiens
gcctcagcctcccgagtggctgcgattacaggcatgcgccaccatgcctggctaatttttgtgtttttagtagagacggtttcactatgttggccaggctggtgttgaactcctgacctcaagtgatccacccacctcaatctcccaaagtgctgggattacaggtgtgagccaccactcccggccaataatatctttaaaactaaaaaaaaaaacagaaaattgataagtaaaatgacttttactattgatatcagttttgtttaatctgaaactataaaatagagatatatctacctatttatggatggataataccatcatctcatatttgtggaatgctttatagtttttcaaagtacttttattcactttatcttccatatatgttatctcctctgattccagcaataacagcccggtgaggtagccagggcaagtatgtattttacacattagcaggaagggaggctaagcgaggtttatgtaacttactcaggctgaaacactgaagaaaaatttgtgactctcatttcagtgatgttttctgcattattaaaaaatattatgctactcctcactatattatgttgatggttgaaatgtcattataaagcttaatttatatgattctcttgatgaggatgatgaagcaaatgctccatcaactcactagtttacaggggcaagcattttcctacatttcacacataatttgattacctctgtcctaagtgaataatctactatctgggtatgagaaacatgatttgaaaacactaaaccactatattatttcaacaaagaaccatctttcacacctaagtaaaaaggaacttcaaaaaaagtcctaaccaaaaaaaatccaaatgatgcatgaaatcaagtcaaaattgggtatcttttatctgtttcttcgttgtggtgaagaatgttgcctggattccttccatctaaagacttgattgttagacctgtggcagaactctagatctgactttagccttggggaagcaaagaggacaaaacctaaaagctcaac

SEQ ID NO: 57064 - DNA, 4813 bp, Homo sapiens
gcggggtgaaggaaagtagctgagcgccccaggagcgcgctgcggcggagggcgggcgaggtgaccccggtgcagggaagtggcactggggtgtggggcccgagtccagtcaaggagcagcacctacctccgggggtggaaatgggccggaatgggccggaacaccgtcccggaagtgaaatcccccaccccctcccacggagcgggcgacgtgccggaaggaaatcactcagccttacaccgcccccccttcccccatccccagagctttccttgcctcgcgccccctcccctctctgctcttcctcctcagtcgggaggagggcgggagcacggcatcacgtggacggtcatgtctctgcccacaatggcgaggaagggcggggaaaaggggcggacttaaggggtgggaagaaggtgatactggatgagaggaagattgagggaggttagggggaggagccgaagcggacgctgccgggagcgtgcgtcgtgacgtcatcaaaagaactcttatatacaggagcccaggcaccatactgtcttttcgaggtaggagtcgactcctgtgaggtatgttttatctttgcgaatgttgcgggttttggggcgctccagcctttgtctgctaaggtcaccctgaattgactgggacttctaagccagtcgcgcgcctttgcagggcctacaagttgaggatggtgggggattgcacatatggtgcatgcgtgacctaagctgcgactatgttagagtagaactgcggagaagcctcggctctcgtgccctgcctctgatgaagcctgtgttggtagggacatctgagagtaatgatgaatgccaaccgctctgatggtggcacatgccgagtcacccgagtaagctattgttaagggccgtgacccgagcctccatcagccgtccgctctcatgaaaggctgtcggtggtagtccacgtgcttaagtgcctgcattccgcagtgtcaccaatatttccattagtgtttcttttttcttttttgagaccgagcctcgttctgtcacccaggctggaatgcagtggctcgacatcggttaatggcaacctccgcgtcccgagttaagcagttctgcctcagcctcccaagtaactgggactacaggcgcgcgccaccatgctaggcttttatatttttagtagagacggggtttcaccatgttggcgagactggtcttgaactcctgacctcaggtgatccaccagccgtggtcccccaacatactgggattacaagccgtgagccaccgcgcccggccgccatcggtggttcttaactgcgggtgcagtgcttctttgtaacattaagtgtatcctttacctgtcgctagataatgaatggtatgttacctgcatcattggtttaaaaagacgaaccgtttttttaaagaacactctttaaaaaaaagaaccgtggaacaatgaattaaaatctgtacctgatctctttaggtatggtgctgggtgcagatgcagtgtggctctggatagcaccttatggacaggtaagaattggggaaagtatggtgggaagaatgaaatctaagaggtggtctcagcctgtgatgctttaagagtagtggacagaagggatttctgaaattctattctgaggctttaatgttaacagcatttatatttaacgtgactgctgtgaggttcattctcactgttttgcttgcatctttttgttttctagttgtgtccccaaggaaggatgagaatagctactgaagtaagttgaaaattccctctcaaaaaggtttaaagccattggatgtgccacaatgatgacagtttatttgctactcttgagtgctagaatgatgaggatcttaaccaccattatcttaactgaggcacccaaaatggtgagttggggaacatagagagtacacctaagttcacatgaagttgtttcttcccaggtcctaaagagcaagcctaactcaagccattggcacacaggtgagacacctctattttgtacttctcacttttaagggattagaaaatagccaaagcaatgatgattatctatgttagtgcttctctcccctcttttcaaatgagaattttgctctcatattgatactaagtttaatactgaagaaaatgtgaaaacagatactatgatggttgcatagttcagcagatttaatcatgaagagatgtactatctgtctgatgtatctggggtagttgtggtttgctgttaatggttaagcagtgtaccaccaatctaccattaaaatattttttgctgacaattttgtattaaaattacaggcattagacagaaagctggaagttgaaatggtaagtgaaactgtatccaagtaagcaggtaactgggcaaacttcctacggcacaaatggctttttagttacctcctagtgctgaatgcattaaataaatggcggattcttgtcttgttatgattaataagaaagtttgtaaatgcagcctggatgatgataagcaaatgctgactgaacatgaaggtcttaattagctctaactgactaaaggcatttgttagttttggcagggggtgaacactcatctgtggctattctaagaccactcttatttcttaggtggagtccaacttgcctggaccagcttaatggttctggtaagtattaatgaaaacagtagatagacttaatgaaaatgctgatggtgatatgcttactgctgagctaatggcttaaggcttggctgatgaatactgactgtattttccttgagcatgtctggaacagtgtttatgtgttttccttgagcatgtttggaacggggtttgtgtaatgatgttgatcaaatgtctgacctgaaatgagcatgtagacaaaggtaacactgaagaaccctgtgacagacaactttgaaaagagtttaatgatgtttagcattttaatggaagtcctcatttgtattccagctcctggtaacgtttttatccatggatgacttgcttgggtaaggacatgaagacagttcctgtcataccttttaaaggtacatgttttattgatgttaacgttaattgattgagctactgttagtgatgattttaaaattaaagcagatgggaatctctctgagaaagaaaatggagattaatcttaaactgaaacagtagttgggaaatcttttagaaatccacctattactacctattggtaaaggagattaaatttctacaggtatggagagtcggcttgactacactgtgtggagcaagttttaaagaagcaaaggtatagcagttccaagtattttttttttttttttagacaagagtctagctcttgcccagaatggagtgcagcggcactatcagttcactgcaacctctgcctcccaggttcaaggaattctcctgcctcagcctcttgagtagctgggattacaggcatgtgacaccatgcctggctaattttgtacagctatgttgtccaggctggtctcgaactcttgacctcaagtgatactgcccgcactgacctcccaaagtgctgggattacaggcgtgagccaccatgccccgcctcaagtctggtttttaagtgttgtaaagccgatacaatgatgataacatagttcagcagactaacgctgatgagcaatattaagtctttcgctcctatctgatgtatctggcggtaacattctagtttatgccccgaaaaggggaatatagccattctataatgtttggagattttggattactcctaattgtatgcaagttgtcttactgtgtattgtcccttaatttcaggactcagaattcatgattgaagaaatgcaggttagtttaaactttgaaggaaatttttaaggtggcaaaaggttttggtggcatatacaccttaatctgtagatgggagtgattagctgtttaaaagttaaaatgtgactgagaaggaaattgagtagggcaaattttaaatgggtattatttttcatcttcaaacaggcagacctgttatcctaaactaggtgagtcagcttttggtacatgtgatgattttcagtgtaaccaatgatgtaatgattctgccaaatgaaatataatgatatcactgtaaaaccgttccattttgattctgaggttactctactaacaagcatcacacatttgtattttgccctgattaatatgttggcttcgctttcagggtttttaatgaccacaacaagcaagcatgcagcttactgcttgaaaggtgaggattggaaatgttgggactattataattgcagaatacatgatgatctcaatccaacttgaactctctcactgattacttgatgacaataaaatatctgatattctgcattcccatgtagcattttaattgaagtctgtaaatgtggctaaaagtcttgtcttattttttgagacagggtcttgcctcacccaagctagagtgcagtggcctttgaagcttactacagcctcaaacttctgggctcaagtgatcctcagcctcccagtggtctttgtagactgcctgatggagtctcatggcacaagaagattaaaacagtgtctccaattttaataaatttttgcaatccatctggagtgtgtagtgtttacttaaaaaaggacagtgcttttcatctgttcattagctgtaagcataaatcacattcaaaagctattataactccatggtatttgcttcattaacactgcagccagttaaaattttatgggtattttacaaggtgtcttatgcattaaagtgcaatatttc

SEQ ID NO: 57065 - DNA, 1052 bp, Homo sapiens
ccttcaccccgcctccaggcaccgggcgaccttccacccccttggcccccggccgggctgatctgccggacccgccccctcgcggggcccctccctcaggaccccgggaagggcggccccctcccccaccgcagccgggacacacccagatacgcacacccacctcctggcagctccccgcccgccgccgcctggagccggtccctgggcgccgcccccttcctagttctcacctgagcgctggctcccccgcccgacgccttgtccccatcttctccgaagttcctcagtgacattttgccctttagccagttcccctctccccaggcttcctaacgcagaagaaagctgctcaagtgctggagtggccaaccccatgccgttcccaattctcccttttacagctctcacccctccagtgccgacggtagcgaaagactttcctccaggggcttcctcactggggaattgccggaaagagcaaacaaaaaaggcgctggtgtaggctccaaaataaacacatctgaattcatgatggcatcgacagaggctcttattggattaaaagtttcaaaacaaacaataacgctttggaaaaaggtcagattggctaaagttgattgttgaaaacagtgtatacacttccctatttaataagtgtgttgttaatgcggggcagtactgtgagcttggcagagtaagttcctgaagtttcaggtgtggtgtaactatgtaatatatagataagtgaacgcacattgggcttaagtaaatgtcttcctgttcggatttatacaaactattttcagtagttgaaactgtactttcaactatcttgtatacagcttcaggtttagtgtttcagccattttttaaaaatattttaatggaaaaatgttggcatacttggtaaatgctgtattttttcatcggatctggagaactaagtttcaggatggaagtattcatcaccacctcggaattgccaacttcgaatttggcagatttacccagctttcctaattttgacaactgaacttcacattctctgc

SEQ ID NO: 57066 - DNA, 1166 bp, Homo sapiens
tactccagcctgggcaacagagcaagactctgtctcaaaaaaaaaaaaaaagtaatatcaatttcaatgcaaagattttttaatctccatgatctatatcaatagtctaaaatacagattattatgggaccttggggaagaaacagccaaaaacctggtaattacgtagaagaaacaaaattataggccccgttttaatttattcttttatggtctcccagtatttatataaggaagaaagcttatatttagctttagcttcaccagctcatatgttctatctgttatgtcattttgtgtttattaaatttactagggctaacctattatttcaaatcagattatgtattaactccacaaaactattcctcagttatttgttgcttggtttgttcccccttcctcagccatagaataaagaggggcgacatcaccatttttcaggttctttgatgctgcttttgtattagtcccctttatgttcctcttccaacagatttagcccctccggcagtgttgttcccttgacagagagacacagagccagaagtgagtctcctgggagaatggatgagcctaagcaacccagctcccaggtatggagttgtggatttagaactgctttggtggttggaggaattgctactgtgtatgaatagaaaataatgaaaaagaaaagatgtaggagaggtaacaatggccctgttaaagaaatactgtattttttttccctgagggtagcagaagtttaatattaaaattatacagagacatcaccagaaaggaaaattgcagactggtatttctaccaagcatagatgcaaatattttgaaaagaacattaacaaattaacactgatagctggtttaacattttaaaattaatcattgtaatctgtttcattaataaggaaaaagtgataaattacatgtggcaattttgataaatacagaaaagaacaattggctaaaactcttagcaaactagaaatacaagggaactggccgggcgcagtggctcgcgcctgtaatcccagcactttgggaggccgaggcaggtggatcacctgaggtccggagttcgagaccagcttgaccaacatggagaaaacccgtctctactaaaaatacaaaattacccaggcatggtggcacgtgcccgtgat

SEQ ID NO: 57067 - DNA, 2203 bp, Homo sapiens
aatagtttatattttcaggcatatagaaggacctcacttaaaactatgtctcgggtctgcaaacctagtaattcataaaccaaccatcagcaaaccatagctggtgactccaagagctttgctttttaataatatactacagggcacttatcagaaaacatcatgcagaatcatgttgcaataaatgatcaaaggatcaattttggtcaggtttggttacttagtcattcctaagatttttaaaacttcaagggacccttttagtaattctgggtatttctaagattcttaatccagcactgagagaaagaacttagcaaacatgtagagctttggataccccgtctttcatgaagtgagagaaggaggaatattaagggatgccggcaaatagatgcttataacttacagtgcaagttgaaaaatctctagcttctgttgacggagcactagttgttggggttcttttaagtatgtaatggtttaagaaattgtttcagtgcagaggcatagatgactgtaaaagagatttggcagagggacaggttgtacctgcactggtgaaccatctgtgagaatgttagtcatgtgctcctttcctgagattgctttgtggtatgtgaaaaggtgggtagaaaagaaagaaatctctttgagataagaaattagaatgcaaagggtagatcttaagcaatctgagaattgtacatgtacataaagctgcaccctctcacaagagaaaggttattttatcttctgaaaaagcatagaaatgcatcttttatgggaagataatgatgctaccatttaataagagcctacccttaaaggcagcattgaaactgtattttgtctttagaagacatagactggtgcatcctccgctttagttagacaacagcatgataaggaaaaaactgtcttctaaagccatctttagggactggctgtgctctgtggcatagaaaaggtaaagttgaattagccaaaaatccttagggaaacaactggtaataaggttttcagtggacagattttgtcattactaaataggcagtgaggtgagaagtacagattatgctgctttggatggagcctttaagcctaccaaaaaacttttaagtccatcctacttttgagaaatagtatgctagaaagttctgtttttctttttcttcttttttatattttttagagactgtgtcttcctcttgtcacccaaaccagagtgcagtggtgcaatcatagctcactgtaatcttgaactcctaggctcaagtgattgacctgcctcagcctccaggtagctaggactataggcatgcaccaccatgtctagctaatttttaaatttttttgtagagacggtgtctctacaaaatttgcctaggttggtcttgaactcctggcctcaagtaatcctaccaccttgacctcccgaagtgctaggattacaggcatgagccagtgaacttggcctggagaaagaattctttgttgctttgttagtttcttagattatatgtgagaaaatggagctttttaaactattaccaaattttaaaggtgaagtgcagtaatttctgtaaagagaaactttgcagcatttgtcaattctccttccagggttagcaacaaacaaatgaggtagggactatctcattcatgtggaaatgctatgaatgtttggtgggtttcccctcccttttcttttcattcactttaaatagccttttcctatattgatactgtgaatagggtgcttcctggtcatctaggaccactttagcacaatcatgtttgctggttctctcaattggcctagccagagccacaaaattcatgaaaatttaaggcaggctagcttttaaacaaattaaaacttctgaaaacaatttcagctttttcgttaaaagagatgttgttattctaaataactgtccaagactcttacccacatacactgtgacattgtcctagttcttagctaacaacacattggtcataggagttactgatgttctatctacattaatgaacagctattggtgtatgcacagaggatacctcttaaggatgtactaaatggactttgtttggttgatgctgaaaattaattaccaaatcttaacttgcacgtgttaccttgtgaagggaactgcattagcaatgagagctacatcatcatgaagtactttaatgc

SEQ ID NO: 57068 - DNA, 1034 bp, Homo sapiens
gtctttggaaattgagctctttatttaggttatatgtgaaagagtttaaaatattgaaatactttggttgctaagcagatttagaaaagcaacaagcaattgtcgggcaaatccctaggtttgagaagatgtcctcagcaaaatatacccttaggacttacggaattagatcagggttcagcaaacagtagtttccaggccaaatgctgaggctacttgcttgtgtaaagaaaattataatggaatagggccacacttacttgtttaggtattgtttatgccttctttctactacaatggcaaagttgagtacttgtgacaaagatcacgtggctacaaagcttgaaaatatttactgtctggtacttgttagaaaaaatttgccaactccaagaaagaattacctcctaaagttgttactcatgacattttgcctttataatagtttggttgaagttttaaattcatgttgtcacatatacatgttttcttgaaagagtttgccaactttttctagatcctcttatcataactctttttgtgctccttcatgatttttttgtgctccttcatgattcccattactttaaaagcatttagaattggcctgttgtttgtccttgtcttaatggtgccggtattttaaagtttagttgtaagtaagttttgccattcctctgagttaacttgaactggtttgcataatggtgacaagaatgaattttttcccaagtggattaaaaactaatttcattatgaagaagtattttgattcatatccaaagtactgtttttctggattagaacccctaccttttccctttgcaatgtatcttaattttaacttctttaaacttactctgttccatgtagagcagtaaaaagccaagtttttcttccttttttcctggatgttttgaaacataatgaaacatctgaggatttcaaattctttttagacctatcttcccatttctgttattgtctataattcttctaaatacatattggaccattaacatgtttgctttgtg

SEQ ID NO: 57069 - DNA, 1139 bp, Homo sapiens
tctaatgtgcagccaaggttgagaatcactccctatgtaatccctagtggtcatggcaggataacctcaatccagtcctctttgacctgaaaatatctttattgatattccatgcatggctctcaattcaaagtgtacagtgggtcaaggcttaggtagtaaaatggatcatccatttgtcctcagaataattctggagggagatattgtcatccatccagtttcctctctataccaaatacaaagtacacataaataagcaaaacaaattttcaaagttccttctctagaatcctctttcttttgcatatgtagtttcagtggagatttctcaactagctgaaatggagcacttgaatatattaaaagagcccaaactgcttacagcaatttctatttgtaaaataaacaggtggcattgttaatggagaaaaggaaggatcctgcctgtggtgatggtaatatgtttgattatttatctcttagcctgtcttctaagtgggatttcagtgtcagttaactttcacttttcttggattgtttttttgtgaatgaaatgaactagttaaggcttaagtatttctgaataatatatgaaatgtgaaatgagtcattttaggatctttcttctgggatgtcaaagacctaaccaagtaactcccaaatgaggttccagattcatttttctcatcccaggtagtaaacgtgttttaatgggtttgtttcttgcccatggcaacctcaacacagaggggagaactgttttattaccctaaaatagtgagaaccactgttcaaactaactagctaccaagtgacttctaactcatgaagaaaatttgtatttaagagcaagttcaaatgtagcaggctctcttctgagagtattctggataccacggaaagtttcatttatatattgcttacaagtacgtggtaatttgaacttcagtaggtgatatgtgcaaggagaaaaagtaggtcaaggagaaagttggttagtgcagaggactgacttagcatcagtctgtgaaatttcattaaagtagcactaaggcctggctgtttgcttagcatgtaaatgctgcagtgtccaagaaaatgcctcctatgccttagaaaatttgctgaaggcttcc

SEQ ID NO: 57070 - DNA, 1458 bp, Homo sapiens
aggctggtctcaaactcctgggctcaagcgatcctcccacctaggactcctaaagttacaggtgtgagccactgtgcttggcctagaactctgtttttggcatttctttctaaatgagtacattggaagaacatttaggtttccaggctcctcataatttctgaatgggacccgctctgctctgcctctgaaaggaggagaaaaggctgagggttcaaagacagaaaagtcaatgtagcagaaatttgatttccttcagatggacatagtctgaaagaaatctatccagctgttctctatggtgcttatatgatgggtgacagctgtccccatctacctgtccctggcactgtgccttcacactggtcactgtgaaaagcagatcacactggactcagaggccagaatccaggacaagatcccccttctcatcttgagcccatcacatctttgtatagctgttaatgtagcatttacttctctatgggaaactcttgggtttttaacccaagaagaaattgtaaagcatttaaactagtcagaaaataagattctgatggtagcgatcaaataaaggaaaatttcacttcctctcagttgatattgattgatagcaaggatcaactatgcccacctcttcctaagtttctaaaggctaccataatatttgtaaacaacaaatttatctaatattttttacaacttgctaatcaaggaggattcatattaaaacagacaatcagtttctaaaatgttatccctgaaagggaatggaatagagtatttttagctgtaagaacctaccagtctgttttttccctttgaaaaaaactaatgtttgagatttgtgtcttttcatctgaagcagttactccattaatagtaaagatgcctcgggaaagtcagtgaaccagaatagtgctcttgcaccactgagggtgctagactggctttgtgcatcttatttcctaagaatatcagtttttattatgaccttaattataaatacctatatataggagtaggattttctctcacccaaccctactttaatcattatcacttaagtgtaaacctccacctccccctctttccctttaccgaaaaaaaatgcactttaattcctaaggagagtggctgttcctggccctgaaaccagattacttcaggaggagagttaaggagggagagctcttaccagaccctgtgaaatgaaccaaatttcttaatgtaaacacacaagtaataacatccacttttaagtggcccccactccatgccaaagggaaaaagaaccgccaaattgaaaaagggttctaaatacctgtcctgattttggaagtttcactggggaaaaactacctaagattattttcacagctaccaatttgtcagaaactttggtggtgttttgtgggaggctgagattttttaaattaaaaatcaagtgaaaacaca

SEQ ID NO: 57071 - DNA, 1115 bp, Homo sapiens
aaggcaagtccccctcagctgccccagcttccagccagccccaggcttgcccaacggaccacgtccgtgaatctgcactgggtgcctgtctttctctcccaggagaagatgggaagatccagtacccacacacagacccccttgtgtacacgcaggaaccataaaccagctggaggcagcccctgccccaccctgtcttatctacaaaaaatattacaagagactttatctcttgatttgcttcatcgagtgtcccaactacctcatttttttaaaatgtgaaattagcttcatttaccttcattgaatccatgttggcgactattaaaaattccaggcaataaaaagggatgagagcctgaactaaagcagtggcaataactggtgaaagagtaaaaaaacagaactgattgactctggggtgaactgattgactctggggtttgactaaatgaggaggagagagggaggaatccagggtgattctcaggtttctgtacgggattcactgagcccactcacaggagcaggcctgtgggggagaattaattaccagttcagtttggtcctgtttccctgaagaacttgtaggagttcctggtggaactgtccagcaaatagtcagtctggagctcagtggaagggttagggctggagctagagatgtaggaatcttcagcacacagatattgccattgtttttgtttgtttgtttgtttgttgttgctgttttgagacacagtctcactttgtcacccaggttggagtgcagtggcacaatctcagctcactgcaaccttcgcctcctgggttcaagtgattcttctgcctcagcctccctagtagcttgggactacaggtgtgcgccaccacacccagctaatttttgtatttttagtagagacagggtttcaccatgttgtccaggctgatctcgaacacccaacctcaagtgatctgcatgcctcagcctcccaaagtgctgggattacaggcgtgagccaccgcacccggccagatattgcctttgctccatccatttcttcttacttctcttgtgttgctgaaatctctctgctgcatctatcagagtccttccccaaacagtttctgta

SEQ ID NO: 57072 - DNA, 1081 bp, Homo sapiens
gagcccatgagatttgagtcaggttgtaagtgaaatcacttacacttttggatagaatttatactcctgctcttataaatcagtggtagacttaccattttttaaagttttcttgcatttttttgtttttttattgccacagctccctattctttcttgcctgcctccacccccctgttcaggaaaaaaaaaaattgagccttaaagtgacagctgattttttaattgctgaattttgtgaaattttactttttccaagtgtttccaactttaaaaagagaagtgaagacaaataggttggaatggtgaagacaaatggattggaatttcacaggctgtgaataattccttaggatctggcaaaccgtgaagtcttatttgaagaccttatctcctgagagttcttttggagtaggaaaaagaaccctatttgaaatagaccgtttttctcttgtttttaatctgtttaatatttctgatttttaagcagctttcaaaacaagtgtggtggaaaaaaagaaatagtagtaggaagatgtttagggcagcagaactctgggtctaaataagtacatgttcccacttgttgccgatttttgagagtactagggccatctttctcaattttgtattatttgtgtgcatgtttatatcaaagatgcccattttgttaaaatgctatttcctttattaccttggaaactgactcagcctcatgttgctcctaattagtgtttaaggctcccatgagttgcagataaaatgatttattttaacaagtagaaggaggtgattcaccttttggattgtaaatatatgaaaatgtctacaaggtctttatctgctttctgtcagcatttatattaaatgataaattaatgaggaacgtgtgtattttgtaaatgagtgtgtgccatcttattctaatcttgagattactttcttacacgtttttaatggagggggcttttttaggtgaaaaataaagaaatggctaatctgcatgagcaaacacatacttggagtagccaattttgtgtggacatcacaggaattagtccaatcttaaataagctacagt

SEQ ID NO: 57073 - DNA, 1395 bp, Homo sapiens
ctactgtcatcattttacctgagtgcccattttgctgatccacattcatacctttctaccttggacagctatgatttttatatttatttgttgcttcagctcaggtttatgaaattttcctgctgaaatgacttattgggagttgtaggttgattatagttactattaaacattttctcaatttagcttttctgagccacttcaagaagaaagctgtttttgtcaaaaggtactattaattgtagcaagtaaatcttaagatttgaatttttaagattttatttctgtgttcactaaagatctttccacaagtaatagattataattgataagtaatactagctatagtgttaataaagagtaagactatcaccaccaggaataagtaacaccttttaataataaatctattcctaataggtatgttttcaatactgcactgaacaaagtgggtaaagagccctttgaaatcttattgtaataaagggacttacctcaccactggaatccttgttttcagagcctctggattttcagccaaacactgaatttctcctaaactttatccctgaaacatccctagagaacgaactttattttcacaagaaaataaggcacaataagggggaagaacttaaacctcaacataatatcgtgtccaaaaatgtgtatttagaaaaataaaatcctgtggagtttgttatcctaatgtttattttatactagataaggtgacttgttttcttgtattgaggtcttactgtttcagatttgtttttgtttctgttctaactctaagcagacagagctcacaagtctttggcatccattttaggttgtacactcagagtcatcttataactggaaactgtcaggtggtcccccaccccagtgagtgtatgaaagagtcaagaaaaagattggaaacaaactattgggtgaataattggttgctctattattattattattattatttgcctttttttaatcaccatttatttgtgtaatctttctccattgattggctgtcattcttataatatctgaactaccccataaaataattctctgacttaaaggcatttagcttttgcttatcgtttttacatcctctattcaactaagacactgtcttgagagttattttttccagatggatcgttggcctaaattttcacacttctcccctgttcatcctttttcctcttccctgcttcctgggaataaaaggaacttttttaaaaaaattaattagtccacaggtctcattatctttctttatgattaatctatgactttttggtacaagaacaatggaaaaagtgaattaaggtaatgaacaaaacctttcacccacttaaacattttccagttttgagattcctcttcgtg

SEQ ID NO: 57074 - DNA, 3425 bp, Homo sapiens
taaaaaacaaggacaatcaactatgttttaaaactgcaacatttgatttgaacttaaaatgaatagagccacattattttaatggatgttttgttttacttgtgaactgattgagtcttaaggatagtttatgaattgatcacttgttgctcagaatcattagtataagtaggtaggaaatagtttgaagtcatttttcatagacttaactgtccaatgttgcaaatgtttcttcatgaaaatattgaaaagagtaaggttttttttttttttaattctgctgcacatattctgatgccatgtgtctgtgcttaattaactaagaccctataaaacgtgtttagtggggactgtttgatatagttgccctctccattcctctatttgcctgatttttttcagtttccctttctgtattttactactaaattagaaagcactggttatgtaataagttactacattgctttggttgagtaaaaacaagagtttatatttttcttgtttcttattttcttaacccttaactcctgctgaggtcataacaacctcagtctaagctctgtgtccatcatactgttaacttaaacaaatgggtggtgggggtgggaagggtaatacagtcctgccattgcctaccagtaggagagtccaaacagaacactcttttgagtagcaattatttaatttgcccagtcaaggcaccgtgtttatatactatttcacattgaatttgattatgccctacagacctggctggtcaaggatttgatatacacatattggcttgggattcgagctttcttttttatttaaataaaaatttatatatatattatatatatacatatatacatagctatatctgtatatatattgggtatgttttaaggattttttcgcatgagcgcagctgttgcgataaattgaccgattgggaggtggtagaagcactgaatgaaggtgaggctttttttttttccagttttcttatacatttgtcttctttttttaaaaaaaaaaaaaaaaatatatatatatatatatatatatatatatatgtatgctttttcttttttttttggcttttgtttgctttttgacttttacttaaaacccttttacatttccactttaaatgcctattgtttattgggagaaggaaagaaacttttgtatgtctgacagagtcccaagatttttcatttctctgcataacagtaaaaggcaacattattggcctccaaccttctttttttttttttttttttttttttggagagggagtctgcttctgttgcccaggctggagtgcagtgggttgatctcggctcgctacaacctccacctcccgggttcaagcgattctcctgcctcagcctcctgagtagctgggactacaggcacgcgccaccacgtccagctaatttttgtactacaaccttcttataagcagatttggactgatcttctcctttgggtatgtcagatcatcctaaattttagaagcagttgattcactttggaattcagaatgattcttgtattagaagataatttgtgggtattaatttttgtttaagtttaaaataaaagtaaagattcattttggatatcagttgaaaccccttagtaactcagtttctgttattcttgttctcatttcctttaaatacacttgttcttggcttttgccattttgattctgtgaagtaggcaggagcagggattaatttatacagtattcctgttctgaacaaaaccagaaaagtcactgtataaacttgacttaaaatagtatctttctcttttcatgtattttcatttgggggaaaaaaaatctctttaattgtaacctgaattcaagctgtacccctccatggtcctacactctagagctaatctggttgggcagaaaggcagaaggatggtatattgtcccattgtgcctataatgtattttaaattggtcattccaccttacctaatggaaattcttgcagctttcctagtgctcatcagcggttttaggaattcactaacacccccaaaatttgttttttgttttttgctttttttccttttccttttctctgtgatatcatgagcctgtaaggacaaatggcatatttgggcataactgcttgactctgtaactacttttttaaaatcaaaattgaaaaggtattaattgcttctggctttttaatttttttttttagagacaaagatgaaaccagataggaaatacagtttttatgttttctacttactaaaatattagtttcttctaaatattactttatttgtatttcactaaattccaaagcaaaaatcagatatctgagatgaacaattttgaatgggttaaggtaggagtaataagcattgtgttcactcatacataggtgagggaattttatttatagcgagaaatataaaagtattttgacttactcttttttcaaggagtcgctaggaaagggtagaagaactgagaataagacatctagattccatttctggtttatatgtagctcttttgcctaatttatatataattttgtcataagataagtccagtaactgtcctgtcttagataacgtacagaggctgaagtgaccaaagatccattccttattacttttctaattaaaagaagagttagctagatttctagtagtagtattctagatattgataagacattattcctaatgccaactacaaatattcaactactcagaatgtatttaaaaaattgtttggtacagcattaatgttggtgattcctttctcccatcttatttcccttcccttctattctttcccatgtatttcttttgcctaaaagaatattggtatgattctcatttgctactttgagtatataactccatcagactttccagagttcttcagggatggagctcaaagtttacatttttccatatatgtctttttttttcttgacctttttccaccctgtaatttccccttgacttacccactgccctccccaatctgcaacagtgacagtttgctgcctcaaaacagagcattcaaatgaattcgcttagccaataacttctgtgaagttgccttttctaatggtgttattactcagtgatgcacaaatgtggtatttgccctactggtaggcaaacaaaggtctggttaagaatggtaacctgctgttttctttaaaggagagccaaagacttgtgctttactctgttttggttttgggggaagtagtagccattttgatcatgaaaccttttagtatttgtgagttgattgtactgtgtaagtagatttatctaaagttaactgttaaagttagctagccttataaaatgtaaaagtaatgaaaattcatcagtttctctaagccagtgaatgtcgtcttttgtaatattgt

SEQ ID NO: 57075 - DNA, 1048 bp, Homo sapiens
tcagcagtgatgtaccaaatggatcagccttgacacaagagaatatcagcctcctatcaaacaagaccagctctctgaacctgtcagaggaccctgagggaggaggggataataatgactcccagagatcaggagttactcccagttctgctccttaaaatatgaggagtcctacttttatcttctgctcctaatcagtttgtcgggcataggggtaggagaacgcataacttctaaactttttctcttaagagcggtcagagaaatccaggaaattcaccagaggcaatgtgcacaaacaccactactaaaaacaaaccctgcacatagttcacattaatgcatttttttaatttaaagaaaaagaaaattagcagtatctgcaagcaattcagattaaatttgtttttgttctgtgaatgaactttattttaataactttggacgccttggatccagggctttaaaaaaaaaagatattatatatacactctgtttgattaattgtatgatcttaatgaagtaggttttcttgtattttggtattacatacccagtgtataatttgtataattcctcacccccaatccttatcaattctcaccaccccataaacttaaaacagaccaaaaatgtcagctttcagagaattctgtggtgcttgagaaacagacagtactagactgagttattagaaaatgtgcagcaaaccaacttttcccagagctgttatttggaattctttatccctttctagatcactagcttcattggatacgtatatttttcttgacattgaagctttttgtttgtttgggagggttttatttcttgtttttattttcaacttttcaaatagaattaccaattttgaagtcctcattttcatattaaggatcatttgcattctcttaatataatcagaaagctgattcagtgtttaattagatttaaatgttgatcaagaattaactgtaacttactagcactgaaaatacatgtttggtgtttcgcctgcgttcagctcatggttggaaatttgaagcag

SEQ ID NO: 57076 - DNA, 2437 bp, Homo sapiens
agcccccaccaccgccacctccaaaatggcctgggatgatctcaagtgagcagttgagcttggaactgcaccaggtggaaagggaaatcgggaagagaacacgggaactgagtatggtgagtgttatggtggggaaagagagggaaggtgaaatgaaatctttcatgtggctctagaattatctagaggcacagaatcatcacttcaaggcactctgatgagtggttaatatttaaaataattctcatgcaggtgggctaccttccgattttatcattcccttcctcattctcttggtttgggtgtgttctttgtcttataattcttcgttaacttttagggaaaacaaggttttaatgcttctgtaatttaagaacttaatggaagtcttaaatttctgtttagcatactgattagggaagcaaataggatggtgtttactattttgcaatgacaacatgttatataaagatgtattcaccaaataacattctagtttcatagcctttataatgatgacctatttttgctatgagtgatatgcaatctgcacattgtttcctgtatccattatgtatgcttaggaaaaactatatccattaatatgcttaggatttgcttcatagtgcacagacattcattttagtaaattttgaatcttaggggcttcctcaggttgcatgatatgattttttttgttgcttagttttcataatctttctttttttttttgaggcggagtctctgtcgcccaggctggagtgcagtggtgcgatctcggctcattgcaagctctgcctcccgggttcacgccattctcctacctcagcctcccaagtagctgggactaggcgcctgccacctcgcctggctaattttttgtatttttagtagagacggggtttcaccgtgttagccaggatggtctcgatctcctgacctcgtgatccgcccgcctcagcctcccaaagtgctgggattacaggtgtgagccaccacgcccagccagttttcataatctttctaagcaaataaattgagcatgcaggttttttttgctttcagtaagtatgttaaagatatttattgtactttggttttcttttcttttttttttttttttttttttgagactgagtctctgtcacccagggtggagggcagtggcccaacctcagctcactgcaacctccgcctcccatgttccagtgattctcctgcctcagtctcccgagtagctgggattacaggtgcctgccaccacaccagggtagtttttgttttgtattttattttttttttagttttttttttttgaggcggagtctcgcactattgcccaggctggtgtgcagtggcacgatctcagctcgctgcaacctctgcctcctgggttcaagtgattcttctgcctcagcctcccaagtagccaggattacaggcacctgccaccacacccagccaattttttttatatttttagtagagacggggtttcgccttgttggccaggctgatctcaaactcctgacctcgggtgatacgcccacctcagcctcccaaagtgctgggattactggtgtgagccaccatgcctagccttttttttttttttttcctttttttgagagggagtctcactctgtcacccaggtggggagtgcagtggtgcaatctcagctcactgcaacctccgtcttctgggttcaagtgattctccccctcagcctcttgagtagctgggattacaggcgtgtgccaccacgcccagctgatttttgtatttttagtagagacggggtttcgccatgttggccaggctggtctcaaactgacctcagcagtccacctgcctcagccccctaaactgctggtattacaggcgtgagccgccatgcctggccgcctttctaggtcattgtttttttctgagaaattttttttcatgttagcttgaggcattgtctgtcttattgtccagcttggttagtgagcaagtggattgtattctgttatgtttttatgtatgtcactcttttagtctgccagtttctttggttattttacaaaattgaatatgatttctggatcatcactttgtattatctgtaatttggtctctcccattaacaccattaaatagatgataactgattttatttccttctctttcaaaggaaaaccagtgttctctggacatgaaaagcaaactgaatacaagtaaacaagcagaaaatggacaaccagaaccacaaaacaaggttccggctgaggaccttacattgacattcaggtaaagaaaaggagattgtcgtagccatattaaattacacacaaaagagaaactaatatattatccagtcatatcagaaataccctcataaatataatttgattcttaaaatatcattattctgtgtacataaagaatattttt

SEQ ID NO: 57077 - DNA, 1048 bp, Homo sapiens
aaaatacaaaaaaaattagctgggcatggtggcgggcgcctgtagtcccagctactcgggaggctgaggcaggagagtggtgtgaacccgggcggcagagtttgcagtgagccgagactgcaccactgcactccagcctgggcaacagagcgagactccgtctcaaaaaaaaaaaaaaaaagaaatcacatccctgatcttccttccacactcataaactttcattgtttgtagaattgcttacggaataaggtttgacactcttgactatggcattcagagccctcttagttttttatcagcctacttttatagatttgctcccaaaattgcttagtaaaccagatcaatgttactagaatatatagtgatttttttccctgactgctgtcctttgatcatcctgagcagtcaaaagagaactttcacaagttcctaaaccatttttgaccccatttctcatctacctaccacttcatttctttttttggcacactcttgaactcaactccagtcaggcatttatctccactgctctatccaaacttattttgtcaaggtcataaattacttccatgtagctaattccaaaagtcagttctcagttcttactgtacttgatttagcagcatttaactttttttttttttttggagatacagtttcactctgtcccccaggctggaggcaatggcaagatctcggttcactgcaacctctgcctggttcaagcaattcttgtcccgagtagctaggattacaggcttgtaccaccacatccagctaatttattattcttattattcttattatttatttttagtatctttagtagaaacagggtttcaccatcttggccaggctgttctcaaactcctgaactcaggtgacccgcctgcctcagcctcccaaagtgctaggattacaggcatgagccaccatgcctggccattgttctgtactctctcttccttgaaatgcttttttcttggcttctaggctactaattctcttctttattggactctcctcagcatcctctgctttc

SEQ ID NO: 57078 - DNA, 1336 bp, Homo sapiens
ggagttcaagaccagcctgaccaacatggagaaatcccgtctctactaaaaatacaaaattagtcaggtgtggtggtgcatgcctgtaatctcagctacttgggaagctgaggcaggacaatcgcttgaacccaggagacggaggttgcaccattgcactccagcctgggcaacaggagcgaaattccgtctcaaaaaaaaaaaaaagacttagataaacttaagagactagggtcctggatggaactttattattaacttcaagtttcctcttaggcaggggactacttcccatctctaaaatgagggaatggaaatagatgttctatcatggctctaattctgtaaaagtgtaaaaagatggattacagtgatacaaatgtggtataaaaagttgtggaataagactggacttgtggttctttttcaacagtttaattgaaaagaaagacactcaatttttttcctttttctttattttcaggttatatttcacactatgtgctgactgtatctacagaagatatttaaaaaaaaaaaagataaactttttttcaaagattttgattccagtggaatctttgctttagatttgtgtgtgtgtttgtgttcgtgaattgtaactccagaagcaatgcctgtacaagctccacaatggacggatttcctctcctgcccaatttgcactcagactttcgacgaaacaattcgaaagcccatcagtttgggttgtggccatactgtctgcaagatgtgcctgaataaactccaccgcaaggcttgcccatttgaccagaccactatcaatacagacattgagctcctccctgtgaactcagcattgctgcagctcgtgggtgctcaggtaggatgggtgacttaatacttttaaatttctccctctctctctctctctctctgtgtgtgtgtgtgtgtgtgtgtgtgtgtgttgtgcgtgtttttctcctgagagaaacctgttgaattaaaattgggtaacattgccttctatttaaataggtataattctgtttggtactgtaaatcctttatttcagcatgttagatttattgtggtagtccagtgctttttagtcatagtacagtaacatccatttaatcttgtcagatattcaataaacctagctatgcagatcgctagagaaacctaaggccgggtgtggtggctcatgcctgtaatcccagcactttgggagggccaaggcgggtggatcatttgaggtcaggtgtttgagaccggcctggccaacatggtgaaatcctgtctctactacaaatacaaaaaaatgagctgggtgtggtggtgtgtgcctgt

SEQ ID NO: 57079 - DNA, 1101 bp, Homo sapiens
tcaaggatgattccccgtacgtgtgtgtgtgtgtgtgtgtgtgtgtgtgtgtgtgataggagtcttgctcttgttgcccaggctggagtgcagtggctcaatctcggctcactgcaacttccacctcctgggttcaaggaattctcctgcctcagcttcctgagtagctgggattacaagcgcccaccaccatgtctggctaatttttgcatttttagtagagacggggtttcaccacgttggccaggctggtctcgaactcctgacctcaggtaatcctccacttcagcctcccaaagtgttgggattacaggcataagccaccacgcctggcagttccccatgcttttatcacagtaattggtatgtcactcagtcactgacaaagagaacaaaaggtttggtggggaggagatgaacatggatgacttagtagtcaactggttatatggccctggcactcagaagagaagtctgaacttgagagagagatttggaagtcagcaggatctagttggtagttgaaaacataaaaacagatgaaattactcagggaaactttctagggaagagaactggggaaggaattctaagaaccaacactattccaaggatgaatagagaagaagaagccctcaatagatatgggcaaggagtggcttgccaatcattggacagtatgttgtatagaacctagaaaagggcagcttttgtaggagtaactttaatattattaaatgctatatagaaagaagtaaaataagaattgagatatgactcttgaatttcataaggttcttaatgtgcttgttaagaattattccacaatagtggtggatggaaacagggacaaggattgaatgacttttttagatgagacaagttggagacaaatttctttcagctcctgaacaaagatttaagcatgccagtggggaaagaactaataatgaaggacaagttgaagaaacagaatattagtgccaccctctaaaatgtcttaatttcatcatattcctgaggattctataggatagtatttaacaacctgaaacataaatttatcaggcacaggttagattttctttccattgtgattat

SEQ ID NO: 57080 - DNA, 1057 bp, Homo sapiens
acaaaaaaattagccgggcatggtggcaggcacctgtaatcccagcaactcaggaggctgaggcagagaattgcttgaacccaggaggcggaggaggttgcagtgagctgaaatcatgccactgcactccagcctgggcgacagagcgagacttgtctcaaaaaaaaaaaaagtgtagtggaaaacttttgaatgaaacagaatcactaaattcttagctttattatagaacagtatttaatttgtccaggtctcagtttagattaagaagtaggccaaaaaaaaaaaaaaggcctataattatcagaaaaattaatgaactaaatcatctgcactaacatattggtttagaagttctcttgctttgtacataattcaaggaatttgattatctattttctcgtcccacagcagattaaaaggtgcaaattagatgttggagtagagccatataggtaggatggagggccagctgggtggcaggaaaaaagtcacattagcctgaggctgtttaaaatagggacagcagttacctatacaacacctcattagactctgagtatatcattaactgttatattgtgctatatataaagtattgctcctgatggaaaattcattgtgggaaaattatgtttgtaattttgggaatcataaacatatatacagtagagtggtgtatattagaatatagacctcgctaaaaaaaatagaacatacactttggagtccagtatatctaggttctcatcttctatgacttaagcattataattcctcatctctaaaaacagaaatggtaatacttttatctaaaggttgtttggaaatgtaaataataatatctttagtatagtacctgacacctttaatgaatgttattttcctccttaaattctgtttaacaaaaattagaaagatattcatccagaatatttttgatcaagttctactgtaaaatgttaatatagaagctacatataaaaccttatatagtttagggttaactgtatgtgtacttttgggagtggtagtcagaaatgaagtaattcttcat

SEQ ID NO: 57081 - DNA, 1052 bp, Homo sapiens
cagggcctgggccaggcggggaatgcgcacgggaactgctttttggacccctagtctgtgggggtgggggagggcgaaggcgtctgtaaacaggcgccgcctcggcctcccagcacctcagggctgcttcctcccccagcccctgaagcgctccccttctttggccaagtggatttcacggtgtctgtttccctgaagtccctggagatctagcctggtagtcttctccctgctggcgatgggaaaattgtgtgtgtgcaggtgtctttaaaaaaaaaaaacaaaaaacttaaatgcaacaaaaacatataaaatgtggttatcggtaaaggatggagtggtaagggatgcgcctctctaaacatctctaagtatcagttctataaacatcagttatgcccgcatcccaggtgagagtggattgaaacaagggctcttttggaacagtaataacacaactcttgacataccagaatagcctatgaaactggaaacaaacactggcaacgcggagacaaactgtaatgtttaaagaggacttttattccagctaggcgttttgaattactaacatgcagtataagaagcaacattaactagcataaagtggacctcaggaagcacttcgaaaggagacaggtggttcatctccggccatagagcttcttgtgccttgtctcgtgtttcagtaatttttcctgaaattgttcaagaccagtcttttctctgagtttgaaatttgatttcgtttttgttttgttttgcgacggagtcttgctctgtcacccaggctggattgcagtggcacaatctcggctcactacagcctccacctcccggattcaagcgattctcctgcctcaccatccggagtagctgggattacaggcgcccgccaccatgcccggctgatttttgtatttttagtagagacggggtttcaccatgttggccaggctggtctggaactcctgacctcaagtcatctgccctcctccgcctcccaaagtgcttggattacaggcgtgagccacctcgctcagccttaaact

SEQ ID NO: 57082 - DNA, 1042 bp, Homo sapiens
agcaagaaaataatctctccacattcagagttaatcttccgaactcagcaactgccagtagaacgcaccccggtcagggcgggctcgcgggcgcggtcccacccccaggcccctccgccgcggaggttctccagcgccgcccgtactcccgcctttcgcgcgtccctgctctaacagctctggttctgtcaggacctcactcctccgctcccggcgcaaccgcggccacgcagcgacgtgcacgcgcgtgtgcgccgccgccgcccggcagagtgggcgcctccgacatcaggagcgcgcacgccgcgcagaggggcctggacgagcgcgcttccgacccgccgccaccgcctcctcccctccttctcggcccgccccctccctcgcctcttcctgccaggcggcccttctcccctcccctctcagttccctccgccctcctcgggctccagcggtggcggagcgaacgggaccggcccggcttcagagcgcgaggtggagggtggaacgcgggcgcctgaaggagttgttgtctcggcagcgcccgcggagacgtgaagaggtgaggcgaggacggcctcctagggacacgagggcggcccggcggcccggatccgcgggccgaggctgcctgggtgtgttggcgtcgggctgagcctggggagggtcgagatggggccccagccgaggactgggatgcgggaggaccgcggtaaggagggtagggggcgggttcaggactgtcggccgcctcccggacaccgcagttctcccaggtggccgctcctcgcggatagggcgggcggggtcggcgcccttacctgggggtggggtagtggctttggcggccgcctcctccagctgtgccctcctgacattgctgcctcggcggctgccgcccgctgctacgctgtggctgctgctggattcgcagtcccagccgccctgcgtccggtgggcgagtggttagggtattttcttacccacacgcaggcttctgtactcgaccatttctctccctcgcccttcctcttcctccgcc

SEQ ID NO: 57083 - DNA, 1135 bp, Homo sapiens
cctgtaatcctagcactttgggaggccaacgcggggggtcacctgtggtcaggagttcaaggctagcctggctaacatggcaaaaccctgtctctacaagaaatacaaaaattagccgggtgtgatggcaggcacctgttatcccaggtacttgggaggctgaagcaggagaatcgcttgaactcgggaggtggaggttgcaatgagccaagatggggccacttcactccagcctgggggaaagagcaaaactctgtttcaaacaaaacaaaacaaaacaaaaaagatagttattttatatatcatatattgtcatagtaaaactatttgttctttttttttaaaaaaaaaaacctaactggaaatatgtctttgttcttcgagaattaatattttatctaacttttcattactgttctacagaattatagaccaatccagcaatgtggagatagcatcttttccaatctataaggtgttattctgtgcacgtggacatgacggaacaacagagagcaattgctttgcatttacagagagttcccatggttcggaagaatttcagatacatgttttctcctgtgaaattaaagaggcagtaagtataatatagtatagcaatttgctatagagatgaattagggtaatatttttgagctctaatttcactgttgtataaatatgttacataaatttggagtatgtttctaaagacaaaattaatatttgtaatgacatagaactgaatgtggaaagccaagtctggtatatctgcataggtagggcactctcacagcttagcagttgtcgtagaaaaatacaactggatgagttgcctttccaccttaccatggtagtaaattgcttatgctcagaagggagactatttttgcagctctcttattattttgccctagtagattggtccatgtgattttaaaaagtgcctataacgatacctgtttctctgatgggcttgatagttgcatattgctttcatttagatattgcattaagattattttatcaatctctgtggttttcattgatgattatttgttttgtgctttcttgctcagaggctatattttgctccagagaactggcttaaataaaattacaaatgctcacttaa

SEQ ID NO: 57084 - DNA, 1057 bp, Homo sapiens
gtgcttgtacaagaaaaagtggcagaatatgtgaataaaacaaaggaaaacagaagacctcatactttaacagactcttctgttatagggagtattcctgtttcaagcaagttacaaatattgtattcctagactaatacagttcaagaagtactttgaattcactttatctaaagtgagggatttattaatgttcacagcattcttcttatctgtacttcccaatgtgacacattgaaaatatttttttaacccttcacatttcaccttgttttctttgtcaacctatgcgtgggctgagagatttggagaatctttggtgcttcaagctcacaagtttgtgatgatctgatgcttcttttggaaccaagaagtagaataacttctggagaagtgttggatttagagtacttcttcactttaaggaaagaatatgagctatacacacaaatacacacacatatgtatatacatatatatgtatatatgtatgtataaaagtagtcactagagtggcctaataccaatagaatagataagaataagaccatttcagcattcattctgggaacccaacacttatagcacaacaacattgagtaaaaatactggtagctctttatgttactgactgtattgctaaagccagtatttgccttattctatggttctgtatctagcccctgaggctgagggaagtgaagagagaacttggagacttggccaaaaccttgtttgtgagagtgtgttgggaagattcagataccaatatcattttagtaaattatcttaggatacattcaatttcttgtatattttgaagcctagaaatatctataaataaatacagtttattttgtgaacttaaattagttcaatatctttatcaccatgtttaaatgtcagagttgtgagaagcaaatatttgaaagatagctttttttttttttaaagtaaaaggaattccttctttctttctttctttcttttttttttttggagacagagtcttgctctgtcacccaggctggagtgcggtggtgcaatggctcactgc

SEQ ID NO: 57085 - DNA, 1154 bp, Homo sapiens
atcctagttgcagctcctaaatcatagttctcttctggtctccagtatgtatgctggtggtgcttagtgttgaactttatctgtatatatttgaaaaccctcctcagatttgaacttaagtttccatgaagtgaaatgtaccccattattaatttcaaagtaaaaaattctgttaatttacttcttaagcgatatttcttcaatatttcccttcttggacttcacattgatgatagtttttaggttgtaataatttagagtttggatggtctacatttaccatctacagttgtttactccctctttttttaatgcacaagtgatgaaaatgttgtcatgtaatatctaaacaatgataaatacttagactatatataaaaatatatattctgccaaagaaaattgtcatggaaaattgtagattcaagagttaggagagaaggatatcagaatgcaattaaaacctttgcctaatggtatttccttttttattcttttaggtaagcagaattttgtacagtttctgtacagcattcaaacgttcttccagacaagtgtctgatgttaaagactcagttattcctacccccgacagtgatgtgtttaccttcagtgtctccttggaggtaaaagaagacgatggaaaaggaaactttaggtgaggcatttggaaagattaaaaattcgcattgtatctggagtataatataggcgcatataaagtttcaagaaactatacagtgttggcataaagcctcaaactgataaatatttggctggtgaattaatattttttattcttgtgcttgtcagatatttctttccttttttttttgagatggagtttcgctcttgtcacccaggctggagtgtgcatgtgcaatggcacgatctcgactcactgccatctctgcctcctgggttccagtgattctcctgcctcggcctcctaagtagctgggattacaggcgcctgccaccatgcctggctcatttttgtatttttaggagagacggggtttcaccccgttggccaggcttgtctcgaactcctgacctcaggtgatctgccttccttggcctcccaaagtgctgggattataagtgtgagccaccgcgcttggtcagatacttattttcttaatgatttaaaa

SEQ ID NO: 57086 - DNA, 1011 bp, Homo sapiens
aaatcctttaaattttcaaaaagaacaaaaagaaagagagtatactttccaaactgttagcattatttcctaaggaggctgacagaagggagaaattattttttctttacatactttggtatttgttaacttattatggtgactatataatgggtttgtaatttaaaccctataatatagaacattgttcttaaaacaaaaaaccattagagatgcaagctgaagcaaagtatgtagggatgtgtgagataaatctgttctcattgacctaattttttagagagtcaaattttatttctaaaaaagaattaaatcttttattcttccttagcaagaatttagggcagtagtataagaaatagtacagtgaattgcatgattgattattatttaatttgtgtagacagtgtttattacaagaattcataggagagagatcatagcagtatataggtgaaattatgaatactagagtataattatttctcttgtagattatattttgttctctgtatttgaaaagttatcctcagagcttaccaactttagctttgctatgtacgtgatcatttttgggtgccagaaggaagccttgaacaagtgatcctcaagaacttataggaagtatacatttactccttactaagcttacatttggacaggaccagtgatcttgctcatgtcagcattagccatgatactaggagagtaaacctttgaaaaacaacaaggatgagaataacggttgagtggttagctgccactattttgaaattgaaaaaatcttatgtttaatatagttatattctttaccctttctataaattgttacatagcatatcttgaagttttgggaaactacaataaaaacattcttgtgtgtgggtatgtgttgttggcagagggaccctgtggacagattacattgcttctcaagttacgagacctataatatagcagtatgaatttgggtaaattgcttaacttctctggactttactttgcttacat

SEQ ID NO: 57087 - DNA, 1599 bp, Homo sapiens
gtttcaagaaaatcctctttgaaagcaaaggaaatccactagatgagtccatgacatttttttgatcctattaaattcagtgagaatgtttgcttctaaaaaagcattcttttttgtttagctttagtaattgacatattaatttcatttcataattatattcattcacttaccaaaaatgtattaaatgccttttatatgtggggcactgtttctaggtgcttaagatatataagtaaagaagacaaagattcttgccattgtggagtttctattcatgcattaaaacctagccaattactgtatgattaatagatatttgatttatgtatgactttaaaaataattgtattaggtatccgtcttgtttctagggtagagttcagcatgtatcataactagttgcctattttcaagttcctgataactgcagttaatgtatcaaagcaatggcaatgtgtaattacattttaatcagaaatattgaaagcaatgattatttttataaatttctcttttatttatttggatcttctctgatcatagatatatactagcagcatctagcttaatatttattagtacttctcaagtgatagggtgctgtatgcagtataattgctgtactgttacttgggataaccagtaaaataaggctgttaatcaagcagtgttatgagtgacccagttctttttaaatgcctgtctctaaagataaatagtgctttgatttttaagagaggagaaaagacattttcattatgcctggccaaacaagtggctgagggtcagctagaaactgaatgtcaattgagttagattatattatggtaaagtattcattggggactgttgactattaatcttaaggagtatgtttatgtacgtgtgtatgcatgtgtaggaagagatattcaaactttaaaatatagttaaatcattatgttattatatatcattatataaaatattacagttaaatcattatgcaaaataatctgggccaaccgagtatttaatcaagctgcttgttactttcattctgcctacaatgttggaaatatgttatagtaggtccagtgaatgttaggaggctattgcagaagtctggggaggataaagttggttgcagttgagatggaagtgcatgaactttgtagaggttgagaaaataagatgtattagacttggtggtggattagtaatagatgatggggcaaaaataattcctaggtttccagtttggatggagtgtggtaacaatttctgaggtggaataccctggaaaacgaccaggttagggagaagaaactgagttcagacttgggcatactgactttgaggtgcctttgagcttctagaacttgggatacatgtttataggtgataatgcctagagacaagagaatgaaagaaaagggcaagagtaaagagagataacttcaagcccttaagaggttaatagaggagaagcaatcaacaatggagtttgtgaaggtggataaagaagtagtgctttgtcactgaagccaagggaaacagattggtccacagtgaaaggagtgaaaatatgtcttgaatccagtggggcatggagag

SEQ ID NO: 57088 - DNA, 1758 bp, Homo sapiens
ggtgtatttaaactaacacctatttactaatttgaaacttgcttttgtcacttggcagcataactgttattttaaggtatggtagcacgttaagtcatataaactctgcctttctctagtttatttttgcttcaagcccatcagtattatcagcttagtttctctaacccaacaatacaaaagcttagctagaaaaggctaaaagaaaccattaaatctgatggtttactaaaattattaatgggatgagtttacttgaacttgtttcagttgtggaagttttagtttttttctgagatagcccaaatatgacagtatggggaaagcaaggaatatattttcagaggaaggtatgccaatactggggtttgagctagaggtagaagagtgtgtataatctagtgaagcaggtgggaggccacttttagaaaatagacatgtggattctatgactttcgaggctcaaaacttgaaaccagagcctggggtgttagatcaaaccagagtacattgtcaaggtttggagtcccagtggttgcaccagagtcagctctaatagataaaaaatgagcaacaaatacaagtaaagtctgagcaaaaaggcatagaatatagttccagattcaagctaggcaccaggaaaaagatgacaaatgaaattgcattcacaatattgagatatgcaattcagtttcttggtcagatgggcatagtagcatatttactatgttgtgatcattgattttaggaggagagatctttgcctttgttctgacgctgcacacctttgggatgtggtaaagcctgataagtatgtgttgcttccccagcaagttggagttgttgtgtaggttctggtgattgtaggaaagggttaggtccttcctttaatgagcacttgctgttgtaacaagtcagggagacaaattcagacatgtaaacaataatgaactcttcttactagaaaacctatcttaggttgttttaacttggaggttcattgatatctaagtttatgcttgaacaaagaattccaagttaggtcatcaagagatagggcttcctggaggacctgggagtcaggatgtggccgccaggtaaaacttgactataatatgtatgccttatgcctcctatactgtggagtctgtctttggcacttggcccagctcagcttggcctcagagaagtgggtatagtcaaggtgtgataggcctatgatccgttttcaacatcatttcctgaaccctatttcctaccacacatcattgtccagcttgctgtacattcatttcagggaatccagatggttctttttatgccttgaaatgttgcctagcaatatataactaacacgttaattattatgagtaagtccataggatgatttttaaaagtaagtgagaagaagaacaagcttttcctggaggtagaattacctggttcaccaataagaagatgagatcaataaaaaaattgaagatataactgagcttaagcagtactattgtttaatgcccccccacaaactgttttctcttgacccaagcttacacttttatataaactagtatacttttcatggcaacagcagttcaggagttgtaaaggaagtgtgaatggattattttcttgtcttctcaggcacagtaaccttggtgcacgaccgaaagggctgtctactctggtgaagagtggtgtccctgaagcattgagggcagaggtatggcagttattggcaggctgccatgacaacca

SEQ ID NO: 57089 - DNA, 1024 bp, Homo sapiens
tgaacatagaatagggccgggattacaatgtggaacaattatactttatatggtcttgttggttttataatctatagaaaataaagttcttcatatcattttgactggtagtaaatgactctagggaccaaagtttaaaaaagggtgaaaatctctggatgagattcaagtgaaaatgaagcaggttaggagctgtagaccaactgataacctcaatctggaaccaaggaccaagcaggaccagtcagaagagctgttatatgtaaatccgtgttgaatcactctccacttcagaaggagctttcaggcacaccttgccttggtaacagtggtagcttcgctttaggaggagattttagtgctcactatgcaggaagaccctgggttcgaatctcaaattctgctacttactggttggtgaccttgggcaagctccttaactatcttcagtctcacttccttttttggtaaaataggcataataatatgtatcttacaggattgttgtgagaatttagtaagataatttatataaagcactcaatgcatgcctaatacatgataagcactcacccgtgatggggaatgaggaaaattataaagcaatatatgcataaatgaagtttgaagtaagctttcggaattaacatcatcagaaagtactataggaaatatggagattactgtgggctcttgaggtccgtgcaggtttcaagacattcatctgagaaatggggagaaagaaaacaggaagtgtgtagcaccctgttatctacttgtaccgctaattcattcattatttatcaaacagtatctcttctgtatcagaggctatgctaagcactagacatgtaaagaagactaatacctataccctatccttgaggagtttacagcccagtgggggaagatagtcaaaaaggcaaagaagcagcgataacatggttaagcactgtgacacaggtatgagcaaagtgacaagtgaggacaaagactggatacagccatttctgcctaggaacag

SEQ ID NO: 57090 - DNA, 1104 bp, Homo sapiens
aatctggaaggcttcttaacttctaatcttaccacattttaaatcctggaacaagccatgctgcttacatataatcctagtagacagcatttgagtgtgtatgtaaatatatataaacaaacgtgtttgtcatgcaagatgaaaatttaaaaatctaaccattactgaattaagtatatcatattgacatttctgttgacttactagtttatttggcttaactaaagtcttagagaattactatataagagagtattttaacttaacaagagtatgtgcattacgtatgtgttatatgtgttgtttcccaggctgctttgtgtttgtaagatgattattatatctaggatttgaggtgtttcttaatttaccaaacgggaattgattataaactaatgagaattttataattgttcttgatgttgtttttgttaattttacctcttctttttttgatgtttgtcctaatacgtatacaccatcacaagtttattagtttctaaaataagcaagtagttggatgaattaggaaggtttttggcattactttcaatggcaaaaaccgcaattacttttgcaccagcctagtaagaactggaaagctactctcagtgaagactggaattttaacttattcttcttatatccttcccacccttctgtccccaaccaccatttattaatggacacataatacgtatactctgagcatatttttatgaagccaatttgaattgtggcccattggggattaatttattctgtgctattgtagtatttcaaatcagttatagttcaaggtgctaaatcttatacaaatgatgctgcattacagtctaatgtttacaaacttcatggcacgcttagccagggaaaacaatcttgcgaatgttgggggtaattgccttttaataggtagatgcagttctactggcttgtttgtttaaacaaaggaagaaacttattaaatgcccaacttatatgtgatgcatctaatggaaacaagacagtatcttgaacaagaacagtgataaagcctagagccatgggttttattcaagttttgtatctctgggcttatatttttaatagtttgttttaaac

SEQ ID NO: 57091 - DNA, 1049 bp, Homo sapiens
tttttttgagacggagtcttgctctgtcacccaggctggagtgcagtggcgtaagctcggctcactgcaagctccacctcctgggttcacgccattctcctgtctcagcctcccgagtagctgggactacaggcgcccgccaccacgcccggctaatttttttgtatttttagtagagatggggtttcaccgtgttcgccaggatggtctcgatctcctgacttcatgatctgccctccttggcctcccaaagtgctgggattacaggtgtgagccaccgcgcctggctggattcaggttttatagggcatgaagcttatataatttggaggcaacagctctttaaggacaagatcccattgtgggtgtgggtgcaaattttacaaaagtatataatgatgtgaatgtgtttctagggacccttctgggacagaatgaagacaagctaagcttcatcttctgctactatcacaaactgagatgacacttcatatttttttttatcttgaagggtagtccactatatttggaaagagcataggcttatgttacaactgggattcaaaaatgggccttctccatcttctttgctaccgttagagtcttacgtacatctttttcctaggcaacaacagctttcaaaatggtattcacatttccatctttgtttttttacacactccttccctatagcctgttctctacagtgcagctgaagaaccctttttaaaaatgtttcagtgacatattcaggatatagaataaaatccagaatttttaaactattttcagtgttcttcattcattcccaaaatctaagtttctctctgctgtcatttctcttgagcctgaaataatttttttagcacttcttatggttcaggtctgttggtgaaaacttctcttagatttcctttatttgaacattctctattttgcctttattctttattcttgcagggtgttttcactggactactgagttgacagtttttgctttcagcattttgaaaatgttccactgccctctggtcttcatactgcctgat

SEQ ID NO: 57092 - DNA, 1046 bp, Homo sapiens
tttagagatgaattcaacaatatacaatatacatttattattagctcaccaatatttttactttgtgtctttagactgcatctgatgtcgtaggaagcactcaacactttattgaatcaacaaataatgaatgtaaaaaatatcttttggcagcatctgatgtcctttggacttttgcttctttattctgttctggaaaatgtactatgaataaaactgctttttctctaatctcaaatgaactgcataatatttccaaaatgccgtatacctgcattttgaattatgagtcaactgataaaaaaatttaaaagacttctgggccaaaagggctatttacatgctaagtaatatgccttgggatgaaaacacattataaatatttatatttaaccaattttctctaaacccttttggaggtcttttgaagatttctttgtttgctccttcctagttcgctttctccctcccttttttcctccctttcttatagggaatgctattctgtaaaagctatattctatcttctgccaaaccctcaaatctaattttggaacaacttctgtaggtaatttaagtacagaagatagatttaatgttcattttacttttgatttatatatgacatctgtttggaaccaaactttctctgtttttagaaacagagaaaaaaaatattttgggatatgtaggccagaggcaaatgatctgacaagttagcccccttgtttctaaaggaaaaattgccacagtttataagagtggtataaaggccaagaagttgaccaagaccaaaggagatcacaaagaaagcatagcatatagtagactttcaagaaagaagtttactgaatgatgaaggaaaatatgtgtctatggtttttatggcctacctagcatataggatatatcttctttttttccgacccactaccaaagaagagttataaaattcctgtcttcagtcgtgttgacctaaaataagatgtactgtggtatgacaataccaacctttatgtgccttattttcagactttgtgccttta

SEQ ID NO: 57093 - DNA, 1050 bp, Homo sapiens
atgtagggttgtctaaagccacattgttgaatatgtgtagaatgatgaaagatataagtgatataaaaaataattaaactcatgattaagattttgttttttgttttttaacttggactgcagagacatctcataaagacaagagcatgagtatttcaagttttcttttgaaaactgagtcatagatgttgcatttcaagccaaggtttgatcattctatacttcatggctttttaaaattctagttgctataacaactttgatatttctttattatttttagcacttcagttgccataacaataagatatcctaaaaaatagcaattttcttttataagagaaaattttcttttaattaaaaatgaatgtgaaccaacacttcttacctataatgtgaacccattatttaaaatgggtctgtgctcttctgttttcatacaattttagcagacttttgtaggaaatatcttaaggttcaacttttctctctctgtttttactgtacaaaagttgaagggatacagctgttttgaaccctttctatgagataattctaatttttatgggatttcattgatataaaaatgaaatgatataaaaaatttaatttccagatttgttagtttataaagcaggaaaagatcgtgattaatggatagttgtaagccatgggaaatgtaagaaacgttgaaatttccttttctcctgtgttatttttaagtgtattttcatacctgttgccatactaaaacaggtacctcctcacttatctggaaataactgacagcttaagcctgagctatggcactttactcatagagcagttacctttatttgctctttgagaaaaaattcttataagcttagtttctgatacagaagcctctagaaaataaggacagcaaattagaacaggaaggaggggctatgctgtgtttgctatgcacatagattcataaaatatagagttatgtattatttttaaggtacctaattcttatggaaatcaaacaaatccagcagctacaaaggtatgattgtatcagaa

SEQ ID NO: 57094 - DNA, 1426 bp, Homo sapiens
tgaagacttggcaaatttttaataattaataagttttttctgccaatgagcattagattactgctgactttttagtgtcatagtaccttgtggtagtttctttacagggtttacaggagtatggcagtttattttttctgtcttgtccatacgaaataatctttacaaatgctataaggagaataccttgagaagttcataaatgccttaatatattataaagatcggtcagttccattgtcttcttttgtcagtcttgatcggagcttgccgagtaagtctataagcctgcatgtgcctggcaactgttacctagtgacagtttcagctgcagtagccattggctgtgctgttgattggggcaggagggccgagtcacctttctgatggtgagtttttctgcatcagcccaggatgaggaggaggagtagggcttgggctcaggtggagtcattgatgctgagagattgtgaagaatatactgacagcatccttgtagctgcatcacagtaaatcggacttctgaatcaagcagcccagcctagcagctgataagagtgaatgtaggtgagaagcattaccttattcctgtaacaagagaactgttttgtgataagtgaaactaggaatgtagaagaagaaatatcctatggctattataaaagaagaaggacttgcctgaatgacttggtggtgcaccagaaaataactttcagaagaatgctttctgttaagctgctgcattgttcctggaggaaatgttatttctaatgcatgttatttcttcaaaagataggataacaaagaatgacaggagactctctgaaatgacttcacttttaaaaaatactttggcaaatgttaacctgatatcaaaatgaccttggaagcattttggatggattctatcctggcagccttgcaatgtttcaaactctaggatttaaagttcatcttgatactttagaggtattttaaaataagactatcttgcaacctacctaatggcccctgtgttaattgagcacttgctcaaaatagagtacagaaaaatagaagaggcattttttaacatatggctgctacataactgcaaatgtaataaacaaggtaattttccactttcagaagatatagttgaagtaatgatttaatgtgttaaatcatctactgaaaatagaaaaggtatagcaacatagaacatgaagcctattagaaatacctaagtaataaataatggcagcatttctggtcaaataagctcggagtatattggaaagttttattgtctaactttatatttacatatatatgtgagatatgggtatacagttgcaaaggtgagaaataactgtgagctacatattttattatcatgctccattataaggaaggtggtatatgaaataacaaatgttattttaag

SEQ ID NO: 57095 - DNA, 1023 bp, Homo sapiens
aagttctttgagggcaccagaggaaactaattagtgacctcttttcacctcctttctagcttatccccttctctccaccccttaccgccccccccccacccccccgcccgaaagctgaggtgtgtcactgctgaactgaggctggtgaagagacttgagcactctctgggactctcagctgtgacagaagcactgacactgtctactgaagcaggttctgaaacactcatgtgcggtgtttaacagatgctgggcagggcatctgcttgctgtagccaagtctgcaggtgtctttaaatttccaagccatgaatgaatccaggtggactgaatggaggatcctgaacatgagcagtggcattgtgaatgtgtccgagcgtcactcctgcccacttggatttggccactacagtgtggtggatgtctgcatcttcgagacagtggttattgtgttgctgacatttctgatcattgctgggaatctaacagttatctttgtctttcattgtgctccactgttacatcattatactaccagctatttcattcagacgatggcatatgctgatcttttcgttggagttagctgcttggttcctactctgtcacttctccactactccacaggtgtccacgagtcattgacttgccaggtttttggatatatcatctcagttctaaaaagtgtttctatggcatgtcttgcttgcatcagtgtggatcgttatcttgcaataaccaagcctctttcctacaatcaactggtcaccccttgtcgcttgagaatttgcattattttgatctggatctactcctgcctaattttcttgccttccttttttggctgggggaaacctggttaccatggtgacatttttgaatggtgtgccacgtcttggctcaccagtgcctattttactggctttattgtttgtttactttatgctcctgctgcctttgttgtctgcttcacttacttccacattttcaaaatttgccgtcagcacaccaaagagataaatg

SEQ ID NO: 57096 - DNA, 1049 bp, Homo sapiens
aattatatgccaggctcactgttcacttttacatgtgttataccttaaatcctcactacagccttttgagataatagttattatttccactccagagataaggaaacgaaagaaaaatgattattcgtcagttaactagtcaatggcagaggttcccgcccatccagtaggcctgggccaaagcctgcctgcttcaccggtaggctgcgctgctttcatttcaaaagcctttaaatttttgtacctctgtctgtaccttttccctacaatatttctctgagttttatttatttttttctcatcgtaagtcttttgcttgagttcttttcttgtcttgtgatatctttttctttgatcttaaaagtttcttttattaaaacagcaatctgataagctcaaacttaccagtttagtctataatcaaactgaaattgttgatattactttggtttacttttgttatttcccttgaatacctttttgaaatctctatcaatttctttttggaaaaaaattgttttgaagaggaagagtgaaaagaaaggctttatcataggctgaaagaggctgaatgaggcaaattctgagtttatttatttactatagtattttatatacaactctaggacaaaccacttaacttccttttatcatattttaatgtgtttgtataataagctaatccttattttgaaacctctctttttaggtaatgtgttttaagaataggaagcataaccatttttctcatcattatattgtattttgtggtaattatccagtttggctataaaagacagccaaaaaacaatgcattctgtattctttttcctaagggttctattatttgcatagttgtttctagagttatagagtgttggaaagcttcataattgacactattagtatatgaaacttgggctgagatccaggccctcataaactgcttggccttgggtaagataccaaatgctccaaaaccttagttttggcattgattaaaaaatcttaagtcagagacttgtagctctctgtttagctgaatttga

SEQ ID NO: 57097 - DNA, 1040 bp, Homo sapiens
agccaccatgcccggcctattgagcgtcttttgtgtgcaagtcattgtttaggtatttggaatctggtgaacaggaatgataaactcttttctcatagagcttacatccaaatagagataaaaagtattctatattaagatgccagcaagtaaaaaaaaataagataatttcagattatgattaatgccatgaaaagaatagaacaggacatcaggatggagaagtgatagagatgggaggcagcttctccatgaactttggtttacaaatatctcatcattttggttgccttccaccacaacaacatgcatggacttggcacttttaacatatgatcttatggtgaaagacttctgatctgctaatgtcctctgtgtacatagggaagtatggagcttcttagttatgtgggagatgaagctgtctgaactacatcagtgagggaactattaaagaaggagacacaaaaatttagaccttttgcagttatcgttagccgcagtattctcttgctcagtgtgctcttcttacagtgggatgagtagttgccatatttggacaatgtgcttcccttagtgcagctccacatgtaatcagctgttccaacaacaggtcaccttagctttgtagtgaacttatttaggtctagatctcacctgtttggaacttggaaaatcagtttattgaacatagttgcagggctttgcagttattccttacttactcagcacttccttctactttaatgtgatctttttctaatgtttttaatagatttagaaagcttatgttccttgttgtctttaaagttagcaaaaatgatgtatacagaagagtacctaggcaaaacttagtaaaaagctttcttctaaattgatttttctttatttaattagcacattttgagtaaggccataggtctacctcaaactgtacctgaacctgttaatatctagttcccattttttccccttttgtttcaaatattttataaaatgtttgctaaagacagtgaagcataggctgggcatggtggctc

SEQ ID NO: 57098 - DNA, 1221 bp, Homo sapiens
accactgcactacagcctaggcaacagagcaagacattatacccccaaaaataaataaataaaatttgagcctagtagttgttgtcatttgccacttttctagactaaatcattattataagctataccatattactgacatgttttgattaatgtaacaaatgcttttccagcttaacatttttcacagcttattttgatatggaatttctcttaatgttatagtaacatctaaaaatagttttatttagataaatttctttaaaatgtatagtacaaataacatctttgttagatctgtaactaagaggcaataaatttgaagcacactccatatgagaaattgtaaagccaaactaacaaaatcgtgattactttgggatgacacagtgtcatgaaagtcaagaggagagtatcatgaagactgaaaagtgatagcactgaatgctgctgttcttttaaagatgaaggttcagctatcagagcaggaacctaagggcaaaatctgaaattaataaatcaagaaatagcaatataagcatatggctatttaggaataattattactattagataagaagttgcttctggaaagaggactcatgacaacaatggaatcatgggctgttttgtgatactggatttttaaatcatgaagcatgtgttatattttaagccaaaaaaaaaaaaaaaaaaaaaaactggggagggatcttcgtgttggtaggattcgttttccacctttaaaaatttaggtaaggaaagtgggatagaagccagactttaaggagacaagaaatggaaaggaagtagaacagcagccatagactagttcctcaagaagcttgacctgaaagagttatgtatcagttaaagaccatgagatagaggagggtaatctgctgtaagttataacttacacagtttgctgatttttatcatgaattaaaaatatgtacttgtttaaacgttgcactgccatttaccatttgctaagtagatgcataagaacattgaggccaaaattacagtcccaggagcctcagtttcactgtggagttttccctcagcaaatgtttgcttttgcttgtccttttttcttagctaaccttggtttctagatcaagatgattttccttctttgttttcacacagcatattcaattgcaccacactctttttaatcacaattctttctgatgggtttttgattggatccaa

SEQ ID NO: 57099 - DNA, 1080 bp, Homo sapiens
caccatcatccaattcttgctcctcctgttcctgaaagaaagtttagccaggcagggtggcgggcacctgtactactatggagagaggtgtagagtggtgctacctgagagcataacactaatgatctgccatcgtgtgaattttccatatttttctgcattgtttgtggtcattgtggaaaagtatgattctgatgcatgtatcaagatcttttaaagaacacaaaaaagttataatttttttcaactctaaaatcttccagtgaaactaacttttaaggaagatcttccatgagtatcaagtggcttcacataccctatgcaagagtattgttcaataagggctcacccagttagttactctcttccttagtccaccttttaaaaatgctgccagatgaatctccttgaagcttacattgttatgtaatttccttattttctttagaaacaaattcagaactccttagcttacctggtaatgctctctacaatctgccctgaacctccctttccaatcttagacctcatttctctcgtcatacgtgctgtggtacaacaatctctgaaccctgctttgggaaaaccatttctttgcttatgttggtacttccatttctctttgctgtgaacatttgaactatttccaaagtccagatcaaatgcctagtccctcttaggctttctcctgcttttcaacctaggagtagtaatttttctcttttttggtttctttgtaaatctcttctaaattttattagtatttaacccttcccttatagttctttacacatctttttgttctctgccagaatataaactacgtaagaataatcttttacatgtttccaaacccaacattgtctactctgtatcctgtatagtttgtgccctgtaaatgtctactgaattgaacttaaactttgaagtataaccctatagacataccactaatctagggacgtttgtatactctttcaatgctaccatgtactctttgaactgcatcttgacatttaatttttctatgacttagttttttttaacccacaaggtggttataatgatatttcactgtgc

SEQ ID NO: 57100 - DNA, 1149 bp, Homo sapiens
aatttagtggccgatacttgaaattgtataggtagataggatacagcatatgttattttcagtgtatctaaaaccatgaacttgggtcctgtgtgagtgcaaagtggatactgaaaactagtttaatttcctcagattcatctgataggttatatcctactcaaaaatgacaggaaagccaaaggctactatgttagccatttctgctgactcttattggtatcctgtaccctatacttcttaaacagattacattttttcagtatactagtagatctcaaaaggagatagaagaagcagggttatttctccagggtagagtattgttttgactatttcaattttttcttaatgtaaattatagaaagtaaactcaacaaaattttctttcagaggatgggaaagtggtggctgtaggtacttgaaagataacataagaaagcattaaagggggagactggattttaaacattggaatgcaatcctatttagatattgtaacatagcattcttgtaaagagaaaagccactgcaagtctctacaaagttggccaccattccaggctaaattttagaagtatgtagagatgaagtaaaaatctgagacttttagtaatagctcttgagatctcaagaaatggaacaagctgaagaagtaaaactattgaaaagccaagccaacttgttgctgaattccctaaaccaagaataatttcagaagcttaatttttttcctacaaatagtatagaagaattaacattaccattaaataggggttgagcactataccagtctgaaacccttgagattaaaactagctagaagacaagctgcagaagacaagacagtttataatcccttccttcagcctcacccaaggttttggaaataatcttatgacagctgagagtaagccaggtgcagtggcattccctgtagatccagctacttggggggctgaggtgggagcattgcttgagcccatgagttgaaggctgcagtgcactgtgatcatactgtaaatagctactacacttcagcttgggcatcatagtgaaaccccatctctaacaataataataacattttaaaataaattattaaaatttcacatttagaattatttttctactacagtaattggtacc

SEQ ID NO: 57101 - DNA, 1108 bp, Homo sapiens
tatactctgaaagtatcattttactaatatgtttttgaaataggtactatattttctattgctcatattatcataagtcttagaactttatctattcaaggtaataaaaatttcaactttggtctgcccagactgtagaaaaccaagcattgacacacacataaaaatatgtatatacacatacagaacatttactttatcaaaaagaagagtgcatagggacttcagatcactgtattgtgaagggacttatccgcatctttgataatttaggatagagtatcttaaaataacctttttatgttctagacaccaaactgtgctggactggtaacatattaagaatatgcttaaaacattctctcaatggaaatattacctttttaaaatattttaaatttcaagacggtagaagtccattttcttgtactgttgagtgagattgaaaataagactagagaattgagtggaagaaataatttcatttgagccattccatttcacgtctttcctaaatggtcagttcttttggttctggttctattgaagtcctcatgatgagaaacagggttagtaaagccaaaagcatgacctgggaacaataatgggttattgattctgccagaagtccacctaccagtggccctggcactgtgagaatagagcaggcacatgtatccaaaaaagttcccttttggccgagtgtggtggctcacgcctgtaatctcagcactttgggaggcctaggagggcagatcatgaggtcaggagttcgagaccagcctggccaacatggtgaaaccctgtgtctactaaaaatagaaaaaattagccaggcgtgttggcacatgcctgtaatcccagctacttggggggctgaggcaggcaattgcttcagcccgggaggcagaggttgcagtgagctgagaccacgccactgcactctagcctgggcaacagggcgagactctgtctcagaaaaaaaaaaaaaaagtttccttttatgaaagctgtatttcagtattgacaattgcagttcccttttgggtttctgtgtcaagaagacttttttttctaccacgtttcctcatcctgcagactgcactaa

SEQ ID NO: 57102 - DNA, 1062 bp, Homo sapiens
agatagaggtcacatttagtgagggattcgtggtttaatagattggaagaagggattattagatgggatgggtttggtggaatatgtgagttttctaaagtcattaggtgttttatgcatgagaacataaaagagctggggctggaatcaattttattctaatctaacagatgtcttctactcttaagacacctgtgtaatgaaacgtggctttccccatatctccctactttcactccacttaattaatatacgtggctgtacattgacatactatatcatctattcctaatagaggggttttgcttccttagattttaattatcaataacttcattgcagtattctctgctttcttggtttccagctaattgccccacttgttttttgtttgactagttactttcttcttcatttatgacccctgtctgtagcttatcttggcttctactttctcttatgttctcccctgaattcctttacgtatgttaatattaagctgattgtcataatatttataaggttttcactgtctggacttgacgcagtttggaattttcctagcacatctgaagttaaattttaaataccaaacaaagttgtgctggtttgtatagcttaaacaccagcattttaaataaatgcaaaatgcaataaatgttttcagacaggtaattgttgatttgttgtataacattgtattaataatttctcattcctgattaggttaaatttctttacaattcattccaaaaaatacaaagatatctcagtgatacttacagttggtgaatcctttacatttttttttttttttttttgagacaggttctggttctgttacccagtctggagtgcagtggcaataccttgctcactgcagccttgacctcccggcctcaagtgatattcccacctcagttcctcaagtagctgggaccacaggcacatacatgccaccacatccagctaatttttgtagaaattaggttttaccacgttgcccaggctaatactttactttttattgagtcttttttctgtggtgtcaagcttttggta

SEQ ID NO: 57103 - DNA, 1070 bp, Homo sapiens
tttactatgtgtcaggtgctatgattggtatagataatatctaatcttaaaacaattttgaaaattagaattagcatcacaattgtggtgggttagtaggggaaatgaagaaaacaaagcttggcgacattgagtaacttgtctaagagtatacagtgtgtaggtggctttaaaacccgagtttttttcacttccataagctttctgaaacaggcattccattatgaagggtcagcctcagtgcttgtccctattgtgcctaaagaagattgagaaacatggggtggggcggggaagtcccaaaatcatcttggatagcctaagcctttatgcattctcactgcttaaatggagaactctggcaatgtcaacataatcagatcactgccatctcaatacaggattaaataaaattgctctcatattttttggcagtctgtgggtaaaaattatctctgagatctgtacaatcatatgtggagttcatttaagccaaagtctataaagaatgtttaagaccatgcccctgtttgtgctttttactggtgtttctctattagcctggagtgataggatcagtccttgttaattataactgatagggaaacatggctaagaaatatcattcttgggtcaggcacagtgtctcatgcctgcaatcctggtgctttgggaggccaaggcaggaggattgcttgacttcaggagtttaagactagcctgggcaacatagcaagactccatctcaacagtgacatttaaaaattagctaggtgacagagtgagcttctgtgtcaaaaaatatatatatcattcttggtgatgggcttggccactttgtaagaaaccttggtatctcagatgatagatagaagaagcaaaaccgtgagcatttttctctgtaatgtttagttgtgaggccaataaacttaacactcttggaggcaggttttaagaacttcttttctatcattttcttcttccctgtttttactcccctactcaaaagatgtatgtgtatgtgtttttttttttaatccctcctacagagagaaaagcttgtggcaaag

SEQ ID NO: 57104 - DNA, 1033 bp, Homo sapiens
tcagaattaggagctaaaactttattcaaagtcaccatgttgtaatcacaatattcacaaagcatatgtggttatttgtaccaaaaactctacctgattatccaaattggtgtagtgaacagttccaactccgctattttatagggcaatactctttgaaagtataaaccaaattcacatcttcaagttctagaatattaaaataagtgaatgctaaaagttttgataaatattcatagacttttatatactgagctgagtttagtatttcatggtatttcataaaaataggaaagtgggggtatgacattttaacagtttttgagttatatatagtatgagcttgcaaatatttgttattgcttcacaatttttgcagaaagagattaatttcatactagattggttctatagtgttcattgtagaaaagggaataaaattaatgtgcttaatcataaccaactaaatgtgatttctcaatcacttttcctagagtggtatctctgcccttcagttcactgggatggtgactttctaaagtgtctgcccgaatgttggcacccgtggcatcggaacattgtccatgggttttctggaacctagattcaaattttatcttgaagatacatgaatttctaatgtcagttaagaaaactagcaacatttgtgctacagaaaagataaataaatttattagccttcccgtcacttgtcaactgtgacttacaatcagtgtttgaaaggtcataatgttcattaatattaataagaacatcatagatattacctttcctccccttaaacctgtactctatagctgtttaaggaagttggaaaacttttcaaaacatagattgtaatcatagcatcatgatgttcggggaagtaaatggtaacatcctttaccattaaaattgcttttcagaataatctattggaaacaatattgtagtgtgcctcaggatatttattctttccactaactcatctttgtcaagaattattttacaaaggaaatttttgaataaactt

SEQ ID NO: 57105 - DNA, 1004 bp, Homo sapiens
aaataactataataaaatggaaaatatataattaagctagaggaaaggaagggtgggagtcatcctttttttttggtatatgttagtaaattaatagtaaaaataagggaggacttagccataagggttttaaaacagcatgtctcaatttgtatacaaggctactatgttggtctgtgaaatacgtaaaaaaaaaaaaaaaaaaaaaaaaaaagcgattgattttcagtgctgcaatcctgacctctagtggacattcagaacaaaacccaaacatcacattcttttatttagttactccatcaagcaccattagccaacctaaaatattaaactttcaaagagattaaaacatgagaagcagaataaagtaaaagaatttttggctaatattctaaatattcttgctgtagaacctgtatttaagagcagctagtattaacttatttctttttgcgtgttaattatctgtcactttcactactttctttgaaacaatgcattgctttatagatcatagcagcaagaaatttatcagagaagccaaatggattttcttttgattacctgtaatatataacaagctatacgaaaactgagtggctttaaaaggacaatgatttttatagtgagacatatagtgatgttatgtaacctcctgatagaatgcactgagaagggcacagcatcacttctgtggtatttgtgcccaaaatacatattctgaatttaatcataaggaaccagtagacatatcgagttgagggacattttataaaataactggccaatactcttccaaagcatcaaggtcatgaaaaataaacactgaaaacggtcccatatgaaaggagactaaggagacatgacaaccaaattcaatatataatccagaattgcatcctggaccagaaaaagggcattagtggagcatttgataaaaataatagtttcttggttttgatcattatactatggttatgtaagatgttaatgtttgggta

SEQ ID NO: 57106 - DNA, 1087 bp, Homo sapiens
cataaaagaaataatacaaattttttactgcccttcattagataaagatagtaagagagaaggcctctgggccgggcacggtggctaatgcctgtaatcctagcactttgggaggccaaggtgggtagatcacctgaggtcaggagttcgagaccagcctgaccaacatggtgaaaccccgtctctactaaaaatacaaaattagccaggcatgatggctggctatttttgaatgccagtaatcctagctactcagtaggcggagtcaggagaatcgcttgaacccaggaggcagaggttgcagtgagccaagattgcgctattgcactctagcctgggcgacaaaagtgaaaaaaaaaaagaaaagagaaagcctctgtgagcaaaatgacattggaattgaatgatgcagtagagctagccatatgaagattggcggcaaaaacggtgcagaggcccttctgaaattctgctgcatctatttgaagccatgagtgtgtgtgtgtgtgtgtgggcagggggcggggggtatgtgtttatgtatggtgggagagctagagtgggaggaggctgtgcaatctattaccacctttgtttcacaacatggacttgtccatttcaagaaaaaaaaaatgaggctgagcgtggtggcttacacctgtaatcccagcactttgggaggctgaggtgggtggatcacttgaggtcaggagttcgagaccagcctggccaacatggtgaaaccccgtctctactaaaaatacaaaaattagcctggcgtgctggcacgtgcctgtaatctcagctacttgggaggctgagacaggagaattgcttgaacccaggaggcagaggttgcagtgagccaagatcgtgccattgcactccagcctgggtgaagaagagagactccatctcaaaaaaaaaaaaagaaaaaaaaatgaatgtccctatcttgacatattaattttgtagaaataaattcacttgctaatacatgggttggcccatataactcctccattgaaaatattattttttacagtgacagctgttaaacatatacctaacattctatgtaatatga

SEQ ID NO: 57107 - DNA, 1013 bp, Homo sapiens
gtatctctgaaagaggcttgttgtctctggttttcttctccttctccccattctgccgagaaggaaatgctgagtggccactgttgtgcagctcatttggagcctggtccacaccaccccttaattggttagaggagatcatggctcttttctcagagcccagggtcacattagtggcattatctctgtggcagcaaaaaaatggttttctgcctggctaggctcagcaataaagcagaatacccaagtgcttgatgtaggcattctgttatgtatatctccaaagggttaaattttacaacagacatagcaacttatctagactgtgtgtggtttgctttctaacctccccattagattgccaatttgattgttgttttgttttgttttttgatagagaattttaccacctaaaaatactttggtaggaaattttaggtttctctcctagaatgattgaactgtttatctgtgaaacagcttaaagctgctggcttctgtgctgtgaatctgggaagtctgacttgcttgttatttgatttcctgaataagagaaaaatcacccttcctcatttcctaccaagggttaaaattaaatacccacaatcgctgttgcaggcttgagaactatacctagcaactattctataaggtaattggtttacagtagtcctataccattatgtggtaatggaataagaataatttagccttgtctgttttatagaatggagtttaataccattttagactatttcctcactatggttctctcatattagagtcttttcagtacagtatttacatgactgaatttaactcttttctctcctatatctcccttcactataattcatctctatttatacttatctttacaattactagttcagtctttatgtatgtatttacatgcaaatataatctcttctgtacaatcataacagacatgttagatagccatgtaaataagaaatttcccatcctaaggaaagtctatttgtcattccaaa

SEQ ID NO: 57108 - DNA, 1063 bp, Homo sapiens
ccttacttaggctctatcagttagagcctaagtaataatgccacctgcattatgtgtgaaaagcatatgctaggccagatgcagtggctcaagcctgtatacccagcactttgggaggctgaggcgggcagatcacctgaggttgggagtttgagaccagcctgaccaacaatggagaaaccccatctctactaaaaatacaaaattagccgggcgtggtggcacgtgcctttaatcccagttatttgggaggctgagacaggagaattgcttgaatccgggaggcagagattgcggtgagctgagatcgtgccattgcactccagcctgggcaataagagctaaactccatctcaaaaagaaaaagaaaagcatacgctgatttatcttgggggccacttgaaaatctctggctttgttttacacagttgcacttgaaaaattattggtaatacgagggtactctacattttgggaaattacaagttctttaattagcaatatggctgttagttgggctctgctattcagtaagttactgctcaaagtttagcatgtgtaccagggggaaattgttcagccttgtgttattgaactggctaatgatgtgggatcaatggctaatctgcacaggacactcctaagaggaatcctgccacatgcagtattgcaatcttttcatttctagtcaagaggaagtactaaagtgtaaaacatctctttacctttttagtcatgtttcaaacatgaatgcttgtgggttaagcacatacaagtactttattttacttttaagatcccattatttttttttcatcataaaaccagtcatttttcaaaaaaatcaaataaatgaagatttaccaagatagtgttgtggatttggtctctgagccttattacttattgttccctgattcacagagggatcgtcaaactactagaactctaggtttctttaaccttcagttggaaggaggttactgatataatagaggatgcacatttggaatttttgcttgttacccttcaaaggtacacccagttaaggacaattttcctt

SEQ ID NO: 57109 - DNA, 1025 bp, Homo sapiens
tgaaaactctttccagaaagttgtagtattaaggtgagagagcactcttaaaatatttggaaccaatttactgatgttaattcttatacctctacaatataccagggtatctttttacctaaccataacgtaaatataaattgttttcctaaacaaacagagatcctggtcttagggactttacattcttgcagaaggaaacagacaataagcaacataataaatacattatttatttaacatgttagaaagtgataaatagctgtgaaaaaaaagagagtaggggaagataaagggaggttggattagtgggggagcaaaggttatgattgttattagatagtcaatgtggacctcactgagtcaatgaaggagatgagagattagtcatggagatgtcctggggaaaagctttctaggcagagtcaatagccagttcaaaggtccagagactgcctcatgcctgggtgggcttgagaaacaggaaggccagtgcagctggagtgaagtgaatgaaatgggagtagtaggaatgctcacaaagagccagaaaatgtaggccattgtaagcatttaggctttactttgagtgaagcagggagctcttgcagggtttttagtggagcaatgatatgatctgtctgaggtttttaaaggatcacaatggctattttgttaaaaacaaccataggaaggtaagagaagtagggacatcaaacaggagattttggagtaatcctcttgagagatgatgatagactgaaccagggtgttaacagtggagatagagatggagtggagatggagatggttggaacctgagtatttttgaaagagaaccaataagatttcctgatatattaaatgtgagtgtgaggagaaaagaagagttaaaatgattgcactgattttgaactacgcaactaggagataagagtcaccatcaacttattaagcatattacttaaaaggtactttgacacagacttcttttaggcaccagagccactgtaacattttttggt

SEQ ID NO: 57110 - DNA, 1190 bp, Homo sapiens
gtgtctttttggtagaacaatttattttcctctgcgtgtatacccagtaatgggattgctggttcaaatagtaattcaacatttctttgataaatctctaatctgttcaccgcagtggctagagtaatttacattcccaccaacaatgtataagcattcccttttctctgcggcctcgccaacatcttattttttgacattttaacaaaagccattctgactggtgtgacatggtatctcattgtggttttgatttgcatttctctgatgattagtgatgatgagcatttcttcatatgtgtttaggctggttggatgcatagactgggaggcttaaacaacagaaatttgctttctcacagttctgaaggttagaagtccaagatcaagatgttggcagggttgatttcttttgaggcctctcttcttggtttccacatgggatggtcaccatctcattgtatcctcacatgattattcctctgtctatattatctgtgtcctaatctctctctgtctttgtttttttttaagagatggtgtctcaccatgttgcccagactggtgtgcagtggctagtcacaggtgtgattatagctcactgcaatcttgaactactgggctcaaacgatcctcatggcttagcctcctactgagtagcaaggactataggcatgtgccactgtgcccagctctaatctctttttataaggacaccagtcatattggattagagcccaccctaaggacccattttaacttaattgtctctttaaaggccttatctcccaatacagatactggaggtactgggagttaggatttcaacatattaattgggggggcacaattcaccccataacagtgttgttctcatagtaactgagtgcgcatttcttctcaatttctctgaaaacattctcttctgaacgtgaatcttgcttggcagctctgagctatacctccaatatcttataacacgtgacagtttcctatttttgtcagcatacccaacatcacccattttctcctaaactctcagatgatctaaaagatcctatttttttttacagctccaccctccacttctatcagcccacttggttggcaaggaattttctctggcatgcatgatagcttgttagaagttctaatttaccttacataccctgttctagtatggtcttgtt

SEQ ID NO: 57111 - DNA, 1053 bp, Homo sapiens
gtggctggtttctgttgcctgttttgatactcttctcctggtaagttttagcttcaaatggtattgtccacaccacagcccttgatctcaggtaattctccacaccactgcctttttttttttttttttttttttttccaatgcagttgcgtggtgtgaaggcgataactgcagacactcaggtgtaaacaacccagggaatcaatgggttggggggatggtaaaacaggagttcgtagacaggactgtgtacaatagcttctgaagttttggagggtattggtgtagctgttatttctgagaccggagaaaatgacggtagagtgacagtttctctaatcatcagttttcaaagagtatgtttttcgttggaaccacaaatatagtacacttaataaggggaaacgaaaccttgaatttttccttcccagactctgaaaagtaaagtaaactttaaggaacattttaagggtgacaaaaggtgaagattgcaaatcaaacttagagtgtccctgctcaagaaaatctgtgcactgcagctacaatagaggaccacttgggtttagaaatgacatgttattaataattctagtcactgtggctaattagaacaatctgttgaaggttataaattatagaagctttttaaaacatttatctaagaacctgtgtagaattctaaaaggactgaattatttgaagttattagtttctgtgtatgtaaacttaaactatttttaaagcctttgattatttttctaaaaatgtttttgcatgcttatagcctgatgccgtaaatgttttatgagtttaatgtacagcacctctaggtgctatttaaaattgttttttctggtccttttcttttgggttataagggttcttcgtaaccaagaagattacctatggttacgctgaatgcactctcccagggtgcataggcgctgctgaactgcggttataactcttgtttgcccctgggtggttgccagcagggagtaaggcattgtgggaagtactttctttaccttccacaacaggtgtctttgtcag

SEQ ID NO: 57112 - DNA, 1042 bp, Homo sapiens
gtggttagaacactgccctttaacaaaagccatttaatcagactaacacatggctatactatattggcactggatagatattcttcactgacagaaaccaaaatagcagcactgtgccagcaaaggaagggagctctttcttggagctacagtttctctttctataaatgggagacgagggtaagcattctgtaattacttcctccttatcggattggcacagatttcatcaagcatgccaaattaaaaaacaaaattcagagcaattccatatgtcagagatggagaaaacaataaaatcaatactgttatttctaaatctttactagatatacatttcaaatattgattagaataaacataacaattaagattcatccatattttttaaaaatgttatctgaatattttttattctcattgttacatagcaagtgcacattttggcactatatcaatttcagttcagttcaagcatccaaccaatcatttggttgatcagttctaatgagttaaggttcttatagttgcaagtaataaaatcttgtgctatcttaaataagaaagggattttatcacgtggacagcaaagtgtgttcctttaaatgcaagggcagttcatctaggcaacagagctggtactggactgatgctggcaaccattctccctatctcttgccatctaattaaaacttctctcttgacatctactttatttctctgtctccaacttcttggcttctttatttctatggcagaatattgctgctacacagcatccagatttatagttctaccatctgaatcacaactccatatttctttggtgagaatctgaccgagtaatgttaggtgagttttgtgatagtatagagcagagcccctgagcacacactcaaactaaactgcctgggtccaatcctacctcacttgcaattagctctatgactttgggcagattacttaatctcaaacctcatttttctcatctgtaaaattggagtctgcaagagaaagtagtccggactgaaatcggccagaa

SEQ ID NO: 57113 - DNA, 1024 bp, Homo sapiens
ggataagctggaactgtctataagtggctaggatgtatcatgccttatcacaagaaatagcagaaaaaaaatatatagtctttgatttcattaaattcctttgtttgtttgtttgtttgtttatttttggacacagggtctctctctgtcacccaggctggagtgcagtggtggtgctaacatatctcactgcagccttgaactcttggctgaagcaatcctcctgcctcagccttctgagtagctgggactaccagtgcatgccaccatgcccagctaactttttcatttttttgtagaaatggggcctcactttgttgctcaggctgttcttgaactcctggcctcatgtgatcctctcaccttggcctcctaaagtgctgggattgcaggccagatgagccactgcacccagccaatttcacaaagtttcagtattctcagaaaagaacatactcatatctagaaatgtcttatgacttaaaaagcaaagtataaccatgtgcatattaatagggcacaaagtgaatctggtagagtgccagctgtgtctaatctgataagtttatttcatatggaaaatgtgtgtcaatcttagatgaggctaatttgttgaaaataactgaattctggtctcttttagattgtcagaaagggattcatttaacagtaaaatttaatccagatatatgtagtcatatgtttttaaactttttaaaccctgaaaattattgaaatatgtgccattttaatagtatcagcttctgattgcttttattccatcatcatgtgatatactcctcattaagcagcaccagtaaccagagtttaattattgtgtagcactgtgtgaaagcttttgtctctttatcatatatggcacagacagtactcttggttgtaagtagggatatccagcatagtttactgtctacatgcttatttctttagctttttttttttttgagatgaagtctcactctgtcgcccaggttagagtgcaatggcacaatctcagctcact

SEQ ID NO: 57114 - DNA, 1042 bp, Homo sapiens
cacaaggcctaaaatatatactgtctggacctttacaggaaaagtttgccaacctctactctggaatctctatttttctcctaactttgagttgagcatgttcccttagaatgccagaaatttaactagcaaacacacctgaattttttttcataaatggtgtccttgtctaacatggttttcctcaaatccctgcaggtaccaaccaagaagctgaagaaatatgagaaagaatatcagacaatgcgagagagtcagctgcaacaggaagacccaatggatagatacaaggtatgagaaatatgttgcacctatcaaagtaccttcttttttgttttaaatgagactgagtcttgccgtgttgcccaggctggtcttgaacacctggcctcaagcaatcctcccactccagtctcccaagtagctgggattacaggcacgagccaccattcccagcaaagtacctttttttttttttttttttttttcttaaagcagcagttgtggcaagttcaattccctctgttcttccttgattgatttagatgctctctgatcatgctaactgtccaggtatgttttcatttcaggagactcccaaatagccaaccataatatttcttttctttcagtttgtatatttgtaggtaactccagctgttgcatttatactgggaatcttcataagaagctgagagaaagagaggggaaaaagaaagtggctttctactttcaaaaatgaaacaaaaaggaaaaatggcaaagtactgttttagctgtgcatgtcatatccacaaagacttttagcaggtgaactgttccaagactgacacaaggatgtttcaaacttgcctctgtctgtagaaaatgttaaaaataccaactcacttggaaggaaaaataaaaatcacaaaggtatattgagcacagtagtggtgtttgttgcaacatttatttccacaaatgaatttatgaacaacagtgatatttgagttaaagtatgaagtttcagaatcaaaataatttcattttaatacgttcg

SEQ ID NO: 57115 - DNA, 1036 bp, Homo sapiens
aaacttcagaagtcttccactttctctttgagcttggataatccagagagttcattgttataggatggtgaagatgcaaaactaaatccttttggcttctcaagcaatatagctaataaggagtgggcgatttctaacaatgctggtctgctagagtcccttatacttaacccttgggggaagaatatgctttaggaacactaagaatttctagtatgtttactggtgatcttcagagttttcaagaaactttcattaatttttagaaagttttcttttctgtttaagtattactgagaaaattacctgacactaatatgtttctatatcatctagaatgcatctgctttttgaaaatttgatttgtgtactagagtagagcaaggatctgcagactgtggtttataggccaaatctggctcactgccagtttttgtaaaccaagttttattggaacacaaccacacctgtttatttatttatagtgtatggctggttttgtatgacatttgtagagttgagaaatttcaacatagaccatgcgacctgcaaagcctaatatagttactttctggcaatttacactagaagtttgctgacccctgtgcaagagtataacctaagatagttttttaagcgctgaaagaaatgcagtctgtttggccagctgtcatttatcactgacaagattttgtttttagtttgacatttaaaaatttgaaattttccactacaaagataaaattggatgtgatgagtaaaggagggaagcacaaaaccttcaaatatccatattttctttctcagatcttcattatggacaacatagatatttaaacattttatctgtaggcatttgaaaacttgaatatgatagctgtcaactcttttaaaagaggtatccaaaagaaaatatgtgagagttgagtgtgttgttgctaataaatttgcactgagtcttttaggaaaacattttctcctgacccttaaaagtctttaaaagcatgtgccaagaattcatcatagcagcagacaa

SEQ ID NO: 57116 - DNA, 1027 bp, Homo sapiens
gaacataccaagttcatagtgtttagttaaggaaaggccttgcttcataagaattagtgacttggttttttttttttctttctttttgtttgtttgtttgtttcgtttttttgtttgtttttttatcatgtaactttgtttcagatttttcaaggttgggagcagaaatcctcagtaatttattttacccagaatgttttaatctgaaattttttaaaaaacaaaaaaactagatatcttatgactgttgctctcacacaaaaataggtgttcagaaaagtaaatatattcttactcaaagaataaaaatgtcagctgttagcaaagtcatgaacccatgtgtcatgattcttgatttagagctcttaaatatactcaatatgaaccctgtcttagaaaaacaatttgaagaaatgtctggtggttttcccctgtttcattcctactgtgtcttgtggtttctcttgaggtcaagggtgagactaccgtgcatgtttcaaataaagaattgtttgtgtctgtgttctagatctatgtaaaaacctcacaggattgggggggatatgctcagaaagtttgttctttgtggcacattttttataatgaagttccatcttgagagtttaagggaccagtttcaccgggtagagaaccgcatctgcattgctagctaaactcactgttgtttcccagacagcaatcctgccttcctgtgccacttgcgccttctcctttttacacctttgaaagttcactttgttgcttgtttttcctcaccagttctgttcgtttctgtatgtccagacactaatgcccacctctggctattgttcttctgcagagggagaaccgaagattacaggaggccagcatgaggttggaacaagagaatgatgaccttgcccatgaactagtaacaagcaaaattgctctacggaatgacttggatcaggtaatccttagaaatgagactgtgatgacttcctcagggcaaagaccgatttgccctcatcaccgcccccacaaa

SEQ ID NO: 57117 - DNA, 1047 bp, Homo sapiens
aattagtggaaatattttttcaattatatttaacatgcctataaaaatagtccttgcaggaaattatttgataagagcaaaactatttttattttataaactattttggaggcctctgatcctttcaaaccaaccaaactactattagatatgtacaataacatttgttgatattaatcattggcctcattgttgaacatattatttgcaaagaatcttaaactctgtagtgccagaatgattctcatctgtgccatattttgcaattaaaagtaacacacccttagaagaatcaaataagagccatctacatcccaggaggatgcaccaagttgctcacagtggatcttttcctctaaaatgatcttttatgttctaaaaagtgaaatcccctttatctgtgtttatattctctacagcccataaaactgatgtgattgttatgttatactcatcagataatacttttcttacataaatctttcattgttgttctgacatctttcattacaaaatttattttcttaacaaaaaggaacataacccagcattccaagtgtctgtgttggctttaacattctctacatggtggtctagataagctaatttttttttttttttttttgtaaaatgtaatagctagaaaatgttatcttggcgcttgtttttgtaaatcatttagtataggctgttagctttactggtactttacgctttgattccaagaagccttgtgcagttgccttatcaaatggccagctaaattaaagatgctcttttgtgttgtgaatttcatagttctgtacagagcttgtttcaatttacaaaaataagtacattccacagaatgcctaaagtgtgtaattttctttaaataatagtaggtgagggagaaacataatggctctaggtcaatcccttatctaaagaccttgttcaacttcatagtccctttccttttaaagaggagaagagaaaaatcccccctggccaggcatggtggctcacatctgtaatcccagcactttgggaggctgaggtgggtgg

SEQ ID NO: 57118 - DNA, 1061 bp, Homo sapiens
agtccatcttttgagttttcttttagctctttcaaaagattacgagggcaatacatattttttttttttttattctccagccccatatcatacttgggtatgcctgttggtaccataagcctaaactctccttcactgcaatgcctttgagtcagtagcaatagtaaagactagaaacaaagaaaattcagaatttggtatgtgatatgattgttcatacaatatgttataatagcaatattccaaacaatatgtccttcactgtctattgttggaaaactcatgcatcccagcatgaagtaactcctagttttaattttagttattttgagatatatttgagaattgcatctcttctcttgaatttcacttagaagagattaaccagccaaatatccaggaaagtttcaaaacattctagtgtttttcatcctttgctaggatgcactctgtacaaaacattcctctgaaaatctaatatttgcagtatctaagaattgatcatttctattttcattaaattctgtggaaaaaattaaatgaatgaaattcaacttcataattcagttcatcagcttttgtatcttgagaatctaaacacgtctttaaatctgaaagaaaccaagctggattttgcagtgcatatgtttgctagcttcccacatcctgaaccatgtcaaaatttggttttatttagttacatataatttaatgcaaagaaattctgttacttaatgttctgtttatttatgagtgcctatcaggaacactaataggaatgccattcaaccagtgtcttctgcccctctcccagctgttaaattagtacttcttcattggctttctgaaatgtcctgagtaaagtagaaaagcaacctttgtatggatgtggggatatttaatagtatgtatcttgtttcatttttttcctatgatgtattaatatttatttttctccaacccctgctccattttcttaaaatattttccagttaataactagttgctttatttcctagctgaagtgagaaaaccaacggaaaacaatacagatttgggca

SEQ ID NO: 57119 - DNA, 1045 bp, Homo sapiens
tctggtgtcatgaaagcacaagaataaggctggagatggtcccagatccaagatgtcccaaaagccttttgtatcagtttctctatttttggtattttgcataatgcatggatccttagttcaaatgagggacaaagtttctcagtcagccccacttcctttctttctaactcctacctttcccttgcagaggaggtagtagagattctggaattgtctatttttatgaattccattattttgtccatggcatctctaatgaaaacaggttctagaataaaggagttgattagtctgaacagtactaattaactacaaaataaacgttagtgatcagcctcttcctctataaacaatgaccaattagacgtttccgtaattccatgtattatgtatagtacactctataaatgtaaatgtaatgcttgtctaaaaagtgcaatttattgtacattgtcccaacaaatgtttacttttataatcgttatgaacttgaattggattagtatcttgtttttatgtgtgaatgaagccttgtgaaataaacaaatgcaactgagaaggtaacaaggtgactgtttttgtgagccagtgatgttttcaatgctttgtgttgcccctttggccccattaagcagtaataaacatttgttctgaagtccatgtatgtcttttttatttttttagttgactttattctgactcatttgaacccaatgtttatgtaacacttcttacacctgaccccagactccagtcaacgtagaaaacacacagtatataccctgcaaaatgataccctgtgcagcaccaccacaaagtgcttcattttcctctctactgaggttccttgattccacgtaacagaaacccttgcaagctagcttaataatagtaattttaagaggcaattaattaaaaggaaataggatatctgtatcataggtcccaaaggccaaacacttgggcctgaactggcactaggacaaggggctggaatgccatcaggactctgaaagcaactgttcccaaaattgtgcttctg

SEQ ID NO: 57120 - DNA, 1064 bp, Homo sapiens
gaaagtaaccaggctgctcctccccatttttcgccttcttctcgcggaggctgagagactaaccttacacaacatggcggcctggtgtgtctggtgtcctagagcggacgaaagcaggtgactctctagtcaacttccgacttggactccgaagatcggtacgttatttccggggctgggttaacgcagcggttccgagctgcgactgcgcagcgtggcccagcgcggtcaaattataatacataaaagttgtcagggcggagagcaagacattactcttctcggattgccggttcgctcgcgagacttgagcgttgctaggagattcggcaggcgggcggagccagactcggcggggcggggaggggtggggctaggctcggcgaggcgaggaagggtgggtggagccaggcttggcgggctgtgcgtgctcgcggtgggcggtggcggcggctgcctcgcgaaggttcgagatccgtcgcgtgcgggaggcgggccgcgatcttgcgcagggtcggtgtgggcgcaggctgcagcgccgcgactcgtgcgggtaggcgtctgcgctcggtttgagggctcggcgcggggtttcctgttcctccttctgcgcggctgcagctcgggacttcggcctgacccagcccccatggcttcagaagaggtaagtggtccggccccatattccttatgccccccggctggagctgcagcgccagcctcccgccctaccgccgtttccgtgggctgagccgccctgcggccacccggtcccgcgccagtcagtgcgccgccttcccgggggacacctcactcgccccttgctgcgccgtcggctccccagcgcttccactcgacctcgcaccccactcgcctgctgggctcgagcgggggtgtgcggcgattatccgtgcaggcggtgcggggagtgggtctgggagagcggccctttgcgcgtgttcctcaggccctttctgccctggtttcccagccagtggacaggaagcttcattcaagcaaagctgggtgcaaacatgagtgtcgttcttggtagagggcggttg

SEQ ID NO: 57121 - DNA, 1050 bp, Homo sapiens
tcactgcatgttctctcatctcttaaatattttaaaagtgtctaacatctaatgacactcggattagatgttacaaggaaatctatgaatcctttgtcaaaaaaaagttctttgttttactttttaggtcgcagacgtttcttgtaaatattttaaaacataaactggaaaatttaggtttgaagacctatttattgtttgttcaagattgttcaaagttttccttttgaaaaaaaggaagcttgagttaattacagttaataagccagatggaagaattgaagttgcaactcaatcctagaaaatttagatgaacttcttaattcttagtgcttatttcagtaagttgaaatgagtgatacgcacaatatcaagccatttccttatttatcatagctaacttattttttgtcttaacacagctacagaaagatctagaagaggtaaaggtgttgctggaaaaggctactaggaaaagagtacgtgatgcccttacagctgaaaaatccaagattgagacagaaatcaagaacaagatgcaacagaaatcacagaagaaagcagaacttcttgataatgaaaaaccagctgctgtggttgctcccattacaacgggctatacggtgaaaatcagtaattatggtatgacttgcttccctatagccagttctgcctccgagcaacctattcctcatagtggtctaacaaattcatccccaatgagttttgagtctgtgtttttggtggtttggagcaagacccatcagtttttatttaataaaacttttttaagatataaataggaaaggatgcgttctagaagctgttaacaagagtaaggtgattcactacaaaatgtaacaacaaggaaggaacttattctgaaattgttcagtataagacacagctttggtggtggtggtggtggtggtggtttttaatcatgttttatgtttcactctgccaaccaccacaattaactgaggagaggaatccagttaaattcaggaaatatttttgagcacctaatgtgtatcactattgtgcttt

SEQ ID NO: 57122 - DNA, 3151 bp, Homo sapiens
tactgccttatacgacttggtttcttgcctatccccgacccctcttattatattactgtctttttcagtcactaaaatccagccactcctcctgctcctcaaacacaccaagatgatcccatcttggagccattctgcatgctctgccaactgccttctcctgaccttaggcttcggctcagatttgcctcagagaggccttcctaatgaagttcctgcccccaccccccattaacacccgctttgtcttgatagcactttccaggatatcagggtattcaagttttacttatttatggtcttttcacaccatgaatgttcagattttggcctattcatacaagtattactggcacccaaaataagtctatacatactagggacttgatcaattgaatagataattgttttataaatattcatgcttatctccatgtcttctaagctgtatttgttttcctgcttttcttccaggtcaagactgatacagttcttatattgtgtagaaagaaagtggaaaacacaaggtgggattacctgacccaggttgaaaaggagtgcaaagaaaaagagtgagtctacttccatttttttaaagaattttagtgtattgtttgagatcatggatttttaatagtttgtctttatggataatgtatttctgctttcaactgtcaaactacctgaagagggcacgtccagcaagttgctttttaaggtctttgtagttaagggttggctctttagtgtggttcttaaccctaggcgcagttgtgcttctatacaaataactgtgcccattcccagatactctgtttcggtagtttgagaggggcttaggtacccctgtatgttttaaatttctcagatgcttctgatgcgtagttttcattgtcactggtttatagtgaaaaagataaaatatttttatccttcttaataatgaccttttaaaaatgtgtattcaatgatacttgcgttctaggtcagttcatcttctaaaggtactgactaaattaattcaagacccaggcccagatctgtgtatctcaggcttaagaggagagtttttctaattaaaaaatacatgagcttcagggtacatccatgtgtaatgtttatgattttccctcaagtgttttttttcaaattatgaggaaacatgcttttaaaaaatgaaaacaagttagaaaatcaaattcttattttacctgtcaaaaatcacaggaggccaggtggggtggctcacgcctgtaatcctagcactttgggaggctgaggcgggcggatcacctgaggtcaggagtttgagaccagcctggccaacatggtgaaactctgtctctactaaaaatacaaaaattagccgggcatggtggcatgtgcctgtaatcccagctactcgggaggctgaggcagacagaattgtttgaacctgggaggcggaggttgcagtgaaccgagatgcgccactgcactccagcctgggcaacagagcaggactgtctcaaaaaaaaaaaaaaaaaaaaaatcatgggaaatccctgtgcctaaaaatagcccctaactattttgatgacctctttcgtgcaccaagtgtgtgcatgcttgatacgtgtgtgttgttttcattaagatgaatttgtgcgtgccgttttgattgtaaatatctttgggtactctgtcttccttcttatccctctacttcctgccagtgttaacaacctgaatgatagtatcttccggtgctttcgtttccccattgttgtatatgttttctttttaaaggaagccctcctatgacactgaaacagatcctagtgagggattgatgaatgttctaaagaaaatttatgaagatggagacgatgatatgaagcgaaccattaataaagcctgggtggaatcaagagagaagcaagccaaaggagacacggaattttgagactttaaagtcgttttgggaactgtgatgtgatgtggaaatactgatgtttccagtaagggaatattggtgagctgcatatataaatttgacagatagctatttacatagccttctaagtaaaggcaatgaattctccatttcctactggaggatttatttaaataaaatatgcttattaaacactcctgcaaagatggttttattagtaccctggtcattttgttcaaggaagggttatattgcattctcacgtgaaatataaaaagcaagtcttgcccaataaaaacgctacattgtgtgtattttttgttcagctaagaattggaaaagtatttgcttgccttttaagttactgacatcagcttccaccagtgtaaaaattgagtaaaacctgaagttttgcataaaatgcaaatcggtgcctgtgcttgaaggttgctgtagagcatctgaccccttattaccaccttaagcaatgtatatgccatgcattaccatgcactaattcaatcacaggtgtttctatctagatttaaatatatttgtcaatgaatgtggaatagaaaatctaaacatgacaataatagacatatctttgtatggtaccagttagttttgccgtggatcagatggtttataaaagtaataaccataaagcaaaaaataatttgaaagcccgtctattcctatgctcaataaagttaagtttttcttcattagaacagttttatgatttatttgtctaggagtatgtcagaaaaatcaggcttttagtaggaattactcctattccccctgaagtcaggaccagtgcctgtgatctccattactttattttcctggaggtattagccaacacagttagatcagagaaagcaattgaagccaggcatgaaggctggcgcccgtaatcccagctactaaggctggaggatcacttcagcccaggagtttaaggctgcagtgagctatgatgatgccactgtactgcagcttgggtaacagattgagaacctgtctcattaaaaaaaaaaaaaaaaaaaaagccgttagacacacaggaaaaatccagaagggtaaactaaactaaagctacaattaatatgggaatttggaagaagtggtaggatttaaaatacagaaacagtttatgtataggatagctataagtaaatactgaaacacattatgcctctgtaattg

SEQ ID NO: 57123 - DNA, 1041 bp, Homo sapiens
ttcaggttttactcaatttttacactggtggaagctgatgtcagtaacttaaaaggcaagcaaatacttttccaattcttagctgaacaaaaaatacacacaatgtagcgtttttattgggcaagacttgctttttatatttcacgtgagaatgcaatataacccttccttgaacaaaatgaccagggtactaataaaaccatctttgcaggagtgtttaataagcatattttatttaaataaatcctccagtaggaaatggagaattcattgcctttacttagaaggctatgtaaatagctatctgtcaaatttatatatgcagctcaccaatattcccttactggaaacatcagtatttccacatcacatcacagttcccaaaacgactttaaagtctcaaaattccgtgtctcctttggcttgcttctctcttgattccacccaggctttattaatggttcgcttcatatcatcgtctccatcttcataaattttctttagaacattcatcaatccctcactaggatctgtttcagtgtcataggagggcttcctttaaaaagaaaacatatacaacaatggggaaacgaaagcaccggaagatactatcattcaggttgttaacactggcaggaagtagagggataagaaggaagacagagtacccaaagatatttacaatcaaaacggcacgcacaaattcatcttaatgaaaacaacacacacgtatcaagcatgcacacacttggtgcacgaaagaggtcatcaaaatagttaggggctatttttaggcacagggatttcccatgattttttttttttttttttttttgagacagtcctgctctgttgcccaggctggagtgcagtggcgcatctcggttcactgcaacctccgcctcccaggttcaaacaattctgtctgcctcagcctcccgagtagctgggattacaggcacatgccaccatgcccggctaatttttgtatttttagtagagacagagtttcaccatgttggccaggctggtctcaaactc

SEQ ID NO: 57124 - DNA, 1031 bp, Homo sapiens
atgaattatggtactcatgcaatgaacattacctgccagtggccaggcgctgtggctcacacctgtaatcctagcactttgggaggcagagatgggcggattgccagagctcaggagtttgagaccagcctgggcaacgtggtgaaaccccgtttctactaataatacaaaaaattagctgagtgtggtagtgcacacctgtaatctcagctactcgggaggctgaggcaggagaatcacttgaacccaggaggcggaggttgcagtgagctgagattgtgacattgcacaatctaacacccacagcctgggtgacagagcgagactctgtctcaaaaaaaaaaaaaaaagaaaagaaaattacctgcaagtgagaaggagcaaaatacatgtgcaacaatgtaatgtgatctgtgtaataatgtgatttcccttaggatgtggctgatgaagaaattgctgccctcccccgggatagctgtcctgttagaatcagaaatcggtgtgttatgacgtcccgtccgcgtggtgtgaagcggcgctggaggcttagtcgtatagtcttccgtcacttagctgaccatgggcaactttctgggatccagcgagcgacatggtaaatgagctccagaacctattgagcttgcagggaagccaagcttgcagttccagcaagcaaagattttttttaatagaccaaaccctaatctctacaggggcccagtacagttgtttggcctacctgatgctatctctaaactacttttaaaatgaagacatttgggtgtttcatgtcagtgaattatcttttctcttggacttaacaaacatactgttcccatacatagtacaaagagtagcataataaatattttctgtgaatgttttttataccctccttttaagtttaatcttttagtaacatataggggtttttgtattaagagcattatttcataaaatgctatcttatacataatccaactaattgacatgtagctcatgtatggcagtttgtaatcctggactag

SEQ ID NO: 57125 - DNA, 1003 bp, Homo sapiens
gaaacagtggatacctgtggggcaagggagtcattgggcaggtgaggaatgaggtggggggagacttttcactgtgtgtcttcttatacctttttgatttttgaaccatgtgactattggcctaagtacaggtcaaacagaataataaaaatttctgaaaatctgtctttcaccttccaatacatatgttattgcattatattattatgattttgacttaatatacatccataaaagttatttattctgaataaattaggaagtctattatcttaaactattaaactgatctaaaacaactcttaaaagaatactaaatgataaatagtggcagaaagagaattgcagggttgaggaacactcagaatgttgtcctggctatccttcacttgtcccttgtctctgtctttcagatggttccttcatcagcttcaggccaagttcgaagtcactatgtagactggagaatgtggcgcgatgtgaagagacgaaaaatggcctatgaatacgcagatgagaggctacgtattaattcactcaggaagaataccattttgccaaaaattcttcaggttagctaattaagatgagtccctttgtaccacaagatcattaactcaacatcagatcacttttgatactgtttgttgtgacttggtatcaatataatttctggagaataagatccacatcaatataaacaaatagtcttgaaactgattttgttgagtttcaaattaaagactattcactcctaactagccttacaactgtttcattatgccagccttagaaagtactggtaaattgggtggttattttcacctaaggtctctccctgacttcatcccaatttttttttttttgagatggagtctcgctctgttccccaggctggagtgcaatggctcagtctcggctcaccacaacctccgcctcccaggttaaagcaattctcctgcctcagtctcctgagtaactgggattacaggcacatgccacc

SEQ ID NO: 57126 - DNA, 1055 bp, Homo sapiens
tgggcttggttcaggggaggtccgagctgcagatgtcaatttggttttcgtaagcatatgactaactggtattggaagatgtgagattgactccgatttgtaagggagtaagcagataggagacgagttccgaggattgagctctcagagacttgtaacgttaagagatgagaaccgtgcaagggagactgaaaggagttgtcagctagggagatggaaaactaggagagtgggatggccgggaagcaaaggatgacagaatttcaaagtgtgaggagtgggcaactctgctcaaagttgataaatcaattaaaaagaagtgctgagaattgaagagtttagcagtgtgaaggttgttgggaccttaatcacagctgttctgatggtgttatggggacgaaagcgttcaagagaataggaggaaataaagtggagtatagataagcctttaaaggagctttgctgtaaaggagagcaaaaaaaatgggtcaataacgggggcggggaggggggttgttttcttttaacatggcagggaaaacagcatgtttgtgtatgaaagggaaagatcctgtagtaaaaattgatgatgtagaagagggaagaattgctagagctgtacctttatgtaggcaagaggcaatggaggctggttcgagtgcagtggtgtttacaactaattgatcacaaccagttacagatttatttgttccttctccactcccactttttcacttgactagccctaaaaaaaccaaaaacatttaaaaaaaaaaaaaaaaaagagagagaggctatggggtcttgtgcatgaagtttggtcttaggaacctggacagttaatctgtagcagtgttgttcatagaaatataatgtgaaccacatgtgtaatttaaaatttttctagtagccacatttaaaaaataagaaatagatgaaattaagtttaatataatattttatttaaccaggtatatccaaaatactgtggttttaacatagaatcaatataacaatgacttatgaaatagttacattcttttttttcatactag

SEQ ID NO: 57127 - DNA, 1053 bp, Homo sapiens
gtgaaaggtgataagacttttgccaaccctctgttttgagattttggcctcctgaagtatctaaatcaaaagaggactgtcaaaagaaaacaaatgagcattctagctgaagtgaagaggagaaaattgatagtgatggacaacacaaggctcccctaagaaatgcgatcctggaggtcaggagggccgagagagggagaagcacctgggagtgaatggaaataaagttagcaggaaggcaggggagaggctaaggtggctgccctgattcactaggggctggttaactcactttctacaccaattcagtgaaaagctgatcaaactctaattagagcaaaataattatttcacaaatggatgttttcacctttcacacaatgtgaatagtataataataaatatagtgctttacagttggcaaggcaattttaaggcacccactgtgtgaaatatacttacacaacatgcttcacacacattatctcatttactctgcccagcgatgcattaattcattcatccattcagcaagtacttactgccagtccactttctaccaggccctgtgccagatactgagagtaaaatgatgtaacgcagtgaataaaacacctagccctctgagaaagatggcaatatctttgtttacagaagaataaatggaaaaagcacttaagtgaatgttccccaaaccccacaccatgttagtggtggagacaggtttttttgtttgttttttattttagagacaaagtctcaccctgtcacctggactggagtgcagtggtgcagtcactgtaacctcaaactcccgggctcaagcaatcctcctgcctcagcctcctgagtagctggaactacaggcatgtgctaccacacttggctaatttttttaatttttatttttgtagagataggatcttgctatgttgcccaggctggcaaaattcttggctacaagttttctggcatataagaagaaaaattaggaaatttccttgaccttgaggaggtaaatatgaggaagttgacttgctaacagactggaga

SEQ ID NO: 57128 - DNA, 1003 bp, Homo sapiens
ccatacttctagtgaaaaaggaaggtaagtttcatagagatatacagatttgcatgagatcttggagacataaataaacttactgttccattaactctgtggtccctaaccctgtaactattccaactttggtactgtcatctacaaatatttttttctgtgattagtctatattttgctttttcttctgttcctctagtgggcaagtctaaatgtattttgcttttacttacgaaagagcccaatatctgtggcaaataattcctacaaataatgcctccctactattttctctagttattttgaggaaaacttagataaatttgttccaccagaggaatctataattaatcaatgtgtagatgattggctggtagcctcagaaactaaagagcaacacaaaatgtattaaagcatctattgtcagctgaagactgtaaagtgttacagtctaagagtcaaccgattttgaatatcaaacagctttctatagagaaacaattgagacaattttggggattagtaggacattgaagacaatgaatcccaacttctgctgagtgtgcaaaaccttcgatgagcaattgcatgataactctctctggcctttaaaatctgaggaggcttttgtacaactgaaattagctataacttctcccctagtcttgaggattctcaattttgaaaacctttccacttattttgttatgaaaataaaggtgctgctagtgaaatattagcttaaaagttgggattgaactatagggcaatagtttatttatcagttctaggagccactgcactgagaatgcctgggtgtctgcaagaggaagaggtagccagcattcttattggaaaagcccaaagtcttaccttgagtcacatgacttatttgcatgtcccacatgctgtgacagcaatcttacaagtccataaagcctagcatttgtcagtatgccattgaactaactgtgagcaagcattattaggtagtcctaacata

SEQ ID NO: 57129 - DNA, 1034 bp, Homo sapiens
gggatgtgcactgactcttgtgggtaatcctgcaaccagcccattttgcttgtttgaggacctggagatgatccaccacctaaggtggcactgtgaccagaggaaattgattaccactcccctacaactacggaactgagcacgttagagatccatccagagcgattgctagaagcaatccactaaaggtaagctgggagaagttgcaatggtgtacctagaagaagaatgagtcctccattgatttccagcagcagtttttggaggctttctcagaatttactagcatggacccaggaggagataaaatcactccctaatcttggcaacctttacctctgctctcttgctgactaaccaagcccaaattaagcaaaaggtgttaggatagcaaggacagactattattcaaatcctagcagcagccactactcagtttagggttaagacaaagaagaaaagcagagattaaagactgctgtgttggctactcagtgagaattattactaaggaggataatccctataccgggcaaagtataaatatagcaaaggaacaggagaaaactgaatgttattattgcaaaataccaggacattggaaggactatagaaagagactcgggaggataccaaaattgcagagacaggagagtcaggaaagcctagaaagatgaaaccctcaactaggaaatagttggcaaatggctcaaaattgacagattgggggtatctcagaggtgggaagtggtaaaccatctatgtcaaggacttttactgaaccccatccatccttggcttttctggtagatattggtgctacttattctgcagtttcctcagaaaattcctgctttccatctggcaactgattagtacaagttgttggtactttggatcagcctccatttattcctttttctcttggattcccaaacagacaggtgctcttactgaggtaccttcattctgactttctcctgtatctcctataaacctattggtgagagacctactctgcaaattaaaggcta

SEQ ID NO: 57130 - DNA, 1101 bp, Homo sapiens
cgataaagacacacctgagactgggaagaaaaagaggtttaattggacttacagttccacatggctggggaggcctcagaatcacggcgggaggcaaaaggcacttcttacattgaggcagcaagagaaaaatgagaaaagcaaaagcagaaaccgctgataaacccatcagatctcatgagacttattcactaccatgagaataggatggaaaagaccggcccccataattcaattacctccccctgggtcccacccacaacatgtgggaattctgggaaatacaattcaagttgatatttgggtggagacaaagccaaaacatatcagccatcatcgcaggttcaatgaaaagctagtttaggaaaatgctcaaattaagatttctgaaatatcccctttcctaccacatgtccagtgcattctctcaccggagagtaggacttaggtggcaggggctgaaccagcatcacctctactagtcttcttatatgcaggcaacaagactgaagaagggaaagtgaattgagattgcaggcaagagataaggttgtttgtcaagaaaaaccccgatattgatcatatctatggagccacaagtggaagccaaaagtggtcttcccagtgtgttaatctctgggaggtgttcttatcttccagcatctactcccttctagttatctaattgcattgtaacaaatctttatgacagaagtggaatgcctctttctccctccctttccccacctccccttggtatgtgatggtagacagtatagtgacttcgagtgtttatttaactgtgcatgctttttctccatcgtctaaacatccgccaggaaccttgacattagtttcacctctcctctggggctgagagatgggaaagaagcgtcaagaacttgaacagaaatccagctctcagtacattgcagtaagtaatcactttctttttttcctttcagagtaaaaaaacctgtttcaaactctcttcagggcaaccaatgaattaaatatcctactcattgcagacatgcttcatatttcaccatgatgggcagtcttaaagtctctacttaactattgatagccattgagatc

SEQ ID NO: 57131 - DNA, 1054 bp, Homo sapiens
tataaggcagtttctcaggcttgtagcacttgtatggagacttggaacctgattcttttttggaatgaccaaatctcttataagtattcatatcttatagctaatgtttgtgcactggctaatttcgaggggttaaattttgaaagaattaataaattacttttctgctaaattagctactattaacaggtagccattttttaaaatattcttaatatttagagactaaactttagtccaggggtgtccagtcttttggcttacctgggccacactggaagaagaattgtcttgggccacacataaaatacactaacactaacgatagctgatgaacttaaaaaaaaattgcagaaaaatcttaatgctttaagaaagtttacaaatttgtgttgggccacattcaaagccgtcctgggctgcatgtggcttgcacgttatgggttggacaagcttgctctagtcagtgtttacactttagaagtcctcacttccccttcccaaattccatttggtgagtcccaggagagactcccatgagctccactccatggttcccatgggaaaggcagccttctattcctagaaatggaatgtggtgctctgtgctgttgaattgcaaagctttgtggaacagttttagtaatatatctggaaaggcttctggcacttagaaattaaaaagcactccatgaatatagggcagcattagcatatgcatattaaaatctagtcactcctcagtttttttattttttattatagggaacaaagaagtataaagtataaaaattaccaaaaaaaaaaaaaaaaaaaaaaaggaaggtcaaatggctattctggaattttcttttttttctttttttaatttttgtttaattatactctaaattctggaatacatgtgcaggatgtgcaggttttgttacataggtatacacaggccatggttgtttgctacacccatcaacccatcatctacattaggtatttctctggaattttcaacagatgtaggggccaacaggtatgggggttatggtggcaagacagg

SEQ ID NO: 57132 - DNA, 1789 bp, Homo sapiens
ggttctcataggatcccactgacaaatctaagattttgttcagcatcattgacttcttatgttaagtagcctagttacctaatataaagacaaaagcattatggaagcacatatattagtcaagccttagctgagcagcaggggaaaggttgcacgtttaaatatttgctacttagtgagtgttgtagtgtccatctaatgtaattctttttgacagtgtctcataactatcctcctgttccgtgatctttcttagccatttgcttcctcttagttttagcaatatcacaacttacttttttatgacagtatactactttaattctaaaaatacaaagtatctggacgctagatgattggctagaaatggatgaagcagcaggaaagagcaagactttaggtcctgtaaccttgatcattataaacagtgtttattgatgaaagaagaaaacagattaaaatcctaaacaaggatacttaaaactttcataagaatgtggaaagattccaacatatattccaaaaatgtatttgtgctatgcattagccaatttatttttccatgtgttttatgtagtttaccttgaaggcttccaagttaactgtggagatagctcatctgaaagagttcatgcagctgttaagctgcaggtcaaaaaggattaatgtccaatccattcaaattctttggcattttcccagttgggaaacgttttttaaatttgcttttctattggtaaatatagtaaagagtcattaaattccttttatatcttaaatgattttattaaatggatccttttttccccccaattaggtgctagaattggtatgaagggttaactcaagtcaaattgtacttgatcctgctgaaatacatctgcagctgacaatgagagaagaaacagaaaatgtcatgtgatgtctctccccaaagtcatcatgggttttggatttgttttgaatatttttttctttttttcttttccctcctttatgacctttgggacattgggaatacccagccaactctccaccatcaatgtaactccatggacattgctgctcttggtggtgttatctaatttttgtgatagggaaacaaattcttttgaataaaaataaataacaaaacaataaaagtttattgagccacagttgagcttggaaagtttttgtcaaatgcagcaagagataactctttttaagaagtagcatatgtgaactataatgtaacagtgaataatttgtaaagttcgtatttcccaacctctttgggaattacacatatcaatgtaaacaaaatataaagtacatagatttctgccagtgaatttactgtttacggtagatagaaagattactttataaaattctttcttcattctctgaccagatttatatcatcagcaagtaccatgttgtccagtctctctgaatctggctaagatctaaaattttgatctattgagaccacatttaaacagaaagagaatgttagtctctgacagctagctctgtctttgcctttgaaatgttacaaaaacataccataagccctaaatgtataccaaaccaactagtccattgcttttagtaccatcctaggctgagtaatgtcttggagcaggagtcagcaaactttttctgtaaagggccggatatattttcggttttgcaggttatatggtcagtggcacaactattcagtttggccagtatagcaggaaagcagccacagacacatgtgaacaaatgtgcatggctgggaagtaggcagagggtcaga

SEQ ID NO: 57133 - DNA, 1068 bp, Homo sapiens
gtcttaggaattgaagtgaagaaagaaggatgaagaggaaattatctcttggattgctctccaggaaatccttctctatactttaaaagctcttgttcttttctaggagtccaatgtgctgattgctgctaacagtcagggtacaattaaggtaagctatttactatatctccattttaaactcaggcccatttttagactgaaacaggattatagaaatacaccattgtactgagccttagagatcatcccaaatcatgggtctgtgtctccttacaaatggcttgatttaagggaaaagaataggtagcttgcatctgtggagaagatgatagtgcttattgaggttgtatggatgctggatggattaatagatggtcagtttgaaaaacagataaagactagtgaacattcactgtgggctaagcacagtttagcttctgttatgccagtacaactctcccacagggctttcagtagatagagcccaaaatatagcaggagatgcaagatatagcagaagatgcttagacatcaccagatttaaacatatcttggtcatattttattctcttcctcatggttctctttcttctgtcccctaagaagtaggtttttcctcagttgtcaaaggggagaaaaagttattttagtgttcagttgaaaattgatagatgtgattcaaggaagcctagccataaaaaaaggaaagaaaattgattgatgcatatatagcacttgtacatgatacattggataaataaatcctgagataagcagtgaactttctaaacaaaacacccttttggtggagtacgtgtttctgagagtacctgttttttccacatattctctgctgatttggtagaaatattgaaagttttttaacataacgtgtgtgtttctcctgccacttagcattaattttgccatagcttccttagactcatcataagtggagaataatccatcagccaaggcagcaaatcctagcctaaacattctacagaggtgaaatgagcaaacttaacgcagaagaactgcactaatttacatggtagtctcctt

SEQ ID NO: 57134 - DNA, 1938 bp, Homo sapiens
agaaattgaatgtctaaaaggattaagcagaaccaaaattcagatccaggtttccatgccttgaatgtattgctttttctgttaacatggtattccccaaatagtactgaattctagaatcagctttaccagagtagtctggaggaaatttgcgaatagctctcttaaatatgcacggttctatgctcagaggagctcttctcagtattaatcagcaatccagtcatttttttcccctcatacttgtcattgtaagcacatttttctcaagctttactcagaagatcatccagagatattaactgttaacatgtgctgcaagttgaaagtgtttagagagaatatttgagtgcagtgtgacaaggataatcaagttgtttagggccagttggcgagaagactttggaaagcattgagaaaggaatgatgaatgtatgtgttgttttgtatctaaatccttcttcccttgtgtatgttcttcacagccttttctccctgaataaggatcactttgactttgtatgctaagtgtgccttcttaatggttcttttcctgttatctgaatcctgaagtatatttaaatgagaatttgatgcagttagttaattggaatataaaagactggttaacaaaagtcttcttaataatgaagcacaccagaaatggaagctgctggaaccagccatgtggacaaatgaaaaaatgccttttgtctacagattgcagcgatcctacataaatatatggaggtctctgtctggcttaggacagctggctaagtctgatcgttcccctccgtacagcctttaaaactgccactctaaatacttggtttccttgccattttattcagtatctgctggttatgagtactgtattattttttaaatgggcaaccaagtaaagttacctctgtatccgtctgaactggtttttgaggtatcttacgagttttgaaaataggtgttatttgcttatttaaggaacctacaaccaggaagtagaatgaatgtggaaatattattcttctcttgccgagcatggtggctcacacctgtaatcccagcactttgggaggttgaggcagatggatcactgaatgtcaggagttcaagaccagcctggcaccaacatagtgaaatcctgtctctactgaaaacacaaaaattagccaggtgtgttggcaggcgcctgtaatcccagctacttgagaggctgagacaggagaatcacatgaacctgggaggcgaaggttgcagtgagctgcgattgtgccattgcactctaggctaggtgacggtgcgagactccatctcaaaaaaaaaagaaaaaagaaatattattcttctaaggggccacattggcttaacgaattcagggttaccagtgaaggtcaatactttagatatgaaggagctaatcagagatagcttccgtgaagattttctcattaagaaagtgatttctccaaaatccagtttatgtaattttttaaggctgtaaccaaagttcagaaataaccatttgcagaggaaagctgctgctaagtattaaccttcttagtactgaattcaaaatcttggtttttcctgttgtgtgttttgctgttaagttgtggggagaggttgctcccacctacctcccctaacttctacaacttacagcagccacagctgggtttgtttgtttgtttgtttgtttgtttgtttgttttttgagactgagtctcactgtgtcacccaggttggagtgcagtggcataatctcagctcactgcaacccctgcctcctgggttcaagcaattctcatgcctcagcctcctgagtagctggaattacaggggaccaccatgcctggctaatttttgtatttttagtagagatgagctttcaacggcgcggtggctcacgccagtagtcccatcactttgggaggc

SEQ ID NO: 57135 - DNA, 1234 bp, Homo sapiens
tagtgctcattattaattggaacattacagctggagtcaaagatctgcctcctgaaaggtactgtgttctgatgtttacagccaaattccattaaacattgactgatttattacaatggatacaactcagaaatagctcatgggaagagatgcatagggcaaggtattggagagtggcgggtggagtacacagaataggtctgtgctggtgactcttggaaacactttggcattttcttcccagatgggtaccctcctagtacctcaatgttttcaccaacctggaggccctggaacctccattttcaacaaactccctttgggatttatatataataaaatgctataaaatatcagtttttgagctcttttctgtttgtatatttgcttaataagaatttgctaaatgaataaattttatctgattaagttttcaaggacccaaatgaccaaaataagaacttactgtaagactcaaaatataacaaatgaggttaatttaaatcaggcagtgagtttttggagaatatgttctgtacaacaaaaaaaaagttactacaaaatacccttccaactttgacatattaacatccttatttccttctggctttatcagtctttctaagtcatttaagtctaaaaccccagaatcattattgttgcatctctttattttccatctaattattcatcaaatagcagtaatgctttctttgaaatgtcttctatatatctttgttttcgtttctgcttttcatctcctcatttctgttccttccccttccccttctctcgatttacttctaacagctttatgtccctttcagtcggcctttatgcactaccaaatattcatctttatacagagataatcaatcaaacattgcttgttacctttagttgacccaggtctttcagaaaagtttttttcaaattcagcatttgcatgtacctctatctggtatattttggccaacactaaaaataaggggaaattttgataaatatattacctgaacttgttagttatttaatctatttcacttcagatatctgtatctaattttaaaattatatttacccttactattaaatatgatccttaagaaaattataggaaaaagtacaatagaaaaaaatactcaaaggtaactcagatttcaaaatttactagtatttagaaaattagcctttataataagtatagaacaatgtcgttcctatatctacttct

SEQ ID NO: 57136 - DNA, 1040 bp, Homo sapiens
ccaatcttgaagcatagaattgatgccaatttttaagctacttgctgtttttggttttagtcctgccttttttaagggaagaaaagaaataatattaatttgagagtgtattatgaattatgccattatcctaacagtaacttttattgtaatctcaccatgctaaaaagtatccaaaatattttgagatgggaagggatttgagtttggtttctaatgtttatcttttggtaatccctaccaaattttcatagtaatagtagaaagaaggaaagtgaatattggatattatttcctttacttaaaagcttttgatggatactatttgaattggtgtaatatgctgaagtgtatgtaatggaaaaacattattattttctaaattgaataaaatggatttaataaatactgaaagcagaattaactaagcaaaaataagtatgttttgcttagaaaatggatggcagttgcttaagaaaaaaggtttttttactaatttaagaatatacagattgtctggggaaaagaaacttttttttgtattttacttgtacagtctcacatataaccactgttgttctcatgacactctcctatattgatgtgatctttatatgatttgtaccttttttatctcttattccattatttcttaaattctattttattcaccagtttcccaaataaagctatcagggttgacatcagctatttccaggaaaataaaaaggttattactgctgaacactggaataatttgattatgtagattgaagaaaagtcaatctgttataattgctgtaaagaagccatttaattttgtgcctgtttgcattagtctttttttaactagatatgcagattagtgggatgaaaatatatattctttatttgaattgtgattgccaactgaaagatgaatatgagggcagaaaatgaatctaaatctttggtttaaatgataaagtctttacacattgtagagaattaaataagcagttggtcatacttttatttatcttcaggatcttttgctctct

SEQ ID NO: 57137 - DNA, 2084 bp, Homo sapiens
cctgcattcttaaccagcaaactgcattgcctctaattagtagtgatgagtttcgtgccaagaaattttaagtaagttcttactctttgtacttttcctcagctcaacagacagtcagctaaaactgtggaatgtagggaaaccatactgcctacgttccttcaagggtcatatcaatgaaaaaaactttgtaggcctggcttccaatggagattatatagcttgtggtaagtgaaaccatcgtttccaggaactttttaacaggtgtttgttattgaaattgaactcagtggaaatagaataaatactaagtcaagaaatggtctgtgcactcagaagatagtataatagacatgatgccccagcactactgattttccttgtgttgtactagaagagcattagtccttcccttttttattgtgtagaaaccctgaacacctcaaatacctgaacacctgatttttaactgttttatagttgttctccattataacataattctttagatattgtgtagaagacagaaaaggttaagttctgttagtaatatttccaattttggagacattatgtgtcttcttaagcttgatattcattttcccctatctgctgttctcttcatgaagtaatctgtttgcatagcattgatctgttattctatggcttttattgttgataatttatacaaatttaaataagaaatagaaaaatcaaatttgatattattcaaatgctctgatacatctaatgcctgaatagatgagctttgatcatacttttaaatgacttggcctttgttcagcaaagttgactttctccacatatgtatgagactgccaaagcaaatatctggaacaattattctatctttaatagatggctcaaaaataaaaatacagttcatagaccattaatagaataattcctatactgagaaatggaaataaattatgtaggctatgaaaatctgcctgtgtaagtgttgccactttcttttacctctctaaatggaaatcttcctaaatgtaatttaagattcttataatatatttctggttctactatagacttattaggctggtgcaaaagtaattaaaagtaatgacaaaacccacaattacttttgtaccaacctctataaatgattttatagggtaattttagccttagaattatcagtattgttgtatcatttaacactgattgtttctttagattagtaaagtatagcttttgtccaagaatccttttcttacatgatttctaattagtcctgtgatctagcctttcaaatttgcccataaaagatctttgaactataactttggctgataattactattagactgtgatgtcctaattccgagtttttctattctaaaatactattattattatttgttttcaggaagtgaaaataactctctctacctgtactataaaggactttctaagactttgctaacttttaagtttgatacagtcaaaagtgttctcgacaaagaccgaaaagaagatgatacaaatgaatttgttagtgctgtgtgctggagggcactaccagatggggtaagttttcatatcagttttttcaccttgggatctcatattatgcattatgtatacacagggtttgattaaattttaaaatataaattggtatgtggtatgtactttttaaaaaactttgtaatgtgtcaccaaagacaataggcattttaggtagtgattgaaatgcatagtaatagagcaatgtcatggtgtcataatgtccctctgtgacccatagcatttagtgcatatctcagttataaccattatcatattgtctgttcatatctcttctataagactggaaattcctccaaaatatgcattctgtctcattttctttattgattatgtgcagtataagcttgataaacattaagctgagctggtattttaatagggagggagaaaaagaattggtacaggtaaaggatagtggcctatatggtcctctaattaagtactatttcaaagtagaattgctgtctacaaaatacatttatatatgaatatttaagcatatttagtat

SEQ ID NO: 57138 - DNA, 1263 bp, Homo sapiens
cccccatactgttctcgtggtaatgaataagtctcatgagatctgatggttttataaatgggagttcccctgcacacgctctcttgcctgcccccaggtaagacatgactttgctcctcattcaccttctgccattgttgtgagtcctcctcagccgtgtggaactgtgagtcaattaaacctcttttttttttttttaataaattacccagtttcaggtatctttttattagcagtgcgagaacagacaaatacattcagctttaacacttttagtcctagtaaaccaaatgttttagagtggcacaaaaagatttctggagcaataagccaactttcccaagttacagaagcatttactaatgtattacttgtttctctttttgtttttattgtcctttgcccttagtgaagctgtggtctaccaatctagacaactcagtggcaagcattgaggcaaaggctaatgtgtgctgtgttaaattcagcccctcttccagataccatttggctttcggctgtgcaggtaagaaatgaaagcagatttgtcttcctttgatgttggttaaatatcatggtaaggataggagagcattttaaaacaaataactcttttgtaggtttaaatgttgtttttattattaggctctaaattagaagtatacagtatgccatcattactcatttagtgctgtaccttaattgcactattctgtcacttatctttaatacgtagatatgaatttgttaatttttgtcatttttcttagtgtttatatgcatgaattaatgcttattacttattcacaaacataaggtcataataacatttaaacaattaagctattattaagctatattgtataggcacaggaacactttttttaaggcaaactattctttcaacaattatttattgagtccctactatgcacaaagcactcatctagggacagtgaataagacatagtcttgtatcatggagttcatgctaacatagtattcaaaaaatgtttgctattattatcataccaaataatcatttggtaaattatttttcttaactagggtgaccatatgtcggtgtttgcctgggacagtcctagttcacaccgtttgtaccattgtatttattattagtgccctctttcattcacaaaagtgtcatgagttggaaggaagataaatcatatggtcaccctacccttaatttttttatctttcatattttcccccttgaatatttactaaaatagtaaatac

SEQ ID NO: 57139 - DNA, 1029 bp, Homo sapiens
ggtgacacttagaagacactttacacattaacgttaaagaaataaaacttgtatagaacacttagtgttaagtaacaaatttatggccaactagagtatgtttctttattttaacctcctaattatggtatgattttcctaatggttactcttttgattatttactgagagccaaaggaggccatatgtaaataaatacagtgtattttatttgatttaattgctttagctcttcacctagaagatgatattttcttttaaatttactttttctttcgaagggaattttcgtcaataaattctgaaatttaaattttggaagttaaatgaaattcttactaccatccttgcaaggaaaaagtaacagtaaaggtgttcttattaatttgtatactgtctccttattttgaggatcgcctcatttatatttggcttagtttcttctcatacttgatttcttctacgcttcctccaaaagattatactattttatctttcgatctgtgatgccatcttaggatattaaatagatttcaatattatttcattatatttgttgtattagttttttagggctaccataagaaagcataccacaaacaggctggcttaagacaacagaaatttgttctctcatagtactgaagaccagaagcccaaaattagattgttggcagggccacactctctgtgaaggctctggggaaaaattatttcttgtctccttcctaatttctggttattgatggtcattcttattatttattgacttgtagctgtatcattctggtcttggctctcttcacacatggccttcttctcactgtgcctttgtctctaaatctctctctccttatgaagacaccagtcaatggatttaggacccatcctaatctagtctgacgtaattttaactttgttacatctgcaaataccctatttccaaataaggtgatgttcacaagtacctggggttaggactgaaacatgtctttttggggaacacaattaacacctgttttgtttaat

SEQ ID NO: 57140 - DNA, 1045 bp, Homo sapiens
tttttagatgttgtagacttctggagtacttgagaatagccaaaaccataaatgataaaagtttgattctaacttttagatgcttttaattggaattttagtcataagttataattagtcaagtcaagacttttgggatgtaaatacagaaacccaattcactgtagtttatttggcttatatgatttggcacaactggatccagggggttaaacagtctcatcaggtctgtcattctgccatggtatgccttgagccctctggatagtatcaccttcactgatagacatcgtttcctcatgtatcaaagatggccagtgatagctctaggctcacatccatcttaacagctagtgatcacagtaaaaggtggttagggtcattacttgttaatttttatttttaaaatttcaaaattattggtatgtcttttcccaggtatgttgtgggcagaataatgattgtgaactgatagagaccattttaaaatagtgcaaatctttctgaacacattaaaattatttttatcccattgttatttatttttatgtaaagtaacttttaactgtatttctttcagctgtatcagttggagtagttaccataagaacctgttagctagcagtgattatgaaggcactgttattttatgggatggattcacaggacagaggtcaaaggtctatcaggtaaataagggtactagttacatgttatatgaatcatacatttggtttgttaaaacttttagaacttcatgtgccttataattacagatttgaagtcactatttagtattttttatacctgtgtaacacctatgcaataccaaatgcttttttttcctgtctcccacttttggtaccatatgcttttccaaagcatttcttcagacttcggtctttatggaatgtatcaggtaaatttctaaaagcaataattttggtaaatgtataaaaagttttggaagtactttatatcaacatcttatttgcttttcatttgttttctagcctgttgtctttccctctccccgtaacaataa

SEQ ID NO: 57141 - DNA, 1051 bp, Homo sapiens
atagatacagagcactagctaggcattttgagagaagaaacacacatacatagatattgaagatacattcatacacatagattttaaacctttaaacctttagcctttacactttgagttttacattaagagctttgatctgtaataaagcatagtaattattagcaccagctctgaaaccagactaccttgtgtttgaatcccacctcagccacttacagattgactaactttgggcaatttacctcacctctaatcttcattttctcatctgtaaaatgtagataataataatacatatatcacaggttgttatgaggactaaatgaggtaatacatgcaaaatgttttagtaagtgaatgattaatgaatattaggtattattgtgtaattaattgtagatcagtgagaattcttatcgctaaacctctagaaaagatgcttaaatcatattgaggaataatgtatgtgatgattcatttcaacttttactacctttgggctaattagatttccagctggttatgtaacaactgtgtttaggctgcaagttctgtaaaagcgagtatgatcttgtacttgctttcaaatagcttgttttggagcttatataaaaatgatcagcaagagaggagtgaataacgctgaaggaaaggagattatttatttatttatttatttaacctcttttgtgatatgaggaatgtgtattggggttttataattcagagagatatttggggagggggattaggtatggatttggggaaaagtaatgataattcagtggttctgttatatgtattccatccccttgtcatcacccaattgcttcagtaattcaaattatatactaatttatttattaaaaataaaatttaatattgtgaaattctactacctccacaaaatggcagggaaataagtagaatgtatggaaaaattagttgataattgtcttttggcatacttttagtatatcaaatgattcacgccattaaatctttctcagtaagctgtaatatggttattagaactgaatgaaaagca

SEQ ID NO: 57142 - DNA, 1971 bp, Homo sapiens
taaaatctgagacacaaacacatgtattagcctaggcctacatacggtcacggtcaacagaatcactgtgatctcttccacatcttgtctcactggaaggtcttcagtgccagtaacacacatggagctgtcatctcctatgataagatcttctggaatacctcctgaaggacctgcctgcggctgctttacagtttgtttgtttttttttaaaataagtagaagatatacactaaagtaatgataaatgtatagtatagtaaatacacaaaccattaacagttgtttattttcaagtatatgtactgtacattaattgtgtgtgctgtacttttatacaactggcagcatggtaggtttgttcacaccatcttctccacaaacctgagaatcgtgttgttgcactgcaagtcattaagttaggaattgttcagcttcattataatttgtgggaacataagatgtccttaaatagcacataactgtaatgtgttttttttaacatcttggttttttcagcagctatgttagtatccagcagataactggcactctggacatttgatggctgaaaatattcacggttcattcttttcttcgaatgagccccaataatcattgcctcctgaattcctctatcaatattttgtcctatcatttgacatttgcatatattgtctgtaatctcttctactaattataaaaccggtgaggctaccttattcttttttttatccctttgtgtttaaattgttgcacaggctgaattatgtgttattatcactatatataatgtaatgtatattattattctgtgttattattcttattttgcctgtgtatatgttcattgaagaccagctcatttgttctaattgaaattgcaagtttgcatgatgattgagagcatagactctggaaccagttgcttaaatttgaattatctggtgtatccgtggacaaattacttaacattagtatacctcagtttctttatacagtggagatttgaagcttgtataatttatgtaaggtggttaaaacaatgcttgacacatctcaagtgttatgtatgttatggaagtttcaagtagtattgattggaagaaagttgagtaacatcaattcttaatttactttacttgtgtttgtatttttttaaagatctgctcatcacttttcgttaaaatggccagtttctaaacgtatattttgtttccttaaagttttagttacctgctcttgaggcacactatcatggtaatgaatgagaatgagacctttgacaactgctcttactttatattttaatttgatataagttgggctctagcatccagggacactaatccaccatgtttgttaatacttataattgcaaaaagatatgagagacattggaaacactgacaaaattcactgcttgggcttattgacggctttcattgctttgtgccgcattgtactggcagtatgcattaatcagctgtcctgtgcagtttcttgccttgctgcttaatcacttgactaatgacatttttgacaaagaatacagctagtttcctacagctgaattacgtatttcagctgttgatataaatcactcttttaacagttgaaatgtttcaaaatgtgaaagaaaaatgcaatttatgtccccagaaacacgatttttcaaaagtatacttgtatgttgaaattaaaaacaaattctgtgaaattgaatttgtcatgcagtaaatttttataaatctcttgttttaattattactgctgacagtggatggcagaaatgaacgttgtatagcagtagtaagacttaaagtttgtttttgaatttaattgcataagcaacatttcagttaattagtttaccttttatttagtctcagcctaactagtcactgtttaacttttgaagtacttttgcttgggttatcagatttcataataaaagtagttgaaatatca

SEQ ID NO: 57143 - DNA, 1320 bp, Homo sapiens
ggtaatgaaaaagtgtttagggtgtggtcatggttgtgtgaagtggaagtgggcagaataaaagatctttggagaagaggaagtcaagaaaactgatagaccaggatattaatcatctatatatagttattaaaataattaacaattaggcaaggaataatttttaagaaaatgacagtgagctgaaagttagaatttccaagaactcgtgggttggtagaggagcatcaaggacacatattgggtggtatatgttacaggagattttgagctgggaggtttcagggagaagagagaaaaatgacgaagaagctatgtatagtaagcacactgaatttacttccaggcctatttgaacatggaatgtgggaagactttgaggaagcagtatattcaggggagagctgggtttcacttagaatgagaaagcaaggggagcatttagggaagaaattgcaattattaatggcttatctgggtggagagagatttagcttttacttaatagaaaagtgcacatattttttgacctagcacttcatattctaggtgtatttaagagtactcttgcttatgtgtcaattgacacatatagaaggggttttttttttccccagcattgtttaacagtgaaagactagaagtgaaatgttcctggttaaataatttgatacatccaggcaatgtaaatctgtgcaaccattggagacaaaaatgaggttgctctcatatgtgctgatatgaaatgatggtcaaaatactatggcatgagggggagaaaagcaagtgcaaatcagtatatatgatgtcatctcatatgtttaattgaaaaaaaccaaatacgtgtatgcgtgtttatgcataggaaactagtaagatgcacaagttgaaattattggttgcctacagagagggcaattgggtacttatttggcaagagtgggagggaggcttgctttttttctgtatactttttgaaccattgcctacataaatttttttaatgaaatatgttctaagaaaacactcaagccacattttgaaggatcttcagtaatagttggagtctgaattttacatagtagtaaatggggagaattatatgaatagagctgtgtgtttggaaatttatcctaattcagtctttaaaatcgattggaagagggaaatttcaggagtaggagtcttgataaggaggctgtttcagtagcccaggcccaatatatacttctgtgaatttctcaaatacagtcctgcattgcttaacgatggaaatacattctgaaaaatgtgtcattaggcaatttttgttgtgcaaac

SEQ ID NO: 57144 - DNA, 2068 bp, Homo sapiens
aaatattcttctaaactgtaaatttttgctccacgttagtccttggtaggattaaatggtttctttatatcatagttttaaggtttcctgatgaaacatcacagcagtgacattactgatttaatattgtgatcctattggttgctttgtaaatactaccagagaacacagaactgagaaattagatgtattttattttgcagtttcaaaagttaagaattgaaattttagcttcatatgattctctgttgagtctctgttgtacttttactaaacacacatttcaaagtgtttactaaaaacattttaaagaggacaaaatgtcgtagtaactttggggacaaaaatatattttctttttcagctcttgttattttctctactagatgttgttctgaatgaacaaaagttgatattaagtatattgattttaaagggcatctttaagtgctttaaggagaaagacattttatcacaaaataaacacttgatattcacaaaagtttttcagaatatagtctatcaggtagtgtatttatttgttttagctattcaatgatagccagagggaataagaaagtaaatttttttaaagtagttgttttaaagcaagatcttgaggttttatggaattcaaacaaaatgagccacctaataaaaataatagaataaaaatatgcatagactttaaaatgtggcttcaatttagtgcctatggaataaagtctgtccattaattcagaataaggtcagcaattatctagcaggttgctattaaaaaaacagtttaaggtcagcaaactaatacctgcgagtcaaatttcaactcattgcttgactttgtaacaactaagaatattttttacatttgcaaaggttgaaaaaaaatacaaaggataatactttgtgacatgtgaaaattcagattctagtgttcataaatgaagttttgttggaaccactgacgctgttctgacataaaattaatagatatcaatggctcacacctgtaatcctagcactttgggaggctgaggcaggtggatcacgaggtcaggagttcgagaccggcctgactaacatggtgaaaccccgtctctactaaaaatacaaaaataagccaggtgtggtggtgtgcacctataatctcagctactcaggaggctgaggcaggagaatcacttgaacccaggaggcagaggttgcagtgagctgagatcacaccatcacagtccagcctgggcaacagagtgagactctgtctcaaaaaaaaaagaaagaaaaaagattttgcaaactccctaactacaaatttttaaaaaattatagtgtcttaattctaatataaaggagaaataaaaggaaaataagatgattttaatttgtaaatacttacctattctgtatggttaaaataaggagatggtcaaataataatttaatgactcacttgttttattgccatacaaagataatttttttcttaggttcacaatgcttaagagggagagaataatgtgaacaagtttcatacagaatacacttgatagatgaattacattaaccacatagtgagtgagctccaaaattattaaagtctggttgctcaattaggatggaagcagggctctgtggaaagtaaagtttaattaaacattaaagtgtgcttttgtgtgagcacagctgagatctgcaaccacctgtaaggtcccttgaagttagagggcagtgctggtgttacaaagcaaggcttcaaagctccaatccatgtcacagtctgagcattcagtcttctgagaagtggctgacagagtgaaacttgacacagcctaagctctcaaagtgttgtcaagctcttaggtttatatatgtttgaagtccagtagttgaagtcagtaactcacatatgggatctgaggaggcgtgttaccacattccagaggggaggagaagtttcaggttcatatatgggatctgataagaggtcacattcttttttttttttttttttattgatcattcttgggtgtttctcgcagagggggatttggcagggtcataggacaat

SEQ ID NO: 57145 - DNA, 1103 bp, Homo sapiens
taaattgtgtaaactagtctttagtaaaatctttaaaaattgttttttgtatttagaatataaattttaatttgtggatgtggctctttgacttactttgcagttcaattcatctgttttgtcttttttttttttttttcatatagatgacagtcgaactgcaagccagttggatgaatttcaggaatgcttgtccaagtttactcgatataattcagtacgacctttagccacattgtcatatgctagtgatctctataatggttccagtatagtctctaggtaagtattggtcaaattactattttcttttgtaagaatgtctagaatctaattgaatttgagaagcacttataccattattattaaaagcgtgggttctgaagtagcctgccaattattagttctgtgattttaggcaagttcctgagcttctatatgccaaatttcttcgtctctaaagtggaataattgatagtatccttctcataaggttgtagcttgttttcttgtactatcattgtctagttttgatgacagtatgctcttctcataagtgcttccacctctgcattttctgtaagtttgtatagaattggtattatttcttccttaaatattttgtagaatttgccagtgaagcttccagaaaagaattttaactaccaattcaatttgcttaagagatttagggttaatcaggttatctatttcttcttgatttagcattataattagtttgtgtcttttaagacatttgtccgtctcatcagggctgttgaacttattggcgtacaattattcataatattgccttattattctcttaatatctttggattgtatgatgattttccctctttcatgcctgatagtggattttgtttcttcttacctttttcctgaagagtctagcttagaagattatcagttttattgatcttcccagagagccagctcttggttttactgataggctgtatttttttgttttctgttatcattaatctttgctcttaattatttttattcttctactttttgagggtttaatttgctcttatctgctaatttcttaagataaaaattgaggtcctttagtt

SEQ ID NO: 57146 - DNA, 1673 bp, Homo sapiens
atactgaaaaaactagttttattgttttctttatggtttctgttgaaagtagctattaatgagcttatatgatgggcagaaatccagttagcctagaacaggattattagcttagaacagaatacacaatattgaatgcttgtgagttttatgtacttaggaattgatatcaaaatgggaatgaataggataacattgaaacagtttttaaattaataaaaccaaccatctttccagtatgtagaatgttaaataactcacagtaataggattccatataaaaagaatcattaactattatatccagaccactctgcagtacagttgggatttttatttttgcaaataacccatgttttatttataatacgtggaatttcctgagaataatttttgtggagcaagagttttgtctcaataccgttatgatattgcctgttaggtaattccttttgctgtctttagaatggaagcacaactaagtggaccctttaaatctaggtgttttgatgaatttgcttagtgtttaaatctttaaaatttgtaaaatatcagggacaaaagctcactcagtttcctcaagtaatgttatttatttttcttctttcttttttcttttttcttttttttttgagatggagttttgctctcgttgcccaggctggaatgcagtggtgtgatcttggctcactgcaacctccacctcccgggttcaagctattctcctgcctagcctcccgagtagctaggattacaggcatgctccagcacacctggctaattttgtatttttagtagagacagggtttctccatgttagtcaggctggtctcgaactcccgacctcaggtgatccgcctgcctcggcctcccaaagtactgggattacaggtgtgagctgctgcacccggccctgttgtttatttttttcttataataattgttacataaatttcgtcatgcaaacagttattttcaagataacctaatatctccagataacataaattctttactgtgcattatattatctgcataactcttttgacttaataattcttgcatcttacttttattatgcttactatacttcagatggcatttaagaagggaaatcatgaacatttaccttgaaaaagttgtgtgtgtgtgtatgtatgggcttagaataaagaagctatgaaaatacagtggtataacaaacttgtctcagtttcagtctaggaaactaaagtgctcattgtttttttcattcttcagaaaggaaagtatatgttcaaacgacacagtgctgaaaagcaatgattttttaaatctatgcttttagtgtaggtctgcttctattaatagactggagaatagattcgttgtattctcaggtacttcgtaaactgatactatgttttaaattccacatgatttatcttccaatagtttactgaagtggactttacccaaggtttttgtatactgtaccactggatggaattattgtttttcatatttcagcaagagatttgaatgaatattttttcttgatgaaggcactttgagataaaaaggagcaatttcaaactttttttgtttgttttttagaattaatagttcataacattgcagttttctactgtcttcctgtaataggatttgaaacatttcagtatattatttga

SEQ ID NO: 57147 - DNA, 1075 bp, Homo sapiens
cccaaagtgctgggattacaggcgtgagcgaccgtgcctagcctaagcatgtttatagtagaaatagagaagaagaatttacaaaaagtaaataatcgtttatacggttggtatgtatgtcatgtgattttcagttgttgatagttttttatgtaaggcttatttaaagatgagagggagataggaatgatgaaatggtaagatagaaatgctaagatagaggaagtaaaagatagtctacacttctggaggtttttttagggttagatagaatgaatagaggatataaccaaataaaaagaaccaatggagaaagcagattatgtttgaccagagcagaggaaactagtatattggttttgggttacaaagacaagattattgttattttaccatttattttattcttttgatagttcagtttttcacatgaggtttgattataatattttgaagctgggagggactctagatgatatataaatagctagcctacatcacctcatttttacagatgaggaaacttgagtaattgattataagttaattgtccaagaacacatagctttttaatggcatagcagggtgtgttaaccatagattttgattgcatgcttgtgctcttttcccaatagtgtaaattttcttttccttaaagttctccaaaccttaacctgtctgaaaatgaaatataaacaagtaaatctatatagacatctgccttgtgattatcccctattgacattatttcttggtttatatgtttgaggtggtgggttgaagtggtaaattgcttaaatatttgctgatattttatgggttgtctatttgatgtctaatgattggcaataaatattttcttggcttagaaattagaaatactgggcttatatatgatatactttagatttactttttctgttgttaaaataatgtaaatactgaaatcacatttttttctcttcattttgcagtagtattattgattccacagaatacagccaacctccaggtttcagtggcagttctcaggtaaacgatatctttgtttgctttaatgataccatgagtataa

SEQ ID NO: 57148 - DNA, 1050 bp, Homo sapiens
gggcctctctcttgcccaggctggaatgcagcgatgcatagctcattgcagccttgaccatttgagattaagtgatcttcctacctcaccctcctgagtagctggaaccccaggcgtccaccaccacacacagctaattatatgtagaaaacggagtcttactattttgtccgggctggtcttaaactcctaggctccagtgaccctcccaccttggcctcccaaagtgctaggattataagcatgagccaccatgcctggcctcttctagctattttgaaatataaatacattgttgttaactatagtcactgtaatcttctgtcaaaccttagaacttctttctttcgtgtaattttatgtttgtacccattaactatgccttaaaaaaaaaagactgctgtgtagacagattcatatgatttatttttgaaaatgtgaagttttatgttaactaattttgttaataaaagaaactaaagtttattgaatgtttaccatattttggcatcatactgtgaacttcacatgcattatcttatttaaatctcatacttctctgatgtgtcttcatcatttaatagatggagaagctagagctcaaataagattaatcacttgcccagagtcaggttattcacttctatgggtaaaattcaaactgtgtactacttagagtacctcccatgctttaacctttgaggttctttcagtactaagtaattaatcattttgtatgtttacatatagaaccattctaattagtaatctcaattgcttaaattttatagggtagaaagaatataaacttttttgttggttttttgtttgtttgtttgtttgtttttcgagacagagtcttgctctgttgcccaggctggagtgcaatggtgtgatctcagctcactgcaacctccgtctcacaagttcaagtgattctcctgcctcagcctcccaagtagctaggattacaggagcttgccatcacacccagctaatttttttacttttagtagagacagggtttcaccatgttggtcaggctggtct

SEQ ID NO: 57149 - DNA, 1005 bp, Homo sapiens
tgaacctttgaatttttaattaattgtttttggaatgcttcttctaagtatttctggagtacttctgaggttatttcagataattgtttttttaaaccctgatggattgtatcaactatatcatctgataatttaaaatttctactgtgtgaattacaaataaattgtaatctactccaacttgttggaaagtagtagtagaatacaaactagtcaaataaaccacgttgtgtaatgaactgaaactttaacttattttgttggagtcaaatcagtcttgttggtcttattcctttgagcttatttttgtctatttttgacattctaccaaccgaagtagtttacttccaaaagtgataaagcaatagactcagacctgttccatcttttagaaattttccctcatgcttgctttttatatctgctagcagtaagtttctaaggaaactcctcttacaaaaaaaactttcaaatgagctgctcttttgctttcctttttcagtttcagaattattatgtaataaacattttaaaaggcggtataagtattaggttccatagtccctgtatgcattatgtaactgttactttttgtaaccatgtactaattaaaagaagacaagaggtgctggggaagtttttttctggagttctgaaacactgtgatagcgtctgttgtttgaagaataaattacccctatgtctttcctgtagaaatcatagataagtactctgtggcctagtacttctgttattgaactaaccttgcattccttaagtaaacctaaatttgtatgatatataagtttccaaaatttttttggaaatcttttgggtcagagtatagtcatattcctttcctgccttcaccgattttggaaaggtaacagagtacatatgccatgtatcgtataaaactgatggaagaataagagggactttcccatcaagcacattaatatttcagcgttaaaacatgatgtcagatgtgttcagaccaggttt

SEQ ID NO: 57150 - DNA, 1017 bp, Homo sapiens
aatagattatcacctgaattaatgatatgctagttcactattcacatagtataatgtacatgtcatttaaaatatttacatttacatttatctttttttgcatgtggtggcttcattaatgatgaacaatatttagtaaacaatttatagttctttaagattgtgtaccatggaaaaggcttgtctcttaacttttcacatgtccttgcttttgtattctgtggagaggaagccttcagaaatttgatattgagacaaacagggactgatgaaaacctgggaatagaaaggaatatatcatgcctctttttgatttatatatcttctatttgaaatatctactataattcaaataattttattttcaggaaatgagtggcttatactctcctgtcagtgaggatagcacagtgcctcaatttgaagctccttctccatcacacaggtacaagcttcacacttgcaattgattagaattcatattacaaagtatgcatatggtctagtcctttaggagccttttccatgcagtgtatgaaacccctgagaaattactttggtcatgatctagaaatgatattcatatggcccatctgtttccttaatgcgttggatttcatgccaggaagagttagcgagtagaatactataatgttatgaattcacagttggattaaaagtttgatgaatttcttaaagtaatgatagctttaaatatcttgtgaattaaagtcagatgacattcaaaaatctaaatttgagaacatgaagtggtaatattagggaaaaatgtgataaaataaaaccttggacttctccccctaacttgttaaattttattggacagatcacttttcccacatttaaaatgagggcagtagacagatctgttagtttagatttccttggtattttcttataactacttattattaattcttctatatgcgatattagtatagggttatatttgtcatgaccatttcccaagattttagaataaagcctggtttcatt

SEQ ID NO: 57151 - DNA, 1022 bp, Homo sapiens
ttttttaagccactgtcattcatctcatacttttattgtaaaatcaaactgttgtattaaagaagtacaacattgtgttttcacataattctctacctttgcattaaaaaatgggaacttctagctatattttgttgatggttatccctcctgttaatttgccattagtgccaagtttgatagaaattattttcctaatgtaaatttattttatgatcatggtgatgccattttggtttggcttaggcttttttttttttgtctttctctctctatttaatctgcagcaactggaacagatccagaaggagctaagtgttttggaagaggatattaagagagtggaagtaaggaatcaagaatttctcacatccttagcaatttttcaatttcatgaaattgtcacctttccattaagttgctgtgttaagtttatgggattggtcttaggaagaaagtaacagctgttactttcatttcaattgaggatgaatttttgtagaaaaaaacattctgaacacttgataaaatatagtctaaatttgttttacaatgttttattgccataatttttctcgattagactgacaaaaaaaatcgctcagttttcttggagtgccatcataacttaaaactgtcaattattaccactacaatgctttttttattaataacttttacatacctactctgtgcatttctaggagttaaggttaattaaaagagaaatataagaatacattaccaatattctgggaatttacagtttaatatagtttacctaaggaaatttatgggaggatccttgggagtcttatagggtattatgatttgaagtttttgcctttggctgtatttattaatttagtttgtgtttttagttatttatatgtattgtaatttttttttgctgatacatagaacatgtttaagattaatggatttaatatttagtggatgttcagtatcctctgtagcattcttaagttgttacacatttatgtcacttacctgactgtatg

SEQ ID NO: 57152 - DNA, 1173 bp, Homo sapiens
tgtttttgttttttcacttttcaataattgccattctgactggtgtgagatggtatctcattttggtttttgttaacatttatctgatgattagtgatgttgagcatttttttatgtgtgatggccacttgtatgttgccttttgggaattgtctgtttatgtctgtgcccattttttaatggggttatttgttttttgtttttcatttatttacgttccttgtagattctggatattagacttttgtcagatactcattcttctttttaaatgtattttttaaagcaattattctaaagacctcttatatatagtaaagcatttgtttaaataaaaatttcaagagtggaacattttaaggtagttaaatgaaaatgtttaagagattaccatgggagtgttttgctgaattagaggtcagcatcactggatgctggagttgaaaatgtccatgaacccaaaggcctcagtgatggtggagaataactgggatgtttattgatggctcaagtgggtggacagggatttggctgcttggtatgagctagacagagtggtttttatgttatggtggaaaactaattttagggtggaagactaattgttggaaatggccatggaatggagtagaaatagtgagttcctatctattaataagtcctgtaaactctggggctttagagactttatcaattgagcagtatcaattgagcagctgttatttgaaagagtttcaggacagacagtgtctttaagagtgagcagggtttcagttaaggtggcattgtgtgacatattttaaggcggcaggaagtttattaaagtagatagatgagttgaaagcttttgaaaatgctaatcactcttttaacccttgatttctccaatggtactgtcatttcccctggttttctggctgcgactttgcccttcttgattgttaatgctgcttcttcctttgcccatctctttaacattggtgttttctaccatttcagttttgcttttatctcttctgactatacttattgatgttaagcagttttatttattgccttactttcagatttattatttacctttctcatggcttttgtaccttcgcatatgttattatttactctgcttattctgtcatgcctcactgttttccacttggcagaattctgtta

SEQ ID NO: 57153 - DNA, 3524 bp, Homo sapiens
gtgggtctgtttctaggtcctcttttctgcttcactggtctttttcgcaataccaccttgtattaaatactagagctttgaattaagttgctgttcttctttaaagtctgggatattcctggctgtctgcatttcagtataaattttagaatcagctagtacgtttccatggtaaacttactgtgctttttattgggattaatttgactagataaatctgggagactgtgtatttacagtattcagtcttctaatctgtgaatgtggtacttccctctatatttagatctttaaaatagccttaaaatttttatatttttcagggtagtcttacacatctttattttagatttagtcatttttgatactattgtaaatgatgtctgtgtctctaactttagtttcttattattgctagtgtgtagaaatacaggtgggttttacatggagatttttaaaaatatccagcaacctggttaaactctcattaatcctaatttatttgtagattcttgtatgttttctatgtacacatcataatctgcaaataataacagtttagtttcattctttatgatccttatatcttttatttatttttcttgtcttactctgctggctaggacatccggtacaatgatgaatagaagtggtgatagcggggcatcctagtcttgatgctgatctcaaagtgaaagcattcaacgtgtcaccattaggtatgatgttttctgtaggttttttgtaggtactttttatcactcaaggtagtaaatttttacccagtttgctaagagaatttttaaaaaatttctgagtggggttgagtagtctccagaatttttgtgcatctgatgcaaccatatgatttttccttttcattctgttaatgtgaataattactttggtttagcattggggagtcaatcaactttgcatctagagtgaccaaccatcctgattggcccaggggtgtcttagttatatcttagttatatcactgaaggttctgcattctaggaaaccccaccaggacaattggtccccctacttgcaccccttatataaaccaaacttggccgttatgtatattctcttctatatggtttggtttgcttatattttgtttaggatttttgcatctatgttcatgagtgagattgttttttttcttacacatatcttgtccagttttgctataaagattatgctagctttatcaaatgtgttgggaaatgtatcctctttttaaattttctggaataattttgtgtagtctaagaacatcttttttgaatgtttaaagatcttactggagaagcagtctagacctgtgattgtttgcgggaagttttaagttattgaatctgttacttgaacagttacattcttattaaggtttttgttttagatgtcacttttcatttgttaaattttttctagtcattgtttatgtcatctcaattttcaaatttattggcgtaagattggtcttaatagagtcttaagtttttaatgtcaccagggttcattcctggcagtgtttattttgcttgttcctctctctctctctctctttctctcgctctctctctctctcgcttgttctgttggatcaattcttgccaggaatatatcaattatatgggtttttttctaataactaacttttgactttgtttttcctctctgttttgtttgttttctgttttatttatgttctttattatttccatcctgctttctttggttttacttttttgttccttcctaatctgttggcttgggtggatatgcatattattatgcagattattttttctaatgtaggcatttagggccatagtttcttattttttaatctgtacctaattcttttggcatcatattttgtttattattgttcaaaataatttctaattttcattatatttttttcttaggcctgtggcttatttagaaacaaatgtcttattacttgaacattgagattttgttttttttttgttctggatttctgttataattgcattgtagtcagaaagttgtgttttctttctttgaatataatatttgctgtaccaactggtaattggttaaattttgaaatacttgtgcttgaaaagaatgcattttctgcagttgcatgattcattgtaaagttgttaaatgtgtggtgagaatttcctgcattcataccaggtcttcctttccttgttatacctattactgtctcattatcttttaggtgaatttcttatagatagcatatggttggactatgctttgtaaatctactctgccagactcagttttttaattgtgtatttaggccatttatttaatataaatattatagcataagcctgtcattttattttttgttttatatttctttttttattattgttgcttttctgtttttctttccatgggtttttgaacagtttcttttcggaattccattttgatttatctataatgttttaaagtaaattttttgtatcattttttagtggttgctctctctgttacatcatgtatttgtaacttatcagcctactggtattgacatctgtttacatttgctcttaaataagccatcttattttgtcccctcactactctatcatttatttatttggttttgttcttgctttttctgttttcttctcagcttaaaacaaaatgttggctgggcacagtggctcatgcctgtaattctaacacgttggcgaaggtaggaggatcatttgagggccaggagttcaagaccagcctggacaatatagtgagactttgtctctacaaacaattaaaaaaaaattcgtggagcataggggcgtgtgcctgtagtccccgctacttgggaggctgaggtgagagaattgcttgagcctaggaggcagaggctgcagtgaactgagattgtgccactgcactccagcctgggtgacaaaatgagtccctgtcttaaaaaaaaaaaaagaaaagaaaaagtgctatgaaagggttaaatgaagtcttttaatcaggtctgccatttcaggaactagatatgaagtatgtgagtgtttgtggagtgatagtatgggatgacaagggttttggcttgctgtagtgtgcacttcatatggctaaatgctttgtttttgatagtaactctcttagaattagcatatattaagttttgctgctgtatgtatgtatgtatgtattttttgagatggagtcttgctctgttgcccaggctggagtgcagtggcactatctcgcctcactgcaacctgcacctcccgggttcaagagattctcctgcctcaccctcccaagtagctggtattacaggtgcctaccaccacgcctggctaatttttatatttttagtagagacagggtgtcaccttattggccaaactggtcttgaactctgaccttaggtgatctgcccgcctcagcctcccaaagtgttgggcttacaggcgtgagccaccgcacctagccttgctcgatttttaaaatca

SEQ ID NO: 57154 - DNA, 1459 bp, Homo sapiens
ttggccaagggagcagttatctcaaggtttgactgggataggaactttccaagctcactcatcagcttttggaaagagataacaatttttttgtcacaggggcttctccataggatagctcactacatggcagctggctgcctctcaaaaggaacaagtaagaaagcaagagaggatattgaagacagaagtcacatgttctttgtaacttcatcttggaaattatatcctaaaacttttgctgttttctgtttgttagaagcacatcattggttcattccacactcagaattgcacaagggtttgaatactaagaggcggggatctttggaggccatcttagaacttgcctattaacagcgtttgttagttatatatatttaaatgaacatgttagtcttccttcatggtcagattaaacaaaagggtgttgggttccatgtaaaagccagtcttctctgtgcaaatttgtaccagcatttgaatgattcccttctgtttcatttgatttaattttaaaatgtacttttggaaatttttgatacctattaaatttactgtaatataatcgttctgatgagtcttggtttccttttggttttacttggaattttagtgaattgaattttaaacgatttttatatgaaaaacacaaaaaagtatataaaccaaatttatagtttaaagaattacagtagagtgaccatttgtataaccaccattgtaagcacaatgcaatactgctagaacggctgaagcaccctgaccaccctttttggattgcagtcatcttccttgcccattaggtaaccaatattctgataattatggcagtcactttcttgcctttctttaatgttttgctgcctgagtatccataggtctctctgtttttgagcgttatttaagtgtgcttgtgcagtatgtaatcttttattcctatcttcttcggctgaatgttaagattcatccacatggttgtatatgactgtagttggttgatttttgttgttgtatagtattccattaagtgaatatgccccatttttgttgttggtcgtcatttgagttgttttcagtttggggctgttggcaaaaaaatactactatgttatatgtgtatccaggtttatgttagtatacatatttatatggaatgtatttagaagtggaattgatgagtcataggatatgtgtatcttcaaatttaatagataatgccaaaatattttttcaaaacaagttgtattagttattcttcctacaggcataggcattgtatgagcatttctgttgcactgtgttcttgccagtatgtgataccagtagattttttttccagtttagctaatcttggggtatatacactgttatatggttgtaatttgcattttccagatgacttatgaggttgagcacctagtactacattgattggccatttgggtttttttatgtt

SEQ ID NO: 57155 - DNA, 1777 bp, Homo sapiens
gcttacccttcaccatgaggagaaaacttaggaaaatttagataataaagccttaggtaggatatagtttttttcttatggtaaaaacatatgtaggcaaaaacaagtaaaaacatagctacctatttagaacttgggaggtctaactcatggaggatagttaaaaggcaattttgtatcaacagttttatagcgagcatgttctaatttaacatttataaaatttctcagtcatttcacactatacaaaatatgggaaaattaaatagtcaaaatcctgtgctctggatagcatgctaaaataactttgaaaactttttttttttttttaaatttctaactggctggaacctggtatgtttatgttaagaattgtctaattaggatactttttactcatttaaaaatgtgtaaattgtctgttatgtgctatgttctgggctatctttattctttttgacaataaatagataagagatgttttactggatgatgaagtgttgaatagctaaatattttttatgtggtttgtgactagatttttcttattctcaactgttgctaatttagttgtgattttaatattcctactaacaaacatctgttataaatttaagatttacttgtgtctcaggttttttttttgtggtaggaaagaagaagatgtccagtcattcatttgtttaaatgtctggtggtgcaatataaatggcaatgtgcatgaaagttgcctgttacggagcttgtggtgagccgagatcgcgccactgcactccagcctgggcaacagggcgagaatctgtcccaaaaaaagaaagttgcctgatgatcttgctaaaatgcatgttcagattaagggaggctctgttggagcctggcaatctgcatttctggagagataatggagaattcctttccaacattaattcttccgtgtgatcttcatttggcctttgatgtggtggcccatggcctcccacaacaccatctgtgatattgactttgattttatagctttggcatagtgtttttatatttccgttattaaacttctggatgaatcatgccgtagaactttttcgcttgattttggtttgaatctaagctaatgtttgtgattaatttttttttcttttctcttggaccatattttcttgtagtaggtgggttaaccaagaaacatactagttccaaatacttctggatatttgtgcctctagtgtacagtgattgtactgtcattaatacattttggttttcttgattttgatatatctgtgattgactttgagtattttagttttaattacacaagaaattctgaggagctaggtaacaaattgtaaacgtttatctactactttgattaaatttcttgaatttcacaataattggaattgggtactatagtgatttgtaattataataagctttagtctagaaaatatgttttagtgcagacagattgaagtgagtggttatattttcttcttccatgtaagtctatttgcgtgtttaatcttcaaaatgaatataattgttacaggtcttaggacctgtaatatggtttatatacttgaacttattcaagtaaaatacagatttaccaggaggcaaattgcttcttttgacattcaaactttgaaaattaacttcgtgatttcatttgtaacttttaattggagttctgttgagtgtagttttagacattgatatataccaatcagagaagttaaatatgctttttggatttaatgttaagattcatttaactcat

SEQ ID NO: 57156 - DNA, 1176 bp, Homo sapiens
gcttagtgagcccctgtgtgcctattatggcccatttctaatgttgccttctatatgaagtgtgcttgttaacattttgattgatctctgcgtgtatactttgtaaatctattttaatgatagtactgattatcacattatattacaagtactgtatcatatgcatctgtcttgctagtctgagttgcttgagaccttggattgtgtctttgaagcttggatccttatgagcttggtatctgtttgttgttttcaaaaatatttatacttgcattgtgatatactgggaagtatcagacagttgggtctatattctcagcattgtctcattgtatatgtcaccatgcataagttacttatgctctctgtgctaatacttcttcatctctaattggggaaaataatctgtaagatattgtctataaagtgccttcctagcctagtggtagtttccctttttaaaaaaaaaatcagttttttgtgtcagtttatatttgttggttgtagaaaaatagaaagatccaatttaaagtggttaaacattatggaaaatgtatcgattcacgggaaaagaatttctagaactagttatcagtggttcagtggtattgtcaggttctttctcttgttcttttcttccattgccagcatataccttggtcttttggctggctattcttgaggttgcaagatggctctaagcagttccagatatcatccccttatgaaggcatggtttttttctcctatcctttcctttctgaaagatagcacatctctctttggtcaaaattgggttacgtacttaaccccacatcaaccactggcaagggcatgaatgactagattgccttaggttagtcaaagtaatacatggggttggggtggaatctaacctctctgaaagttatatggcagtctgacacttggaaaaaagtcatgttattatcaagaaaaagagtaggatggtttttggatagttagctaaaagtgtcttccatggtatttttagaagaattacaaagaaaaagaacaaatgcaagtctttagtacttaactcatagtagatactcagttactcatgccttgttaccatatggggcatgtgatggtctcacatggtgaatgaggatttctctctcagcaagtgccaatagcgtcatcattgagaaacat

SEQ ID NO: 57157 - DNA, 1092 bp, Homo sapiens
tatatcagggacccctgggccatggactggtaccagtctgtggcctattaggaactgggctgcacagcaggaggtgaggggctggcaggtgagcgagcactactgcctgtgctctgtctcctgtcagatcagtgggtggcattagattctcagaggagtatgaacctgattgtgaactgcacatgcaagggatctaagttgcacgctccttatgagaatctgatgcctgataatctgaggtggaacagtttcatcctgaaaccatcccttccacctcccttcagtctggaagaattgttctctatgaaaccagtccctggtcccaaaaaggttggggactgctgatgtagatgacagactggatgtgaggtttaacaaaaatggcagcagttctgaacacctttaggtatccctgtgaagtgttatacatccctactgtttctgcttttgcggcagaagtgagaaagagtccatgggtctcgggaactcaggtttgttgaatattgagggcaaggggacaaaaaaacttgggtgtgatgcttgctgagttgggagtgaatgggtgaagagaatctgaactagggaggcaattaaaaattaagaacttgggaaggaatacatggaggagaacttttgagagaggagtggtaagaactagagaagagagacatgaatagggaatccttaagtataaatgataaatgatcggaaataataactagtcagaaccaactgtgaatatcagaaaaattctgcatgttaactaccctaagatattttaggaaacctttaatctgaatgttttgggaatgaataataagctaaagaataattttcaggtatgagtaggcatgaagtagggcactcttgggattatatatcaaaaaggtcaattctgcattttaaagactaatatgctcagagttagggtgtggtgactacttttgtattagattctgacctgctagtactttggtggcagtttgatttttagctcaaattgttgtttaaaataaattatgaatttgaacgtattcagctatggttttcctttttatctgctctaaaagtgccttagctacaatagttttt

SEQ ID NO: 57158 - DNA, 1063 bp, Homo sapiens
acgtgttttaaaccaactttgattatgttacagtcatattttttttcttgacatgtctttgtagatgtggcagtttaaggctgttaacataatggctggcgcataatttctgtcaaatgtttagatttagaataggccttactgatggatttgaaaacttctgcgtttattaattgttaataggaacttttcactcctgttcttagtgatgctggacaatcaggaccaaccatgaagcactaattactcacttgtggggataggttggagaacgcagtgaagcaggctaagaaggtcatggaaaaagaatacaggattaaaaagttctgtgttcttttctttaacactttgctcaatattaactttacattatatcatgccaggttaactcatacatcaaaaaaattttttaattttaaaatttacataataccgaatttatatattttatatatttttttctggttctttagtcttggaggaatttataattttaaccacagttatgtaaacagtgcagtagtgttaagtatgttcatattattgtacaattgatctctagaactttttgtgcaaaactgaaactcgtcactcattaaacaacaattccccatttccccttccctgtatcccctggcagccaccattctactttctgtttctattaatttaactattctagatacctcgaataagtagaagtatttgtctttttgtgactcgcttatttcacttagcataatgtcttcagtgttgtagcatgtgtcagaatttctttgctttgtaaggctgaataatactccattgtatatatatactacattttgtttattcatctatcagtatacactggggttgcttcttctaccttttggctgctatgaataatgctgctgtgaacatgggtgtacaaacatctctttaggactctgctttcaagtcttttgggtgtatactcagaagtggaattgctggatcatgtggtaattttgtttgtaattttttgagaaactgccatactgttttctataggggctgcactattttatgttctcaccaacag

SEQ ID NO: 57159 - DNA, 1036 bp, Homo sapiens
ggcaccatatgaagttcagtgcactgcaggctatgctatagggaattgggaactctttttttaaaagagtaaaaatttgtatttgagacggagtcttgctctgtcactcaggctggagtgcagtggcaccgtcttggctcactgccacccccgcctcccgggttcaagcaattctccagcctcagcctcccgagtagtagctgggattacaggcacctgccaccacacctgcctaattttttgtatttttaatggagacggggtttcaccatgttggccaggcaggtcttgaactcctgacctcaggtgatctgctcgcctcggcctcccaaggtgctgggagggattacaggtgtgagccaccgtggtcctgagtatttcactttctaagaatctcattagttaattatttctttttctggtgaggtttaatattcagaagaattaattaatgagaatctgatttaaaactcaagccaggtttgattttgtccagactcttggggtaggatgatatggattaggcaaggcccaaggaatcctttttttctttttttttccccccgtttggctgtgggtcttgtcttgtatgccccaaggtcaaactgtgaaccaattcaaattattctatgcttttatatttaaacgaagcccaagttcaaataatgataatttcttattcatttatgggacattttaaagatatgcttatgcttcacgttttattttatccttagaacaattctgtgatgttatatataacttatttttaatacaatactaattattttctcattgaggcacagagaagtaattttgtttgtcgttggacaggtaaggacaaaatgagaactcagatttcccagttctcaactttgtgttttctttgtgtgcaattagagagtttcagatctgtaagttcgagtacatgtatttagcccagtggttcttaaacggcacagattggaggagaagcagctgtttcataatcatatgagataaatgttttatccctcaccactcccttttcttacct

SEQ ID NO: 57160 - DNA, 1015 bp, Homo sapiens
agacatgctttttataataatgtaagtacctatcgtatgtatgtgtaaatatcttcttccatttcaaaggatgggccacttaggaatcggctgttgagacgactgtagtcaaagtctgttaacagatttttcacttctccaccaagtgtcttgaaaagagagaaccacgtttgttaaataacatccctgtgtcagatgtaactgtactatactggataacagagtatactggaacttctgacttgagaaatgctaggtatagacattttgtcgtcatagttggcatcttgaatgatacagagtaacatttagtcatgacatttgggatagagaggttagtcatatgaagtgaaaggtggtgttgattgtcttgcttgagagtgttttggaatttttattggattttagatattggtaggattatgagaagtaattgctgttagctagctgcttaagaagtggtagtgtttcgtactttcctttttgaggaaattgttgatcaaatattaggcatgtaggaagttggctgcttgcacagtcattatgagggaagttgattcagatcagggttgaagatggtctgagttggtgttattaaataagatagagctagaagttggaactgttaggaaagttattgattagacttacggtttctagttcctgcagaaaaatgatgtctttattcacctttctgcttttttgtacgttattctttatcagaattaatctgtttttcattgaacatttgggctgtaatatgattgttatttataaataagcagtttatggttggggctgagaagtgtttgcacttctacacagtcgatagtgcgagtagctaataagctaataaaacaaagtggggtgtgcataatttagttgtctttttagccactgtttgcattttaatttttagtatacttaacgaacacaaacatgttagcctccgtgtaagtacactaaaataaagtaaaagatgtgaggaataaggaatcgatcattgtcattcaag

SEQ ID NO: 57161 - DNA, 1083 bp, Homo sapiens
atggaacttgactttccagaatggcaagagccaatcctctgcctaatccttacaaagaacagacactgctttctccagaattcacttcacaatattggagctatggcacaagaacaaggtcaatgtcacactggaataatgaacatattaactaagaagttctgagttttatagtgagaatcaggaaatttcacacctacctctatggctatgttttaaatttttttatgattctaattaaccatctcttaaaatttttctgtgttaatgtgggagaaagaagaatggccacccaaagatgtctacttcctaatcactggaatctgtaaatatgttgtgttacatggcaaattatggaaagaaattatgttacatgagaattaagattgtaaatgggattaagattactgatcagctgatcttaaaatagggaagctatcctgtattatccaggtgagttcactgtaatcaaagggttctctaaagtggaagtgagtggcagaagatgcctcatcttcatcactgtcagagtgatgaaatataagaaagattcagccagtcaccatgggctttgatgatggatgaggttcacaagccaagggatgtcaacagtgtctggatggtggagtaggcaaaaaattgattctctcctagagtctccagaaggaacatagccctctgacacctttattttgacccagtgtaaaagtgagacctaccccaaacttctaacctgcagaattacaaggtaatatatttgtgtcattttaaaccacgaaatttgcagcaatttatttcagcagcaatagtcaagtaatacaatgtttattccccagtgtttaactatacagattactgggtgcatcatactcaggacatgaaccggttttattaactggaagaaaaacctacgacatggactctacaggcacctaatcatgttgtaccccttttcttcacacaaattaaatgttggaagtcctcttgataatcaagacacacaagtaacttggaagatccaataataggtcatgtttcaattagatgtgaagtaagttgtttgaaagaaaaacaacttagtct

SEQ ID NO: 57162 - DNA, 1048 bp, Homo sapiens
aaataggttgactgtaacccaaacacagaggttgccaaatctgtctagcttgcagcctggtaaaactgcctgtcagtactcctatggaagcttcattagacttactcgctaagccaacatgttggctaatgtgtataacaaattaggtcctatctcaagttccacttccaatagcattaggcaccccagttttattgaatgcaacagttgtttatatgactattggaatctttgaagcgcagccgcattttaggatgatacttctccaaatacaaaagttgcttgcttttaaaagctccactccgcttttgtcctatgaattgtactgcatcttcatgtttcattccaccttcaactgatgctagggcaacaagtactggagctttcccaaggcctacaatgcaattaacagcaatataacaaccaggttcttcacaaaacttaatttttacaaaatgtaaccaatcagcaacaatctggttggatggtggtgcaccatcaccaaaaggccaattgagaacatggataccttctttctccacaagagtagtgtcataagttgcttcacatactcttactattgtggtagctccatacttcttaagctcctctataaatttatttaaggtcacattggttggattgtgtgtaataggaaatctcatgttcttgtatgtgactttcacaggagctgggtggttcattcgaggtgtattaatttagttaaaaaatactcaatagggttatgaaataattaaaaaattgaatacagaaatgattcaaagaaactgaagtcgacttcaatatactccacttgaaattctcagtgctttgagtgtgaagttgtaagtaatgataaatgaaatgaacctcctaacaagaagcagcaattctgcaatccagtaatactgaggcaacaaacagacaagaagtgcactcaggtttaccccatccaggtcagaactcttataaaatgctctgtggatttcaattcaacacttttgtgtccaggataaccactcttataggggctttttggtggagtagt

SEQ ID NO: 57163 - DNA, 1077 bp, Homo sapiens
aggcacactatcttcctctctcctatctttccctcagtctcccaagttcctctaccttctttatctttgtcttttacttcttctttctgtgaccctccttttttggcctcctctttccccaagactttcttcctcctgtttctcgttgagttctccccactgaatgtgtgtatgtatgtacacacacacacacgtgtgcacacacaatgcacacaactcctatgactggctcctacttacattcaagttaaaaaggctgatatgaacagggcaggggaaaatcttaggatggttgtacaattgactggaggattttttccccttggaagacactattgatctcaacctgctgacttttcctaatgcttacctgaaggaacccatcctggctagaaagggtgatggtactggaccggtattcaaccttgagttttcaagctgccaaacaggtcttaagggaggtgcttatatcccaccaacactctcccagctcccatgtccccaagacctctggagtttcctcttgaatgtacatgaaccactgtaatagcattagacttttaattgagtgtgcaatcgttttccatggagtttggtccgttcattattttttagttaactacacttcttgatattcaaatgttctattaaaaaaactgagtatgaagaaaaacactttactactgcagaaggaagaaagaatataatatgaccatcttcaggtataacagtgttgtttaaaagagaattattgtatgattataaaagatgaaataattaactgaataataaaacaaagctattagtaagcattgggtatgtggatgttgtgtctttcagtaatctgagtgaactggttagactcatcagggaacttgttaaggttttaaaggttacacttcagattccagacataatgggccttatagtcatcattctaactggaaaaaaaaagaatcaaatatttcatagcaaattataaacttatcattaaataatagtagtgagtcccatcttctctctacaaccttctccaaataagtagccggtgaaatgtatttgttgcacagctgctat

SEQ ID NO: 57164 - DNA, 1046 bp, Homo sapiens
tagttatcataaaagatacttaacaatgtatattctcaaaattaaaactattatttcctcttcattacaaactatttattgaacatggaacaattagaaaaaagcagaaaaatatagagaagaatttttaaatcacccacaaatctattttctagaaacaaactataaacattattctgccaattttctatgcatatataatttctttttaaaaaactgagctcatattttgcacattttaaaaaagttttttaaaaaatcatttgactctattttgtgagtgatttgtcatgtcattaaatgttctttgaaacatgtgatggtttttggcatttagtattacgtagtattccatcatatgtgcataacatcatttatccatcccttctgctgagcatctaaatggattctagcatctgctagtttaacccaaagaggaacatttttaggctaattattttccacaataaatatatgtttaaactttaattgttgatgttgtttggtttatttgtttagtttgggattattgctattttttttcttcttcagaaacttgagtttatgtctaacactagttgacaatgagaagaaagttaaaaggtgaaaaaaggagttttttaaatggattcatgacactacagagaaagtgccactagagagacaagaaagaggaaagaagctcactagggaaaggcagcaggtgggggtgggtggtggggtggggagagagagggcttctctgctattataaaagaccaggacatccagcaattccaatagcgcagagaaatcctggatcagatcataattattgagtttgaagcactttttcctttctgagggcccacagggaacataaaatgggctctgcagacccctttccaggagcattgtggagagcttgaatgagaaccccatgaagagttcaacaacttaatttctaattttgaccttgccactaacccaatggacttggacatgtgtctaaactctgttatgtcatcctataatgaggaggttggtgtaggtctgtagttcccaca

SEQ ID NO: 57165 - DNA, 1041 bp, Homo sapiens
gcatataatcaaattttccttttaataaaatatatgatttttctccatagcttagaaagatagatgctcacacttctctgatgtcattgagctttttcatgggccttcttagataaacaagatgagaatgctcctactaagtagattaagaccaataggaagaatcctccagcttctcaatggcagtttctgtgggcttgctctctctttttagcaaagaaagtggagcacaggaggggaatatctgctaggcaactatattggcaaagtactgaattttccagacctcaaatatcttcttagtttttaatttttaatattaatatttattcattcagaaaaattcatcaagcaccagctataatgcaggcacttatgataagaaataggttaacagaagccctcacagtcaatgaatgcctgtggttatctcttatgtccaaaatcacaactgatctgatattttatgtgctttccctttctaaaattaaaaaaaaaggagctaggatatgttcattatagaaaatttcagacctgattttttaaccgcctgtacagatcataaaatataagcgaggactttaaaaaagattatgtattgatgtatttgtttttgccagcctgttttctctggaatataattatattaaaaagctggtaagaatgatgcttttggaggaaaaaagagagtacataaaaatcagctttggagtttcttcaacataatactttgtccttaatttttaattatagcagtataagagattatatccagtgtgttgagaattgatgttgcttaatgggaatgtatattcttccctagtagtatatgtattattcatagaaaaaaatggtctttatgaaaggacagctggtcctttaagagacagagcctcatgaattagagtagctgctgagagtagttttgatttgctgcctgcagtgcacttacaggctcatttcacattaatagaagatgatctgtgttccttcctgacctcttagaacctaaatcacagatggggttattgaagagatttg

SEQ ID NO: 57166 - DNA, 1085 bp, Homo sapiens
ggtgggtggactgtatcagtgtctatcacctggttgtaatattgtgctgttgttttgccatgtttccattgggaaaaatggggtaaaggatacatggtataattctacattactttttataactgcatataaatctataattatcttaaaattgtaacaatttaattaaaaaactatatatatatatatgtgcaccattcatgtcatgtgaaatccattgcccatgtggcttaggattctgctctaataggaaaaacaaatggttttaaaacaaatctattaagaaattattacatgttaggcactatgataactaggcacattacatatattattctcttttaatcagttcatcaaccttataatgggtatttttattatcctcctttgatgcataaggaaatggaggtttaataaacttaagtagcttactggtgcccacccagttagtaatttcaaagtgaggaagcaacccaggcagctgactccaaagcctgtgcatctagtcaatatgctgtactccctttgagctctgccaggcaacatgtttgccttgaatgatatttaagtcagacaggtagcagtgtcttgacttctcccagtcatcatttctttcatcctttgaagctcagtcccctatgagtttatctaactactacacttattatgagccagttttactattgctagtatatcaagtttactccctgctatgtagagacatatgtcttttaaaattgaactctttctcttaggtttctgtgggagactcctcactctctccatacccactaattaactatcaagattaggtagagcttctctccataagctgtttgtgcagggcatgtaactgactattgatgaatcctgtggcgagacttgggagactgcagcaaggttcggagggccccaaaactggcaatctgggcacagcccagcttctggaactggggcaatattttggtaagtccactgtaggtgagagcaaaaaggagggtgtgccaattaggtgcactggcagggggaagatagaacaagtaaagacaaaaatgagcccagctcaggcactgacacatctaaag

SEQ ID NO: 57167 - DNA, 1046 bp, Homo sapiens
ctttcctaaaacccttatctgtaagtacactccggcaagctcgaaagggacagcaggggagccatgtgtgcgtgcgcgtgtgcggagaaggaatggggagggacagttgcatttgcagaagcaatcctgtctggaactaagctgattagtcctggtgccgtccctccctccctgccccacccctcccatcctccctgccccacccctcccatcctcccttagctccctcactcagcctcactcagcccctgcagcaatccagagactgccctctttggcaactccccaccacctccatcaagataatatccttccctcagggcccttcacacctctcagtaacctgatcaactaatttgtgttaaggtattaatgactaataatgatttaatgtgctgccctcccaattaacactagaacatttcaaaagagaaattcacagattttaacccaagtgagacatggtgcttttccttgttgagaggaattgtaggcccttcaaaacgaaccatacagacagctgctgattctttacatacgctgcatcactcctgagcttagcaatgtttggaggctttatgcaaaggctcaagcagaatttcccaaagagggctgctctgagctacaacccttaaagaacgcaccagtacaggcttaatgaagaaaagaaacctggtgccgcaatatcatgtctttagaagtttcgatggtttttttttgctctcgtatgtgacgacatggtcattgagagaagaggctcaggcatggtgaacttgggttcaagtctttggcaggctctgctacgtaccatgtatttgatcttgccaagttactttactacattagcctcaggatgcacatctgtgaaatggatgtggtacaactcacagggttagagtatgaaatgaaataatgcagaattagtactcatcaagtctgatatgtagaatgctccataaatgacagttctttttcttaaacttaggggttttgttgttgttgttgttgtttttctttttttttcttttcttttttttctttttttg

SEQ ID NO: 57168 - DNA, 1038 bp, Homo sapiens
gggtctcctgtaaacctaatttcctctcgttacttttcatctttggtgggaatcttcatcaatctcctaaagttaagagtgttctgatttgaatctcctttaaatggaaagggttgactttttgtggtagagacaagagacccgggttttttagttgatggcccactgcatatctcatcatgtctctcagtgtaccaggtcatgcacacttctgctgtaggtgaatgggtctggtaattatcaaaggattagtctaagaaggaaattatttacagaaatataggtgtgagattagggaaacccactgtgaaagctgtttggtttccaactctgtctaacttatttttttccccttactactgcctggatctgtgcatacatgttggtttgtgggaggaaatgagcccatcctagctctagtcttattaagaacatcactcatctccctggtatagatgagtttcaacttttattactaccaatgaccaatggctacaccttaagcttaattttggattatttacagtgtgagtgagaaaatgaagaaatgtaactctcagaacatttaaaacttattttacccaaccctttctacaaatatctaattatgagtaatgaacaaaggcaaaatagatcaggttttatcctgctctgccaatatgcagaaatgaatacgcagtcaggtagttgaaaacataaagtagagaagccaatatctcaaataactaaaacacagactagatttaggagctatctaagattgaataacacaagaataactaagatttgactgaagtaggagccagcctgcaaagaccgtatggtgaatccattacactgaacataacaacctcacaatagcaaaccactacccatgaggggtagaggaacttcagaggaggaaacccacctgggttgtgaagcgtaaactgcttatggatccagttttgtgtctacaggcagtgtggtaaaaactggggcaggttctttcttctccctttctatctgttttaatgatgaggatctcattacaaacta

SEQ ID NO: 57169 - DNA, 1102 bp, Homo sapiens
tggtgattggctttcctagtatttgttccaacctcaaaaatgtggatttctggcatcctactctgaccaccacctcctcacttccagttcctccctctagaaccccaactctgaccatcatctggcctcaccaggttccctaatccatatactttttcgttgtccatcatgaccctcaggttccccttttatccttcctttcccagcctgagtccatggtccctgttcaactccctggctctcgtgtttctccgatgctttcccctggcaaaccccagacctgataaaaatctactcaccaattcaggtctgcatcctggcaccaaatctcagagtgtggctggataaaaatacatagctgacttactggtcttaattttatgcacagagtgcaagtggattctcagtggtgcctggcagtgctgcctcatttccctagttaattcactttcctattctttgagaggctattttacaccttctctctccaaaccaactccctctagtatctctgcctcctcactcttccaataggcacagctcatttctgcctccagacgtttgcacttacagtcactctgtcttctacatttccccctgccattcttgccacgaaaaacccctcaccggattcatttccacttctcaaagaagtattccctgacttctctgcctaaaatagcctcccatccgggccctgatgctctctatcctctgacccttccttatgcacttacccccgctggcattacatgatgggtttatttttgttctcttgtctccctccctccctccctggtgcctaggctccatgcaggcagcacccttctggtctatctgtttcacctctacacccactacaccagggacagtgcctggcacacagccagctctcagcgaatgaaccagtgaatggatgagcagaggaatgggtctatgttgtatatttttgaactgctgacttgggaggaagtataaacagggattaaaagttcaagctcttgattcatactagacctagactcaaagtctggttcttgagacggagtcttgctctgtcgcccagactggagtgcagtggcgcgatctcagctcactgcaa

SEQ ID NO: 57170 - DNA, 1071 bp, Homo sapiens
aatcccttcacctgtagtggggagaagggattagagaggaatggacagctaggagttcattaaagtccaaatgaaagatggttgtatcttggactaaggtggtggtgatggggaaggagagaaatggacagaaggcagagctatgcaggagatgaaagtgaaaggacttgatgttaaattgggtataggggtaaggaggaggaaaggagagggaaatgtcaagatgactcctagctcctagatgtttgagaagagggacatcaaaattgggttttggcagtggagatgggctatgatggggcaaaaggttaagttttgtaaatattgagatttacaggacatgttaaatacctgtctgggactcagaagagagatgtggcctggagatacaactttgggaatcatttgcatgagggtgatattgatgcctgtggtgtggctgagattatccatggagagtgtgtagggtgagaaaagaatagggtataggctagtcttgaacatgtttcctttcaatagaaccatgtaatatttcataactgtgctgtttaccactaaaagtcttagaaggggtagtttggtgatttaaaataagtgccaagtgaatataaggaaggatgcactgcacagttgcaaaagcaccgtcctcttaatgaagggccagggactgggactctaattccagctctttgatcttagtctagttacctttttactgttttcatgtgaaaaataaggatcacatgttttctctaccttgcatggttcatgtgagggtcaaatgagataatgtatgtaaaagtgctttgcaagttattttcataatagattacaaggttgacttttaccagtgtatttaaattcattgcagagttcaattcatttcattttattggagcaaaaaaatgtatattttttcagcatatgctgggctgacatggagcaaaagaattgtttgatttttaaaatgatccgtcaaatatttttacattttaactaaagccattgtgctcttttatacagaagaatagacagagtgatgggagcccaatgatctgatgtacttcaaag

SEQ ID NO: 57171 - DNA, 1034 bp, Homo sapiens
attttgtcttatcttttccaggtttttcttgatagtaggaaggatgttttcttttattaatcctgttgatacctaatgcttttgcagtacacaatttgtgtttaatgaatacacacgagataacttaaactctaatttttctttagaaattgaatttattatagtgccattgtggaaatgaatactagatctgtttggtgatgtggcaactgcactaagtttcttaaaggaaactgtggttccaggatgggcttggaagctgtagcccagaactatgtgggcaccgcatccctggtgggttggcaggaacaggaagcccgcagccagaaaaaacattgttccatggtgccctctagtgagccaaggcgccaccaggtcagaagtcagggccagaggccctccaacctcggcaggaagcaggatcatccggggagcctgacaaaactgtagatgtcagtgctccttcccagaatgccaagccagcagggagatcaagcccttcaatcagcatcttcagggatctgatgcacacagtcctcagatcacactttgtgaagtactgactaggtgatgctcatcagaaaaaaactctccagatacataatctgagaacacccacgcccattcttctgctcctagggatggatcactgacttcttgcttactactcaaggatggatttggatgagaaagacagagagaggagagagagagagagggaagaaacagtgtctacatctctggtatgaatccagtacacacaagaatattgagcagcaaaaaatggatggaaacactgagcgaatgttttagggaggattgtgtcaccctcttttgatacctatctccaatccaataaagcactaatgaagagcgctactttcctcattttgtacccttcctggcaacaagggtggggaggtgcctggcttttatcaagcaaaccatccacggccaccactatgtcagacttttaaagtatatcatctctagaagtccctggaatcatagagagtgaggcattctttgtacca

SEQ ID NO: 57172 - DNA, 1021 bp, Homo sapiens
ctctcaggccacagctccggccacagctctggctcctgctccgcggcggatcccacaaacccggcagccacggcggtggcggtggcggtggcggtggcggtggcggcggcggcggcggcggcagcggcaggcggcatcccagggtgataggctgaagcaatcgagggccgagagcccggccgcgtgtgcactcgagtaacgaagccggggagggactgcgccgcaggcaggaaaagtcggacaccgaattattcatccggcctgtcccgcctactttccaagtaccctcccagggatagccgggtattgagcggtccgggtctctgctgctcaaagtaaagaccgtttgagaaggcggggaggtaaaagggtgcgggaaatttaaacagaaaagaaaggagcttcccttccttctcacacctttcctatttatttgtttctttctttctttatgggccaacgtttctttcttattggacaaagagatcgaagaagctgctttatcttacagtcacccaagggggagcgccttcttccttcccagagtggagtggcagtgggtccgggattctgggatatgcacagggtctgcgccctgcgccctgtccgcgctgaagctgaacttgtcattggtttgcaacagcatggtgaagaagtgtggtgtggatggacggacgggcctctcaggcacatgaaatactcaaagcccagtattaaccaaacatgtttctctgttttgtctttgatctttgtgcagtgtgttggcttttttcctttaatgatgtcacttgtattttatttttggtttatttgtagactgtctccctccttggccatggctttacttttatgtccacccaaggagagtttcaccagtttaggtttaagaaattactgacaagttaacaataataatttcaaaattgaacagtaataacttaaaccgtgccttggacatagtagatctccaacagtttttcttgaatgtggctacctaatgtggaacaagatttttcataat

SEQ ID NO: 57173 - DNA, 1594 bp, Homo sapiens
aatgtttcatttgttttattccagtattataagttgtgcccatgccttgtcaagactataaaatttttgatatcagggagccttgtttatctttgtattcttatcttgccacccccttcattgtcaacttgtctgccagattggtaccttgctcatagtaagtcagtgtctgttgtatgttgatccgtttgtcctttgaccatccagatctcaacctgactgactgtatgggtggtagagtagcttaaacaaaggcatgccacaaacagctaaatatggatacagaatccaagagcatcaaatgcagaacatttttcagatatttatagcctcaaagcaaagtcaattggctgaaaaagctcagcagcatagcgaaaggaaacgggagtggcaaagccagcctcactgtctgtgctttctggtaaacaatgagaacattaaaattaaatactttaccatgaatggatggggagtgtaggacactctgggagaaatttaagatcccaatctctaggattgcctgcggtggagctctgcactcatcagtatgacaggtctgcaagtatgtgctcagatatgctcttggagagttagaagggaaatataatcagcacaagaaagggatcaacaagaaatcttgtacttttaaattttaatattatcagaaggaattaggtaaaatattctgttaagaaaatgaatagcatcaacattattaccattaagcttgtatacagctcattgtttattgataacaacatagggacctgctggaaaatttcaaagggctagtactatttaagcaaacagaagaaaaagggaattaatcatacttcattaagtaccttataattccagaaatgtggcagtgggaattcggtaagaattaatagaagttcatattcaagaagtgaatatgagctgatgagacagaagtcatatctggttgtattatatgatactgcttacgcctcaccaattaagacacaggatgagatttttaaaagttacgtttctagaggttatgtctctaaatttatttaaaatgttgcaactagtatggctagaagaaaatcagtgagtgtgtataaaatacatccccaaacatgttcatgttccttaaatgtcttaatttcctcaggtactgttaattgaatctttacacctgagtagtcatattttagaaatttttggaatcttaagcttgagttcaatacttaggatgtggcataggcttgttgatgtattagtttccaatgatttccaaatacattaaaacacattaagaatagacagtttttcattgaaatcagagagaacttctaagaatgcctaggcatgtactgtttaagtgactttaaatagcccccttttttcttcttttgagagaaaatttgtatgtcttatttaaattgtgtgctctattaatgtaggtgatagtttcatttataacatcttagtattgttctaccctctatcatgttggttcactgctatttgattttcaaacagtgaaaatatttttaaggaatagaattatacatccacaatctcttttccaaaaccatttggactagacagttatgttaatatt

SEQ ID NO: 57174 - DNA, 1019 bp, Homo sapiens
acttcttaaggctagcatgtagaaaacccttttgcaaatttcatgtagtttattttatagtgagagggcagcccatcaagaagtaatgtggttcacaagtagaagggaaaagagaagtcttgaggcccagtgcagtggtgttagtgagtatacagtaaacaaaagaaataaaaattgaacccttaaaggcataaaaacatttcatttgctagactatgatacagaagttatcactttcctaatctctacagctgggttcagatatgagctgtctgaattttaccttcccttaccaggtgttagtaacatcaattaattgtctttgttggctttgctcataagggttcagtttagatcctgattgtatttttacccctccataaattatcttcaacattgctcgagttccattcacattgtgtcacttgtagcagactttctaaaagtaccccttacctccatccctgagtctaagggattggtaatacttatagatattgattgagagagtgaaaatttagtgaggggaaaacattcaacatagataagataacaaaattcggaagagtagtctgaaaagttaaaatgaaaccttaaagtcaatagtttttgatatttttcaaagcaatcctttaggttttctcattgaagaaactggctcaggaagtttagcttattcccaaaattggagacagactccacagtttgtcaggattggaactcttaacctcagattccttagcctcctgatttagcttctagatcttgctgccttcccttagggagatggcctctcaaagctgaaggtcaggaaaactcgacagtgagaaataccagattgttagtttcacagtcttttaagggaaatgctggaaataccattacctaggtaacagaaaacaaaaatggacaaaacatccataaagtaggaggatgaaaataatttcatagtaatccttaagagatagaccagaggacagatgagattttttttttcatatttttcctaagcttattat

SEQ ID NO: 57175 - DNA, 1016 bp, Homo sapiens
tctagcttgataacatgattaagaaaaaatggtatcatatggtgatttctattgaaatagaaagataccccagatacagtcgatttcttcctgttttgttcaggtcagaaagtcttcagtcattcttttgcaagttcaaccaaaataagcttaagagaacattttcagttatttgcattttaggttgtagttttggtctatactgagattgtcatgccagagtgtcaccttgagagaggcttgactttgtaatatctattagctgatcatctttcttttcctgtagcttaactagcataataaatttcctcatatatatccagtaatattattctgtttacctgtgagcatattgtatgaaattatatgtttttacagagttgctttttccctacaatcttgaaaaaccttgcatttttttctgtcaacaaacttattaaacatgataagtcatttctccattttatcagggaaataattgtgaaaaagttagtgactcctaacgattcttggtgatgtgagatgattactatttgactcccaatccagtagtttcttttgaaatattaccctctattattgaagttcacatttactgttttaacatatttgtgttaaaatgtattacaagcatttttgtgcttttctaagttgtcttagaatttaacagtatgtcttatcctatcttctctgcctctttgagacccatgtggatagtaacagatattgagttctttggtgaactgcaggaataaaagtgaggatgctagatagagtaaccaataaattattttgtgttttttttattatggtaaatatagcaaattttcattttaagtttgctatatttaataagtatacaatttaatgatattaaatacattcataatgttgtgtaaccatcaccactacctataccccaaatgttttcatcatcttcaaacttcccattaaacaatgactctccctttcccctcctcttagcagctggtaacctctattctttctgtctccct

SEQ ID NO: 57176 - DNA, 1294 bp, Homo sapiens
tgaaatacacaaggttatagatgaagaaactgaggctaaaataggttgtgatttgctcagttagagactaatccagtggttgatttctcaacctctcttctaatagaaatcaagtatttctgctttctcttcatcattggttgttttctttttttttttgggatggagtctcactcttgcccaggctggagtgcagtggcgtgatcttggctcactgcaacctccatctcccgggttcaggtgattctcctgcctcagcctcctgagtagctgggattacaggtgcgcaccaccatgcctggctaagttttatatttttagtagagctggggttttgccgtgttagccaggctggtcttgaatttcctgacctcaggtgatctgcccagtcagcctcccaaagtgctgggattacaggcatgagccaccatgcccagcccatttgttgttgttatactcttttcccccaaccctgaacctctctgagtttctttcatgttactctgtgtatagcttaaaacaaaacaataacaaatagaaaaaaacctaaccccactttttttttctttgccatttttcactgacatcacctcatttttggctttagtcttcctgataactgttttctggttttttttctggaggcttttggaggctctttaagagctcagcctggctctaggaccaagtcattgttagactgcctcgtttttatttatggtattctgtatcttgaaaacaaaggacatgctgagtcttttcaaaggagcgtggaatccatggagctgactctcattgttactgctgaaatagtgactgaatgtaccaccagcctgagattcatgaaatgtgcattaaaatcggtttggtatgttaggtgaaatgtaaaaacatcagtgtgctttatcaccgatctgtttttgtctggtgtaagaaaaaatacgacaagtatgggattgtttatatgtcttataaagccaacactggagtgtaaaaaattgagtgtttggggatacacattaagtcaaaaagaaactaatgctgcctgctttgactgtgtttgggtcagaaatggagaagttgaaattgacatggccatttgctgaaatattttgaggtgttcagactatagtaggaatgcagtcataatgactggatttcagaaatgacactagaagtcatttatctatttgcatcctagaacatcaacttaatgtgtgtccaggaagaaaataaatgaagactgattcatgaactgactgtactatttgttagagccaagtatgtttgtggt

SEQ ID NO: 57177 - DNA, 1041 bp, Homo sapiens
tttttcacaagggaaagattaatggtttggatttgtcaaattttatagcctagctattcatcataaaatgaatctgtaatacttactttccatttttttttttttgctcacacactactttggatgattttaattgtatagtatttaaaattaatttttagatcttagatgagttgaccagagactagtgataataccaagtatggaatagtctagggatagaaaaggatagaatttcatgataacgctatataatgtgtgtgccaaattcagcatattgaccagtgttttacaaaatgagtttttcagatcatctatctaaaaatcacctggaatgcttgttaaaaattcggatccttggacccttccttcacccatctctcaccaatcagaatatctgggagctgcctaggaattgcatttaacaggcacccaggtaatttggatatacattaaaagtcgagatctcctgacatagaacattcaacatgttatacgtattgctcacctgtttaagatgattaaattatgagatctttgaaggctgagagagaacgagggtatctgttttcaatttatgaattgaatgaatttttggagttttaaaagctaacacataattatagcattcatttcatttattagtttctcctgaggacgaaacttggccttgaattttataattcagggctttgaacatctaatttttgtttaaccaaagtagaaagtactgtaatgcttctaaaaactacatttacagttcctgttgcgctaagtagatatagataagctacatgttcaaacttgctttgtggtccccacttcactgtcctctctcctagagctcttccagatgtcaggttttctgaaattgatcctgaatttaaaaatagagaagtgacagaaaaaaatgtgaggttttaaatttgatgttgtataaaaggtaatatttttgttttttctgtcacccaggcggaatgcagtggtacagccatggctcattgcagcctcaacctcctgggctcaattgatcctcctgcc

SEQ ID NO: 57178 - DNA, 1043 bp, Homo sapiens
acatttatttgtatttaatttttaatgtagttgaaaccattggagagtttaaatccacaagggctataattctgctttccaaaattttgagacagtaagctgcagttaacttccgtggaggaatttatttttctcttgttattcagagtcttagaatctaatgtttattagtttcaggattttattcttttttcaaaagccagagaataaacttgggtagaagggatccatgtagatctatgattcttctcagtaagaaacttaaaaataactgcagggtctgagacagaactttcccttctctgttttgcttctgctcgcagaattgaagttatattttcctctgtcctctttctcccaattactgcatttttaaggaagttggggattgagcatttgaagttagttctactgtctccctctgttgtttttctgtggagtgtggcaccgtttttactgtgctgaagcagattttctggaacatttctaaggcacatacaatcccagctgctttttttctgttggtgctaagagaagtctattgcctatgcttctgtcatctgaggtatatagtaggacataatattgggcactaatttattagcaaagctgttaacttttaaatgactttttaaaagttttggaatttcatttcacagaatgaaaaattttgtcagtggttttaggaagaaagcctcagatgcttactgacgctttcaaatggtcaacaaaaagtagagttaaagattttgtgaaatgatttgtttgtggccaaagaaatcatgattgtgactcagatgatttagttaaatgtataccaaataactttttttaaactgtggaagaatatataaagaatctaatgttggtactgtttttagtcgccatttctgcgtcatattttatagagattgttcttactctagtgagggtgatttaaagggcaggtgttctggattgccaaaggcattgtggaaacagagatgctctcacttctttcctgctcagtgctttccagaagctgtcaggagaagtgccacgtg

SEQ ID NO: 57179 - DNA, 1013 bp, Homo sapiens
ttattttctagtgtcttaaaaaataagggcttttaaggaaagagagtatttctcttaaagttaattttgatagatatttatctagatgctttcttttttcccttgccataatagctggcttgtagagagagttatgtttgaaaaggcttgccttttttccgttgctctgagcaggattatgttagggcccaaatagtgactttgacaaaaaaaaaaaaaaaagggggagtatattagttttaagtttgacagcataaaacaaaactcaaaaataaaagtggcttaaacaaaatagaagtttatgaaagaagactggagacaggtaggaacgggtagtcattaaggaccagtttcctcttcttcctatcatcatctggcatggccagttgactttatggacaactgtgcctacaggaccttctgccattgcatcagtatccttaggtagcagcaaagaggaagtggatcaatgactccacccttcagttaagccaactacctataagtgactttcccagaaagtcccacacatttgcacccattagccaaaactcacacacatagtcatacctagctataagggaaactggaaaactaacctagatgaattgctactccaaatcaaattggggatccattattgaggaaggaagagagtgtgtattggataggaaaatagcattctcttctatagtgagagaagtaatagtttttgtttctactgagatatgataggtaattctgcaaattttattgattattgcaaattttcagtatattttccattagcaaggtgtcttttataaattcctgttggaaaaaacacagacagttgccatggacttgtattcagagggctttaaaaaggtacttctggaaaataatacagattatactttgatttttcacaacagagaggaatggttgtccttatttacttgttatattcaagctctgtagtcctaagaggattttgagtttatcctttgcaaactgacgtaggcgaagccttg

SEQ ID NO: 57180 - DNA, 1020 bp, Homo sapiens
catatacacacaaatgcaaacacagtatgttttatttagaaacagtggacatggtgattgagttttttattgagtcaacttttagagccagagctgtgttttattcatctttatgttctaaaaattgatattcaatgaatgtttgagtttcagaactgaaaggaaccttacaagctaaagtagaccttactgctaattttacagataaagaagctgaggtccagagaaagttaatgtctcttgtccagagttgccctgctcactgtcttttaaccatgaccaacataaacctaatacttggtgggtggtgtattttaaaggctttagtcatagatgagtagatagcgggaattacatttataagctgcatttcccccccatctttgtacgtatgtgcacatacatactcaccaaacccactttacccaccttcactgctggtatcagcaaacccagtttccctgtaagtgttccctcatctcaccaaagccaaattgattgtttccggcttcctgaaagtaaaacgagacctgtcccttgtgctataaataagggaggtcagaggaattttttaaaatggattgtgtgtttgtggtcaatctcactgttgcaaaatgtgaaaataatagctgtgtaacacaatattaatgtgatcatttaacttaaaattcaaggcatgccatccaagtggcaacaattttcaggtgaaagttttctatgaaatgatagatatcctcatgggactaaaatcctcatggaactaatatctcttggcttgtacctcctcaaagggtaatgatctcttggactatttaatagttagcatccttatgatatacccaaaggtaagcaattagtgtcaattataatgattaaaaagaacatcttttaaaaataaacttatgtgagtaaatgaagccagttgaaaagtcaaccagatatattttgtatatcttatctaaaagagatgtaaaaataaatgaacacttcctcaaaatacaatcttctaataagtagtgt

SEQ ID NO: 57181 - DNA, 1006 bp, Homo sapiens
ggcattattgcgactctaaccacaatttttaattagcctctcagctagtagtatctagaatttttatgcacaaaatactataataatcctgaaaagttactttacttaaaaaaaaaaacccacaatttattctgtatacaaatagccaaagacataattgaagctggggagaagaaaccactgaaatttaattctgcttctcaggtttcatatcacataagaaacagatacacatttcttctaagttgttcgacctaatgacataatgctattcataacattttcttatccttttagtgtttatggaatctgtagtaatgtccccatttcatttatgatattgatactttgtagcttgtctcttttttccttgattaatctggctaaagatttttcagttttattaatcttttcaaagaaccagctttttgtgttactaacgtttttatgatatttaaaaataaatattaatgatagaatagtttttgatttatagaaaaatcaccaagatggtacagagttcccatatgcttcacacccaatttccctattacttatattaacatccttattaatatggtacattcatcatacttaatgaaacaatattaaccattattattaaataaatttcctacttgattcagaattttttttttttttgaggcagtgtctcactctgtcacccaggctggagtgcagtggcgcgatctcagctcactgcaagctctgcctcccagcttcacgccattctcctgcctcagcctgccgagtagctgggactacaggcacctgccaccgtgcccggctaattttttgtatttttagtagagacggggtttcaccgtcgttgatttagattatttttacctaacattctttttctgtttcaggatgccatctaggataccacatttaactttggttgtcatatcttctgagatccgatccatcttggcatcttggctgtgacagtctctcaggcgttctttattttttatgacct

SEQ ID NO: 57182 - DNA, 1069 bp, Homo sapiens
caaatgctgtcttgtcttcaaagctttccttgactttcccaagctgacttgggtaattcctagcctataatcttgctgtatccccaaagggcctctagtatagcaactgtgatatcaattcatttatttcatttaaagaaaatgtaaaaatagtccttaagacctagaaaggtttgtggcacacagacaataagtaaatgtttatttaatgaatgaaataaaaaacgaatgaattgtagcaaaatcctgaggctttaataacaacacacactggataaaggaaaacttcattttgcagaaagaaaagacagtttctcagtctcaaaagacttatgtgaatctaattattataaaaataacccttgatagacacctgaacacatgcatacatttcataactgtataacacagactgtggaggtgaaggagcatatggacctaaataaaaactcaagaccccttaagagaacttgctagcaatgctgatttaaataatttttaacagtgagggggtcggaggtggggatgggaaagggagttgaaaattaatgcccccagagtttcgtggtactctgtgctatcttttttcttttccctgtccctccaactgttaatatttggtatcttgttatactacttttatttcagtaaatatttgatgacagtctattatctactctgttaggcaccttggagagtacaaagagaaatgcatgaaattaactaaaagacaaaaaaatgcattaggtagaagtgcaatagcacatgaacgaagaacttttaaaaatatgaataaattattttaaaattaaaagtgttcaaatacagaatgcttttcaaatctgtgtttcttctgaggcagtctatggatatgcttaggacagctgttttagatgacacatctatataaatgtgaagtagatttattttctttaaacaaaccattagtgtatgtgtgtatatacacacacacatacatgtgatgttgaactagcttcatcaacttctcaataaatggacacatttagcttctaaaggtagaaacgagtctaaaagggaagaagatggt

SEQ ID NO: 57183 - DNA, 1780 bp, Homo sapiens
ttacttggtatagagaaaatgactccctgtagtgcatttaactgcttcctcacccatgatctgtattttgatgtaatcttcatggtatcagagataatgttaaactcaaataggtgcttactgactttctcattactagtctgaagttaggtagttttattttagatctctctctttttattaattaattcaacaaatatttattgtgtgcttacaatttgctaagcacttgagacactatggagaatcaaaacaaacatggatgttatagcctagtgggtaaaacaggcattgattgataatttcacgaggaaatatacaattacaacgccacagctgtgatggagagatgcattgggctgtaaaggcctgtaatagggagatttgacctggtcagaggggtcaggaaagacttccctgaggaagtgacacttgaactgaaatctgaagcatgataatgatggaaggaagatcgtataccatccagttgcagagaacaggatgagcaagagccctgtggtgggaaggagagtgacaggtgtgaagaactgaaagaattcaagtatgtctttatgagggagccttacaagggtagagtgggtatgagtaggctcataccaaaatcaagaattttgtcttgattgtaagtgggaaaccattgaatagttccagacaagatgaggtaaatttgtattttgaaaagattattctgactacagtaggaaaaatgttttttggtggtcatagtagatgtaggttgataaatttaggaggctcttgtaatccaggtgagagatgatggtagattcatttaggggagaatggtgagaagtagataggttggataatactcaggaggggaaatgagtaagattcattagatattggatattgaatggtgagagatggtgataactaaggtttggggcttgtatagctggatgaatgtggtcccatttattaggataaggaacactagaataagaccagattttaaaagaaagatcatagtgtaggttttatacgttttgaacttgagatagctattaagtgttaaattgaatatatgagtatgttgctcaaagaagacaaagtatgaactggagatataagtagatgtgttaattgtgaatgatgatatgcatggtgagaatatggacagaggatgtcaaggatccagctttcaaagtctcccaacacttagagactagatagaaaatattgaacctctgattgaaccagtcagaagtgtgatcagaggttaggggaaaactagaattttttttttttttttaatatttaaaggtgttcattatggttttaggagtttttgtttttgtttaaaaatgatttcttatttaaataaatcttttattccaacacttaaaaaatctttatttggcccttctagacgtatctttgtctcttaaatgagaagcggttgtgtacatgtcaggtgtgcctttcacttctgatacttagaagaaaggtagttttcactgcaggaagtgtttcattgggaagcatatgtgctccagtgataggaaatgggaagaggatgttttgttattaattatttagctttgtataaacaaggactttgtacttttgaaagatgtcatcttctggttaatataaatgagttctatttttaaagatttttatgagttgatctaagagctatgtagtcacttgttctagtaacagaattctagaactctctttgttaaccgtagcatctatcatgtattctaatacaaaagagcaagtgggatacata

SEQ ID NO: 57184 - DNA, 1635 bp, Homo sapiens
ttttccctacagtcttgacttttgttaagaattgtagagttctcattaacactattaggtgaatcgttcatacaaagtttttaaaaagtcttccaaataagaaaaaacaaattcacttacaggtaaaatatttcccattattttatttccttaagtcaaactctatatcctaaataactaacttcactaaaatatcaagagtattttataaaggacttgctggattaactgacatgattaattcccccaaatttctccactccttctgtgaaacctactgactgatgctaatggtgcattgaacatgttggagaggactgctcttcaacatgcccacttacttctgcacccatcagttgtaagcttatcataaatcagtgatttgttcccaaatttggcagtttgttcttgttattgtacttagactgatattcagtgtttaataaattgatgaactgtgaatgctaaatagaaattgttgttgttctataatcttggcgttagaacagtctgaatgtgagatgcagtaaggagaagagccagaaggtgtggaggtcattctattcatacagctccgagctccttgctgctgccatcattattaaacagctctttggaactctctaattttagtctctgtgaattctcccttttttccttgccagtttccaatctgtattttgagaaatacttgattaaaatatttatctcctaagtagaaaaataagaactctggaattgtccaaaccctcatgtttgtaactcatggaaaacaaataaatttgatgtgagcataatataaatatttaggcctacctctggataggtattagagaagagcttagctacagacgtttataacaacttagctctacatatctttttttgtatacctttataaagacatacaacctttttgacttttaacaataatataatcaccccatattccacctgtgtttttatgttgcagtagttactccagctaacacaaacaagtttatatactgaatttttatatgtgagttcaaggtgaatagtaagtaaagaaaagtaacttttccaggaaatgcacataagtgctctgtgttactaaaagagtacttcataacacagaggaacataactgtaaggattaattagaagtgttggatgggcgtggtgactcaacgcgtgtaatcccagcattttgggaggctggtggatcacgagatcaggagttaaagaccagcctggccaagatggtgaaaccccgtctctactaaaaatacaaaaaaagtagcctggtgtggtggtgggcgcctgtcatcccagctactcaggaggctgaggcagagaattgcttgaacctgggaggtggaggttgcagtgagttgagattgcaccactgtactccagcctgggtgacagagtgagactgtctcaaaaaaaaaaaaaaaagtgttgatgtgctttgcattacaaaaaatctatatcatgaagttttcttaaaggactccagcctagctagccttttgagagtctctctattaggggcctgctagggctatttaaattcttaatcctctttttttggtgtcattatattaagaatataaagacgaataattgaatgattgaggaatattccaagta

SEQ ID NO: 57185 - DNA, 1053 bp, Homo sapiens
tggagtgtgtctgtgtgtgtgttcctatactgaaatttccagctctatcatatcattcagtttgtcatttttgtcaagtaatatatcatgctatgatgctcctttctcccattacaaggaagggttaacacatgagagatctattgttattgttgttgtttccttgccaagtagtttctaaatttatattagcatttgcagttactgaatttatattagcatttgaaggagcccaaagtttgctttttagacttagtggcaggccaaatgacttagtattttgaatgctgttttgaaattatttggaaataatagattgcattgaatacttcaaataagcttcccttttaggttatctttcttccttttttgaaaaccatctatattggacttcctgttatatattatagttacataacctgctttattaacttttatcaatttgtatttttattagtgactcttttattctctcatctcttttgtgttattcatccaccacaaacaactagaaagttacctgtcctgttgattcctatttcaaaatctggctcacatggtctgtttgttaccattttcactataactgatctgtttcagaccctgaccatccctaaaccaggccattacatcagtctcccatacattgttaagacctctggtctttcccccactttcttcatcttgttacaaactagtattgccatattttcttagaatacctcattgactttctgttttctaagcagtggtttttagcatgtggtctgtggaatgctagatctccaggacccccccgatctgatagtttaaaactattttttatagtagaactataagactaattatggttattcagtcttggttatatggcagacattttctgaaaaaaggaagacataaacttatcacttcagggaaacaaccaagagtatttattgctaatgataaaatttaagactaaaagcaaaaattagaatgttagaaaatttgcatctgcaactttgagcttggcagcttcccagtagtacttgaagtcttttctgatgagat

SEQ ID NO: 57186 - DNA, 1036 bp, Homo sapiens
gtgtataggcagcaaggcatttaaaatgacacttttaaatgttttaaaacatttttcttttgaaagtgtttacactcagatatgttgatgaaaatatcagtctttgtgcaaatagctaaaaattaactggtatttattctggggtgagctacctatggcatatttcattcagaaccacttttaaattattcaatagatatataatatgcccttatatgttattcactgtgttaggagttacaaagcacaagacagatcttctttcctctttctcccccgtaacaaatttagtggtaaaaataagacaattttaaagtgacatttgataaataacacaagtaaatggatagaataagagagagaaatccattaattataaaaagaaccttagcctaactaaatatgtcattaagatgccactggcaatggggaattaccaaaggaaagcttaataaaagaagcaatttgatcaaagttaggtgttataaatattaatctgtaggacgtattggaagaacaagacacaggaaacagaacaattaggagactgccagtccttagatctaaaagcttgagtggcttctcagtgctccccatgcgtggtctggtattccagccctcctaacatgttcataatatattgttccatcccttttctccctattaagaggctctagccaaattggcctactccctattccaaaacaaaacaaaaaagtcatatacttaccagcttcctggctgatgttatgctttttcctttgcctaaaatggcccccatctctacctatcattcacttatttgtgaactattttaaggtttggggatttactggtaaagtacaagctgttaacttacgtggaattagttgcataaatgaataattataatttaacacagtaagtataatgacagagaaagatgtgttaccggagaactaaatggaagtgtaccttgaccttcccttaggggactgatagaggaggaagattcctgggaaatgcaaagcctgtcctaagcctcaggatgattagg

SEQ ID NO: 57187 - DNA, 1044 bp, Homo sapiens
ttcagaataaaggttatattatgttctttgtatcctgaatgagaagtaaaatgccctaacctttaaaagtgaaactttgaatacaaccttttatcatattttaagttttaatactgggaaataaagagtctacattaaaactttgagaaaataattgagtgaattttaggcccaaataaaaaatattgtatttattctctcctttgatatagcagagacaaaatatgtcctcatagaagacattcttactttatttggatatggcgtttataaatttgcatagaaaaaatatttcctcctaaaacaccataagaaactactactttttttctgcatggtttagacctttattatttaaaataataggcatttttagaactattatcaaatagttatgtttatttagattgaactatttcttcaaagaaccagactattttttccaaatttactgtcattcttcccacttttaaggcagatacaggatatgtttcgccttttttaataggagatagtcatttaaacctatcagtgatactcttttaattatttaagtagagataataaaatttccatcctgaaagggacagatgacttagattactgtttgtgaagttttatattacagagtacttttggaagacttcatgtctttattgatgctattttttggcctcagcttatttttgtaattttacatttcttctgcccttcaatttctcaatgtgcaaagagtaaccatagttatggtaataaggaaatgggagaattgggggtcctataaggagtatgaaaatttgaagtgcctatggaggcattaggaatttgctcctcggattctcagtaacagagagagagttttccttgccatcatctccttgacccaagtcacaggagttggattacggaagcaaagcagaaggcatgtacacttaagcctatacctgtcctacttttgctggatcaattgatgcaatacatgtccattataatcatttgaagaaataaatcattcattccccatctcttaaaaggagataataa

SEQ ID NO: 57188 - DNA, 2011 bp, Homo sapiens
attaagtggtttagatgtgtcttgttcaggtagctactggtgttgtcttatatgatgtaatattagatcaggctaatttagctaagttaatcttgcatgtctcataaaagtcatatgctggactatggttggagtgggtgacaaaagggagaaatcctacttccatttttccagtaaggttactaaagaaaccttacttccattgttatatactaaaggagttaatgtcaatatcaaagcagctagctcttctcccattccctaccaaatgtattctgttaaatgttttcatttttaataatggatatttaaataatcagactggtcaggtaattttaaaagaacataattaagattaaatagaaaaatgaagcaatttgaaaagtaggaattgttttggtgctttatattgttgtgttattatttgcttagtgaaccatagacttttgacatttgataagtagatgaaatcatttattgtctctatggtgatcagtatggataattctgtaattttgtttgtgttttctaaaatcatggtttggtttgggattttggagggggttgcctttttcttcatttctaagtggaacccagagcttttggctggaatttgaatccttttgggcagaatttgaatcttttatttttctttttattgtgtaatagttgttgctttcctagaaattagttgagttagcaagtacttttttccaaggagccaccttggagaagtcagatttttctctcatcttatttccactatacttctttaacatgtgttgaaaccagtttaggtgtgggcctaaattctactaaaaacctgtctgggtgtaaccattttatagcctatttatatttcacatccaagttctatgtaaattgaactggcttagagtcaccttctttcagttcctttgctttcattatttgcaatgatatgttgactgttgtctctctttttttttttctgagacagagacttgctgtgttgcccaggctggagtgcaatggcgtgatcttggctcactgcagcctccacctacttggttcaagcaattctcctgcctcagcctcccaagtagctgggattacaggcatgcaccaccatgcccggctaatttttgtatttttaatagagacagggtttcaccatgttggccaggctggtctcaaactcccgaccactgatgatctgccctcctcagcctcccaaagtgctaggaataaagcatgaaccactgcgcccagcctgactattgtctttaccaattttctaggaacctttcgctcttcaagttttgacccataaaagtcaatagattttgaggaagtacaactatagtctcaagaattattgcagtgttatagaagagagaactatataggaaattgttaaatatctacagtgttcgaggtactggccccaaaaacaaactaaaggtgacaaaagtgtctggtctagagccagtccttatcttttgtgcttaacaagaagtccagtagccattctgactcatggacagtccatgagcaaatgtcctaaatttgcactaaaagctatcctcgtaaatattatagggaaaaacactacttctagagccattcttccttacatgccagtctaatcttgaattagataattgttctgtttttttattgttatctccaagtgatttgtctttagccaaaatttctgctgtcaggtatttcattgaataattgctgtatatgtaacattctatgccagtcgctaagagtgaaaagaagtataagatttctgctcttagaacattttttttatgtagttagcaagataggatgaatatacatagaaactaaaatataagttagtgtacaaaaattgattgtctatatactagcaataaacaggaaacaaaaaaaattaaatatcctgtttaatatagcatcatgataacaaattcctaggggaaaagatctaataacagatgtgaaagacttctacatagagaactttaaaacataaaag

SEQ ID NO: 57189 - DNA, 1044 bp, Homo sapiens
tggattaatacacactgaggaaaagagcaatagcttctgataaacctaatttggaacaatatgcaagctcctttataaaattaatactattatagaaaatttggaaagtatagaaagctatgaagaggaaaaaaaaaaacccaaaatgccaattaaagataaatttggagtagtttagtataccatagtggttaagggaaagcactccaagagccagctaaagcatgaattctggctctaccactttgtgaccttgggcaagttactcacttaacttgtgtctccatttcctcatctgtaaaatgggcaaaatagtataatttacttcgtaggtttttatattttagaagtctgttttcctaggaaatcgctgttgtaattttcctttttcttcctttttttttttaatgcttgataacagtctttagagttctactggattttggtgtgcttcagttagttgtaaggaaataatggaaattggaaattggatgaagttaactgcctgcagtagtattttgaattatataatacatatgtatgtctttgtatcagtggtaagccaaagactgattgtaccataagatctatgctttttctaaatagattttatagaaacagtagcccatagttgcaaatattctttaaaacgaaggcaaaaccaaatgcctaatgatcgttatttctactgaaactgagtgttatctgcattatatgagaaaaatggactaatgctttagttgtgacagcacattagcttaataggaaatctgtaagcctaacataattatgtgtgtgtatgtatatgtataattatgtatgtgtatatataaaaatatatgtatgtatgtataactaaataaatatataaatatatttttaaatccactaaagaaaatgaatttgtttaaactccctttttaaatgaggaggtccaatattacaggcacgtccttggctctctgagcatattcagagatagtacccagtaatatccaacactatccgaaaatacttttagttgcttttcattgtttattcatg

SEQ ID NO: 57190 - DNA, 1034 bp, Homo sapiens
acctggcaccctgttcttgtctttcttggaacttatcacagtgatttagctatttttatactagatgactatgtgctcctcattttaatgtgtataatacatatctaatgtgtaagatatataatacatatatacataaatataaatgggtagatagatgatagatacagtgtatgtgtttccatcagctgttaaaaggtagatgatagattaatactgtgtcattttcatgtctcttctgttctactgctttaatgtggcaggtggagtccactgtgattcaaactatgaattttttcattgatcaattctgacatgctaacctcagcaactgagcacctgcataatatgttaggtcatcatattaataatgaagattacatagttgacttgcctttttattgggggaatatagaaaaaaaccctagaaatatgactgattttaaaacaaactaaaatgatgattgagaacagtaatactatctataatttcattgcatctagtagaaaattagctttggaaagccactcagtttataaaattgttttgattattctttatttaaaaaatgaagttctcagttttaatctcaacaggaaatctcttgattacagcagagcagatttttatctgtcaataagttaaaaaaattttgaggaggaaatcaggcatcagcttccaggggtctaataacttcctaacttaatgggacttgcctaacagtagatgaacttttcattttaagactttgcctttagtagtcaacactgtcctcagcacagctacagactatataatacagagtccatacaatacagggcatttctgtatgaataaagtattaaatattttttaaaaataacttttaaaaaatgaagttctagcctaagacctgaattaagggctttagggaaataaaaactttgttccttttctaaattttagatatttccgttatggtaagttaaactgatcggtttaagaaggtagtttaagatagtaatgtatatgtgttaacaggcttctatctctg

SEQ ID NO: 57191 - DNA, 1061 bp, Homo sapiens
aagaaagcccagtgagtgagtaaggaagggtggctattgtttagtgctctctagcaaaagaatgggattgggggcggggttggggcgaggattgagtttaactggcattggctctggcttttctgcattccaaactgtctgaggcacgaaatgagagcaaaaagggagagagcaggaaagcgagcacaggcgagtacagtatacaaagtgttttgagtttctgactggcgtgccggaaagatcatgttagcacacccagaaacttcacacgatgcagaccccaggtaagagtttgtagagtctgagaccgaaatgaaaagtcacgtatttaaggggaatgtggctttttaaaaattacacaaatgcagtgactatttacctttatgattattggctttaaaaaaataggttggtttttattgctgtgagttcacagaaatactgtgtggaagctgtctgttagcattccagtacaaaatccagcacaagaatagccatctaagaaactcagataaattaaaagaataatgaccatagcaaaatattaacactgcagcatgtacttgttctgttaataatatgaaatgggtccttattctggatctttcttaaaattctttatgaaatataaagatacctgggaacaggtaaagctcatttctctctgagtgagacagaatatattgaccatcaacaagatattaacagccttgcttgaatctcagtaacacataatctgtgtcattcaaaagtttaacaggtttgatccatagacagcagtaagagcattcaaatgagaactttgcttgttatttttgcccaaggtaggcttttaatatcctctgccaagatgacaggtaagaaagtttattgacttattgaaagttaaatctgaaagagacttggagattatctatagtctattctctccattttcaatgaaaattttgtggtctaaggtacttgcccaaggtcagaattaggaacagaattgaaatgaaaacccagatctccttattgtcagtttaacgtgtttttcatagaaccaattatatataggc

SEQ ID NO: 57192 - DNA, 1013 bp, Homo sapiens
acccaaatgtccattagtggaatattttcggccataaaaaggaatgaagtactcgctaaaacatggatgaacctaagtaaaagaaaccaggcataaaagaccacatattatatgatttcagttgtataaaatgtccagaataggcaaatgcatagagtcaaaacttagatgagtatttgttaggggattaggggctggggagtatacagagtgactgctaatggacacagagtttcttttacaggccatgaaaatgttctgtaattaaatagtagtaatggctacaaaaatgtgaatgtattaaaaatcactttaaaaggatgaattttatagtatgtgaattatatttcaataaagctcttattttaaaaaagtaaaaccttgcccatcactcttgcctcggagtcttcctgtctaattaaaggtaagtcaaagacccctaacattacatgatctggcttcctattactccacagtctgatctccttttactttttccctctcattccagtctagctgcagtgcctcctggctgttcttgcctctagtctttttattggtagttccttcttcctaaaacttaccacctttaacagtttagtcaaatgtcaacctctcagcaaggctttccctggctaccctctctgaaattgtaaacctcccccagattacctatttcccctttttgctttactcttctccttggtattatttaccatctaacacaatatatattttacttttttatcttactatttctcttccccataaaatataagctccctgaggacagagattttgttgcttttgttcacaactgtatgtgggggtctaaaatatgcttggcacatattagcactgatattgttgaatgaatgaatctgaaagtatgagtacaagcagctataatgaaaatcaggaatactaagtaattgaagaaagggctacatattttatgccctttattaaaataaaaattaagtatctcatgggaccatgaaactaaaggagta

SEQ ID NO: 57193 - DNA, 1047 bp, Homo sapiens
tttctgttattattaggttgtaatatataatgaaataattatgcaactcaccataatgtagaatcactgggaaccctgagtttgtttttctgcaactagacggtcccatctgggggtgatggtagacagtgacagatcctcacgcagtagattctcatcaggaacacacaacctagatccctcgcatgcgcagttcacaatagggtatgtgctcctatgagaatctaatgccaccgctgatctgacaggaggcagagctcaggctgcaagtcgatggggagcagctgtaaacacagatgatgttttactcgctcacctgctgctcacctcctgctgtgccgcccagttcctaacaggccacagaccagtactggtccatggccctggggttgaggacccctgatctataggagagtttcttccttctttcgctctcattccatatttcttcacacataccgtaattccaattgcaattatttgtttgtaggttctgtccctcattagacaacagataatctgttccgatcatctttataacaaccccagtgcctaacacagtacctcccacagagcaaacattcaacaaataattgttgaatagataaaatatgcatgaattatcaaagaccagaatcgaacgagtttatctcacacatattctcttggtattactgataatgtccctagtcaaatggaatattaaatatgtaattacatttaataaacatttaataagagatcatgtgggataagagcagaatggatggatttttttccttaaagagagattttaattaatatttgaaattcagaactatggtgttttagttatatagtgtatactttgtctacttatgttggtaactgaaactagatagaattctttattatttaatgatttgtttctgtggctatttcttggaaccttttaggtgttatacatatgtataaattcacaatgtttttgcacatctgagttttgactgttcttcaaaaacaactttagtcatttgacattttctcctcttttaaagatcatttttc

SEQ ID NO: 57194 - DNA, 1016 bp, Homo sapiens
tgtttttccaagttaaacaaagagatagaaagcttcacgtccactatttaataaagactagtaagtgtccattgtccaaactaggggttttcaactctggccatacatgaaaatcacctaaggaacttcaaaaaatatactgatgcttagactccacctcagaccagttaaatcaaaatctctagactagagcccagtcttctgtatttttttaaaggtcccagatgattctaatatgcagctagggttgtaagccatttgtctaaatgattgataaaatattaggaactcattttagtcagtgtgttacctgtgaatatgagtgctttctttcctaccttcaagtctgacataagaaactaagaagcagtattttctcagtggcctttgttactcacatactaattgctgagttgcctgttagttgcccttctgtgtttgccacaatcagttcagatgaccaatgtaaatttacaaaatacttgctttacctttgaccagcctaagaatctcagatttcagggtgaaatattgaaattcaattcatagcatccaagctacaatacagttccaactttcatattctcagcattactgtattccaagaggatacttaaaacttatttcccatgatgcttaaagactctctatccgtgtttcttccctcttttcactaaccatctgcatggagttaaaatccataataggatcgccctccagtgagacctcttttaatgaacagtatatatatatatatatatatttatttattcatatgtgtatgaatgtatagatatgagtatattcatatgtctatgaaaatgttattaccaaaggtagaaatcatatagcaatcatgggtatgtcagaaaactatagcctgtagatattaactatatctttaagtcattttgtaatcagaaagggcataattttaaaatcttctaatgataaatatcttagaaaatatataatttagaaccaaaggtctcagagcagagaaaaaaaaagaataa

SEQ ID NO: 57195 - DNA, 1026 bp, Homo sapiens
agctcactgcaacctctgcctcccatgttcaagtgattctcctgcctcagcttcccgagtaggtgggattacaagcacatgccaccacgcctggctaatttttctatttttagtagagacggagttttgccatgttggccaggctggtcttgaactcctgccctcaggtgatccacctaccttggcctcccaaggtgctggaattacaggcgtgagccaccccacccagccaatagtcaaaataatttagaaaccactcttctagaagacaagaactatatcttattcatctcataacttcagcactgaccttttatttttcctaatctgtttatgaaaactgatttaatatatgggtgatattcttgattacccaaagtatgcacgttgcaaagacattgacctcttatgccatagtttcttcatcattagttggtagtttttaattaatcaacattgtgtactggtttttataaagggtctacaataaatctattaagtgaaatagaattaagaagggtggaatttagtgagtaggaagaatttctgtggaagtcctgtgagaataatgatagagaaactcatggggagtatcttagtttgcttctcatttaaggtataattgaatgtgtaagaatgtgttctgcctgtcaactctttaaaagttccatggggctgggcctggtggtacatgccagtagttccaagctatttgggagcctgaggcaagaggttcacttgagcccaggagtttcaggccgtagtgcggatgattgttctgtgaatagccactgaactccagcttgggcaacgtagtgagaccccatctctaaaaaatactaatactaataataaataaattaaaggtaaatggggagaaaagacaatacagtcaacagaagtgaaggtgaaaacctgatgatctgtcctagctacctgggcttatatgttatgcagtcagtgagactgttactcggaaactttttcattaaaataaggtggttacagtttaaaaaggccctgagc

SEQ ID NO: 57196 - DNA, 1045 bp, Homo sapiens
taatttttatttcttgtgtttgctttggatttaatttgctcttttttttctagttttctaagatagacacttagtattgggtttagatctttcttcttttctagtatatgcattcaatgctataaattttcctctaagcactgtttttactgcataccacaaaatttagatgctatgttttcatttttatttcattcagttcaaagtgttttttaatttctcttgagatttcttctttgatccatgtgttgttcagaagtatgttgtttaatccccacatattttgggattttctagtcatctttctattactgatttctagtttaattccattatgatctaaaagaagacattgtatgatctctattcttttaaatttattaatatgtgttttatgcccagaatttgatctgtcttggtgaatgttccatatgagcttgaggaatctctattctgctgttgttggataaagtagtctatagatgtcaattatatccagttgattaaatggtgttttggagttcaactatgtcctcactgattttctgcctgctagatctgtccatttctgatagataggtgtgtagtcttcaactatatagatttatctgtttctcctagcaactcttaccagttttgcctcatgtctcttgacactctgttattaagcacatacacattaaggctgtattcttggaaaattgacccatttatcattatataatgccattctttatccttgttaagttttcttgctgtaatatctgctctgtctgaaattaatatagctatgcctgctttcttttgattagtgttggcatagtatattgtttccatccatttactattaatctttatgtgcctttatatttaaagtgagtttctggtagatgatatatagttgggttttgttttctgatctacactgacaatctcttttaattggggtatttagactattgacgttcgaagtgattattgacatagttgggtttctaaccatatttgttaactgttttctatttgttgcctttgttctgtgtcc

SEQ ID NO: 57197 - DNA, 1038 bp, Homo sapiens
gatacaaaatattgactcaaatacccaaccagtttaagaatgttataatattggagagtttgtggatacataaaaactaatttcagagtcagttaagctatttctgtagaatcaagttacagtggtcagaggtgtatcttttgtttggtttttggtagaatgactataaagaataatgattatgatagctaaacaattttagcactgtcgcaggatgcttcatacatgttatcttgtttcatctttataataaccgtatatgataaatactattattatcaccattttatagatgaggaatctgaagtacagagaggttaaataatcttgcccagggtcatacagctagtaaatagcaaaaatggtatttgaacttgggcagtttggctccagagtccatgctttttactgctatgttctgtatgtatagcatatgaaattggccttgttggtttgcaattacatctagaagacgtgctgaaaaggaagcctgggtggatttccataattaggactactagcttgagtacagctccctaaggataatatgcttcaaaaatcattgaatgtgtgctaacacatttttgacacatcatgtctcgataatgttcaaaattttggaaacagtgcttgtggtatcagcatcagcacatcatcaccaccacctatatttattaagtacctactgtgtgccatacgtgttaaatgtagtctctcatgtaatacaacaaccctagatactattattatcctcattttatagatgaggaactgaggcataaaaagtttgagaaacttgcccagggtcacacagctaataagtagtagagctaagatttgaactcaggtctgcctctcatatttgatactcttatttatgttttactttttttttccagtaagtgactttttttcacttatctacctagaaaacagaaataaaattatagatttgccaagcagatgattactgtctttattttgtaaatgaagggacttgatgagggactactgctttattagcccttcttgaaccac

SEQ ID NO: 57198 - DNA, 1032 bp, Homo sapiens
tcagcaataaaaagagtactggtacatgttgcaatgtgtatgcatgttttcaaccttgaaaacactgaagtgggaggatcactttaggccaggacgtcaaggctgcagtcagccgtgatcgtgccactgcactccagcctgggaaacaggagagactctgtctcaataatagtaataataataagccagtcagtcacaaagtaccacatattggatgattccatgtataagaaatgaaaatgccaagaataggtaaatcaatttatatcatcgtgacatatctgaatgctaaggtttaaaaaaaaattaaaattttctagaaagaaaaaataggttgcatacaaaggaatgttgggggtggggggatgacattggaattctcagtagaaacaatgaaaaccagacgttagtggagcaatgtcttgaaaattctgagcggaaattattttcaacccaatattccatacccagagcagatctcgaatgtcaaactgaggagtttggattttagcctataagaaacaaggagcctttaaacatttttgatcaagaaaatgacctaatcagagttttgctatggatggattaatccagcagtggaatttcaggtaacttagtttgcagatactaagtctgagagaccagttaacaaaaagctgtaagaagatataatgagggctccaaggcggatagtagcagtggaaatggagaggcagagacaagataggaggaacgttttagaggcaaaatcaataggatgtcacaaagtcatcattgttccaaagccatctaatcagataaaagccagtaaagcgatttcctagaatcaatattggcagcattttcacattaaagccatgtcatataggagggtgttgggacacaaaaagactctgtgatgtttctgcctttcattcaaatgcacttaaaactaggaaatgactgaaaacagtggtactgtattgtcaggcattccaagattccaaatgcctgttgccagccttgctttggaagtgctacttaaatttacca

SEQ ID NO: 57199 - DNA, 2644 bp, Homo sapiens
aaaatacctaattggaaaataataaaatccagggagcaagtaaagctacatttttcccaaagtgaaagctcaaattcaatttttaaaaaactgattagacactatataaacttgctggtagagtattagggtacccaattttgttaattactacctaggacatttttaaacaaagtgagtgccttagaaatgcatactggtgaatacaacagtatgttgctgcacccagcttactggctgagctatctcatcaggaattcactgaagcagtctggaatcacaactgccaagccaagcagaaactcacctgcactggagtccaggattttatgtggcaataagcatttttaattaaaagtttcccaattcctaaatttggaacttaatctgtaaacatgtagcagattgagctagcaccaccaagcctcattggagctgtgggggaaatgtggcattctgaaaaattggccagttaagctgagaaaatccagctgtgttttacttaaaattgcactaatcagtgttattttattcctctttttcttcaccagtgtatctgctgttatgtgaatgttggctccccatctcccagcccttcacttttatcttttaagactgatttcatatagggatgaggattcaagcaatataatactcattcactttagtgagtaatagaaagcctcacctggctagtagtttatttcttaaataagtcagaagcagcaggtaattttcatcagcaaagcaattagattttaaccattacctatcacattgctagaggtcttgaagtttacacagaaatcaagattgtctgctgaccttaagataaaaatataaagaatatggtgtgccttaattagaagtaaaattgcctctgggaagcagttttttatttaaatcaatacatagtctgttggagccctgaattattcttacatggtgttcaggatgatggggcagtatgggaagtagtcagggagagaacctggccagtagtcaagggattcacaaagtccactttcaaggatgggttagattttttgatgaaggccattgtcagattggactgggaatcattattttaaactcattattctcccaataaatccacattctgctttctgttagaggagtaaactctggtgccaaacagggctactaaaactctgtagttagtagatctaagaaaaatcaattcagaaggaggtaaacatgaattagaggaaacttggggttactaatgctattacattgaaatatttgtacaaataatgcctcccctgtcccaagccagtcccaggctgtttgatcttcctgtttactataatcttgcttctctgggaattacttctgtcttcttagagatactttcttcccaatacagggagggcttgcttatttattcaataataatgttgaatatattcgtgactttggttttcaattcagtacacacacacataaaaatgccaaaagatatgacattctgaactatgtattaattaaaatttcggtaactaggaagagtttggagttataattctaagtggcttagttttaaattctcttatggctacatttgaagttagacctgagtatcaaaatgaaacttgttcagcactggaaatacagtgaaaaaatagttttcaccatctttctgtaaaagaagaaaatatatgtaagccaggtaagtttcagtaaaataatacctagaaacattaaaccacggtaggcactgtaaaggaaacagaatacatgtgagagaaagctttgtacttgcaaggtgagatataggaaatagcttctagtaggggcatgggaattgtatatgaagcaagctaaagtttctcaagttagtccctagtagaggttttactttttattttttatttattttgtatttttggtagagttggagttttaccatgttgcccagactggtctcaaattgctaaactcaagtggtttgcccacctcagcctcccgaagtgctgggattacaggtgtgagccacctagtagaggttttaataagagattatctcccactcccagagttggcctcgtctcttttctattgccttttactgagaacttgttcatagaaatggatagaagcctcaccattccttcctttctgtcttaaagtagtcaactttgccatgtttgcagagcatgccccttgcgttattcaagccatagcttcttgctgccttccagctctaatctccttataggtgtagcaccatggcaacagacccagcctagagcccaggtgccttgtttgttacctgaggggctgggtgcagcctgaaggaatagaataaggaatattacctatcctacaaattgtttggatagatgaagtcttgatctgttgtttgtgtttctgttctgcttctatggaagacttgaaataacacctggaaaacatttattcaaagattttatcagtaaccaaaggcaacaaagaagccatcttctatttgttctcgtcttctaaacagagagttgttttctgacatatagttcagaaagtgacttgctataccgggacatgtggcaccgctatgatttggggttgcactgccaggtggctctaccattgcttcatgtaggtagacgtttattttgtttga

SEQ ID NO: 57200 - DNA, 1433 bp, Homo sapiens
tatatgatgttatcacattcaaactgaacaaccaacattgagctttactagaagttctttaagactgttgaggaatgaagcagctgtttctttgcacctttatttccccttatgctatccttctggattgatggatggatggacggatggatgggtgggcgggcagacagaaagatagcctagacaatgacttcaagtgatgagttcagtagattctacattgacactgtggaccgatttgtaagtattatatattgaacacctaatatatgccagaaactgttaggtgctggagatatggtggtaaacaaaaacagaaactggttttctggggaaaataaatattaatcaagtaattacagaaataaatatgattacagtgagaactacagaggataaaaagagagatgatactatgaaatggagcaaggggagctgactaatggagttcaggggcaatgttggtcagggacaccttcactgaggaaatgatgtgtgaactaaaatccaaaggatcccaggaatgagctacctgacagtgggagtggaagcaagggtgggagcagagcagaactgagaacagtatttggaaaaaaaaaaaaaaaggctttgtggtgaatagagaacattgtgtgtgttagaaagggcttggtgtattaaaggacctaaaaagaaaaggtacaaggcttgaaaggtagacagaaaccagaaaatatagggacttgtagactgcattcagaattatggcctttatcaaaagtgcaatggaaaatctttgagggaattttaaatgtaggggtaggaacacctaacattttatcctgattgctttttttcctttcagatgaatctgatagctttagttttaaagcagcatttccaggatgtctgatatttcaaaagtctcttctaatgtgtattatttattcagttgctttctgcctgattgaacattattctaccaggattttctgactgacttggtgatgtctgaggtggatcgttgtggagagcatgatgtcttgatcttcagagagaacactattgccaccaaatccattgaggaatacctcaagttggtgggacaacagtatcttcatgacgcactgggtatgaaagagaaaaacatctattttcttttatttacttttcagttttaagctatttcacccccatgagacgaattgagctcaaattctgcatgttatttagttctagctgactcaggtgttaaggtttgaatcatggctgtaagaagtctgcagtactcaccagtagagaaataataataaatgtagaaacagaaaccttgtcagcatacactgctaccccaggtccccagcttcatgattccaggatgcacagtaatatcagcagtgtccactgatagatctgaggtggtctgttttgcccaaagttttgggtgtttatat

SEQ ID NO: 57201 - DNA, 1023 bp, Homo sapiens
aaatgtacgtatccacataagaaccttcggaggagttcatatgcctgaattgaggcatcttagccatgttgaagttgtctcaagagaaattaagtgtcctttccttttccacagtgatttgcataaactaaaatctccaagccaggacaacacagacagctacttcagagggaaaacattattgctggttcagcaagcctcctctcagagcatgacttattctgaaaaggatgaaagggaaagtagccttcctaatggtcggagcgtctccctcatggacctccaggacactcatgctgctcaagtggagcatgcatctgtcatgcttgatgtgcctatacgcttgaccggaagccagctttccataacccaggtggccagcatcaaacagctgcgggaaacccagagcactccccaaagtgcaccccaagtgagaaggcccctgcacccagccttgaaccagccaggtggccttcagcccttgtcgttccagaaccctgtctatcacctcaataacccaattccagcaatgccaaaggcctctatagattccagtttggagaacctaagcactgccagttccagaagccaaagtaacagtgaagacttcaagctcagtggacccagcaatagcagcatggaagatttcactaaacgtagcactcagagtgaggacttctccaggcggcacacggtgccagatagacacatacctcttgctttgccacgacaaaatagtactgggcaggcccagatccgaaaagtggaccagggtgggttaggtgcccgagccaaagccccaccatccctgccacacagtgcttctttacgtagcaccgggagcatgtcagtggtgtccgcagccctggtggccgaacctgtgcagaatgggagccggtcccggcagcagtcctcttcctccagagagagccctgttcccaaagttagagcaatccagagacaacagacacagcaggtaggtgtgagtgctgaaggggcctggcttctacttggtccatctgt

SEQ ID NO: 57202 - DNA, 1030 bp, Homo sapiens
attggattatttatagaatccttggatacagaaatagaagaagggatgaaaagcatgactaacttaagctgtttctggaagcagacttcctgggctaaacctcctagttggtcattttttactgagtaataaagtttttctacagtcttaaatttttcatttttattttgttatatttcccaaaattttaccaaatcatttgatttagtaagcatttttatttgaagaaaaggaaaaatagatatcttttatatgtatcatatgtattttttatatataaatgtgtatgtgtatataagcataaaatgtatgtgttagaaggctatcagtcattcctaccttattgtgaagtagtttcctcacatcacttttgtgctagattctagttgcgatcaactactttcagagaattaagatgtttattgggaggagaaaggaaaaaatacataattttagaaatcagaatactgtgtagaagcaaatatctactcagggacttagggcagcacaagggcactgaagataaaataggattagcgaagagcatgagatctggcagagagggacaggacagggaaagtgtcctccacctgcttttcaaaagtgtacttaggcccagccctgtacagaaaaggaaaataaagattcttttttttttcttttgcttaccctttccttctgtatcatggagggcctatgactcaggctggttgtttattaatattataaattaaatagccttttttgtgctcatctggaaccagttgtcatttataacattttttctttaggaaaatacaatacctatcgcataagcacataatacatgtttctgtgggttatgattagagggctgcctggatggatgggaggtaggaaatgcatacagtctccaaacaaccaatataaaaattagtttttgtgtcacagccattaatgagtcaccaaatatattttttggcatgaagtggggtacaggcacagtgagatgtccaggtacagctttgaatattaatctttgtttatactt

SEQ ID NO: 57203 - DNA, 1025 bp, Homo sapiens
acagctttatctcaaagggaagatattcctaatgggaattcctgctcctttttctttttgtctttttcattatctttgatgatcatgttgaaagtcagtggatataaattctctttctaaggccattcctaagcaagatggaatctgaaccacttactaacctcctccctcaattttttggactataaactagagatattttttgctatttatccagcttataaggagatggaacaatcattgaaaagaagcctttggtgcccttccaaaggattaggggaaaaacatagaatattctctaagtaataaattatattttagtaatgaattctaaagataatccagaataataaatgaataatattttattgagcatctgttgtgtatttaactagtcagtatcatttaaaagaactgtatgatatgatgcccattagattgactaattggaaaataagagcaacgcttataagaccaagaatatataaaagatagtatatagttttttcatttgaagaacatactacaacaaaaaaattcatgaaacaaaaatcacctctgtttcctttcaatctagcacaataactattttttatttattctatatttctagcctttttacaattttgtgaaggctttatcattaatagaaggaatagttaggattgatctattttgtcacttttatttttattattttgaccacctactgtatgccaagcaaagtgctaggatatattaggaagtggctgaaaataagatttgaccaacaaaatagtagaaatttctagaagttcattcacaattgcttagtgtgtacgggtctatttatataaactatgcacatccatcctcaggcatgaagctatttttattgatatataactataatctgtaaatcgactaaaccagatctttcttcacacctttaagaaatgtccctatgttacttttgcatgtgtaagttttaaagtctctcccaacccatctctgatagccttttagtctctgcaatcagtttttta

SEQ ID NO: 57204 - DNA, 1339 bp, Homo sapiens
ccagactgatgagcgcgctgacccaagtgaaggagcggtacagcatgcaggtccgcaatggcatctcccccaccaaccccaccaagctttccatcacggagaatggtgaattcaaaaacagcagctgctgacgggctttgtctgtggaaggagacagaaggaaattgacccactctcctatctccagacctttacctagcccctccaggtttacagaatgttgctacttcacaatggcgatgtggtgagaaactcctgaatgaagaaaggaaccttgtctttcagggcataaggcggcgacttccaaggtcaatgcttttcccccacatctctatgtacatagggaacttagttctgggccatgtacagaaaatatcactgtaatataccaaaaggaagttaataatgtagattacctttttgattattgctatttttattattgttttcctcttgttgaaagcactgcagttgttacaggaagtaaagtaggaactgttgtgtgagcgagacatgagcctgtaggttcagtaggtagagaccaagcatctatctgatagaagcacatggagtgcaataggacattgtgagaaggaatttttcagggattcatctactagtttaaaaaccccactctggccctcttgtcctttcagaaaacatgcaaataccaagatccatacaaaacaataatttattccactgatcaaccaagactggttctggttggacagctaatctgatttggggattcactgtttcagaggacacagacaaaagctgttgcatcaaaactggactttaggagtaatttctattgaactcctgtcaatatgtttatttcctctgtctacagcagatgggagtcttctcttttagacaggggctttttgtttttaaccccaattgtaataaagggtgttctttttcctctttagagtttacaaaactataaatatttgtgtctccacataccatcttcatcttcacacattcactgtgctttcctccccatagtgggagctgtcatcaccaacagggtttactctcccctggagaggttatttaaatagctgtccataagccatccagatcaacaccctttcttccatacagaaaagggctaaccataccacagctggaatctctgaatatttcctattaaaaattttttctatgtgttgttataatttttgtttgggataaagactctatccattgtactagcaaatctatggggggtaattttatctccatctttaacttttaaagtacttcttccccttatcccctcaataaagaaaggaaatccaaatttgaagcatcactctcttaaaag

SEQ ID NO: 57205 - DNA, 1080 bp, Homo sapiens
atctcttctatcagtgccactccctacactggccacagctacaggaggggaaaataaaagatttattgcaaatacaaccaggagtaaggtggcctgatattggtgactgcccctgagctaaaagacaggcaaggacagccactgctaggcacacagttgctgcagaagccagcgatgtgggaagctcaattcctgccaatccctgactcacccctacaggctcttttaacccagcacttgagttgctacaccatcatctttcagaaagcccccctggcagcaggacctgtggggcttgggcaatgttaggaggtttttcctcatcaaattttttttgttcagtagcctgtgctccaaagggcctaatgtccttattttgtctgccagctacacaaagcccccaccatggcacccagggaccctcaatatcgccatctccatcccaaaccaagttcaggctctcccccagcaccccctctcttcctgtatggctggccatgcccggaggcgctccagccagagaccctggtgtcctcagcggctcccttgctccatctcacctgctctcatgttcagtcaccaaagtcctgtcagtgccttgcagatgtcttattttttcaaatatggaaataatccttttatttggaatatattattgtaaaatatgtaagcaaatttgtcccctccccaacccagggacacccatgattaacactttgctgtagaaggtccttcacactctcgaatttgttaatttgaatgtgtaaagatctcccttgttctctttaaaggctgcatagtagtatttcactgaatgtaccataacttatttaaccgatctgctttcagtggacattacgttgtttccaccttttcactgtaataaacaatgccgcaacaaacaaccgtgtgtgtggaaggtgcatatatatgtgtgtacctcatattactatttccttaatcaatttctaagggtagaatttctgtacgaaagattatgcacatgttaaaactgacacaaattctgataccagagtggtagccccagtcggcatacctactgtgccaagatcactgttt

SEQ ID NO: 57206 - DNA, 1055 bp, Homo sapiens
aaaaaaaagtaagcatctttataaactttgcatttgtgtgattcagtgaacaaagctgagcattttttaaaatgtatttgtattggtacttcagttaacgtcacttgtgaacaatgtaaaatcaattcgctgtcatgtcccttcccactccagtgctccagaacaggcctgggttccacccacccagactgtgcaatattctttccccacacacacgtttcctgtctctccttttctgattggccaccccttcaaaggcctctttccccacccaaagcatcataaatttctttaataaagtggataaatgtgtaaaattcagaaacacagaagaggaggaaacatctgtattttcatcccctgaatatagtcactgttaacattgtcacacatctccttccagacttgattcctaagcattgctatttcctttcagccttgttgtgactgtattatgtacataacattgataatgcttttttcatttagcaccctaatacaagcattgtcctacatcatcctaaccaccttgcttctggaaactacagatctgagcattttgctcacctgctgtaaacctctgatggctccattggctgggggatcaagtccttcagattttgcccccagtgtacccctttctcctcatcccctgccactcccttccccactatgtggcctacaccagtcgcatcaaactgcttgtcattcccaagcaaaccatacagtttgacatctgtctttacccatgctattccttctgccaggaagaactttctgtacttttctgccagatgaaatcctccattgttacaccttctatcctattaccaccttccaggcagaaggaaatgaattgctttcctgccacagctcttggttcacacttctggtgcagcattttccaaaccgtcctgactgtctccgttagttcctatgagaccatgtgcttctaaaaacaggaaacagccctgctcatcttggtatccacagttcaatgccttcttcaaaacaagtactcaggaaattatcgtccaattaaatcatctaccaat

SEQ ID NO: 57207 - DNA, 1058 bp, Homo sapiens
tcaccatagaagcagaagaagggcagcagggaagagcagttcactgagtacacttttggggagtaggtcatatagatgccaagagctgtgcacagtcctctcaccatcatcggcacctgcagccaggaggggatgctggcccccaggtcactggaccagctcagagatccggagtttgcattgaggtagaggccaatccaggcttcagtctcactcatgatggatctcaaggcctccttgcctgtctcatccgtcaccatctgcaggtcggccagatccgtgtggtggctgcggcagtacagcagggccgaggaccatgtcatcacttggtcaaatcgcatgaaggtctgaccactgatctggaccacagctggggtcaaagaatgtggagatcactggcctgagggcctgggtctctgacagcccagccttcatcacccttggggatagaattttggtctgacatgggcccttgtccctggtccttgagtattagatttgatcaaaacaacagttttataggtagactaaataccaggatggaagaatggatgagatagtatagcagcaggtgggggaaacattagggaaagcagagcttaagagttcttgtagctatatggcctcacaagttcagtttaagtcctaatttcttcatctatacaatgggaaaataatagtacctaaggtcaggattacatgaaatcacatatgcaaatggtttagcacagtgatatattaatagtaagcacttggcaagatggtagtgaccatttcgggggagattatgaggaagacagaacaatcttggtttggggccaccctccagtgtgatttctaggggcggtgcctgcccccactggctctcgggcgaatccagggctgagcagaatagatgaactgtgcgatgttcctagactcaccgtgcctggagagccagggagaagaggccagcctggagggatgggcctggtggacaggaggcagagcaggctcagtggccttgccttctggggagcccagacagactgagatgctatcctcccacaaccaccact

SEQ ID NO: 57208 - DNA, 1027 bp, Homo sapiens
tctctactaaaaatacaaaaaattagctgggcatggtggcatgtgcctgtagtaccagctactcaggaggctgaggcaggaggatcagccaccgggaatgtcgggtgagctgtgagtgtgccactgtactccagcctgggagacagagtgagaccatccgtgtcttaaaaaaataaaaaataaaaaataaaaataaggacattgattctccccatggggttcagccagggggcagcaaattctggaaatccctcccggacagccaggcagaaatcaggggaacagaggggacgcgggggtggagatcctgctggctggtcttggtggagagatccaaggcaaaacaagccaaattcccagaaaagggaatggggagcaggtatgtacctggctttggagaggtggtcaggctgagagagggcttcgtggagatgaggtgcccgacgtcagggtctgtaaaacagaaacagaccacgagttatggggaggcccaggatcctctgcaggcaggagctgtccggttatagccgggaaaacctagctcaggggcagacaggctggtccatccctttccacatcgattcaatccattcaataaatactgggcacctattgtgtcgcagatgctattctacaccctgggaaaaaatggcagaaataagacaagcggagtccttgctcttgaagagaatatgagaaggagcaaatcttgtagagagctgggaggagctgcccaagcacagccacgacaaaggttctgcagtgagaaggagccaaaggaattcatgtggctgggacaggagtaggagatgaggccgaagaggggaggcgaggcctgatggctaaaggaggacaggattctaagtgctgccaggtcctcctgattcttttgtttacagggaagtgacctgatttacctttttaaaagctcactctgtgtagagaacagattttaggggtcaagggcagacccagaggagagacagcgctgacttgaccccacatgctagcagcagaggtgcagagc

SEQ ID NO: 57209 - DNA, 1052 bp, Homo sapiens
tgctcaggagatgaagtgacgggtcaagagggaggaagggtgggacgtccagaggaacagcaggatgaaggccaggtaaggttattgcatcagtgagaggagtctcatggacaccaggccagcacttcacagtgtccttcctgtggacttctgtggctcccattttctttttttgtttgtttttttgtttttgagacagagtctcactctgttgccaaggctggagtgtagtggtgcaatctcagcttactgcaacctccgcctcctggattcaagcaattctcctgcctcagcctcctgagtagctggattacaggtgcatgcctccatgcccagctaatttttgtatttttagtagagatggggttttgccatgttggccaggctggtctcaaactcctgacctcaggtgatccacccgcctcggcctcccaaagtgctgggattacaagtgtgacccactgtgcccggccggctcccatttttcttattctctgagcactgacagctgaaggagacaatactcagaacccaagggctgctgcgtttatgaatagcccatcatttcctgaggcaggaatgataggacctccaaaaacaagaatatgttagctgcccagacccccatgtggtgaaatgtcagtctgacacacacagctcagagaacaccttgttgttcaacagtcttagaggatgtgtagatttccgtccagtccaaactgctgtgtgcagtgacaaggccaggcaaaggtgctcttgggccagtggagcagacagagggctgatttggtatgcagcatgcctgctgggacaggtgagcatggtctctgctagaagaaagagccatttgatatgacaggggcacactgcccccccagggcccagcatggacaggagctccccatgatgagcggagggggtgtgccgtcttcagaggctcaggcaggcaatgggactggcaaagcctggcattcagtggccctgcctggctcctgcagtggattcagagaagctaggattcagaggagctaggattcagaggagctaggatt

SEQ ID NO: 57210 - DNA, 1041 bp, Homo sapiens
ccttatttgagttcctttcttgtttttttccaaaaactgcatatctcaccaagtacgaattatttaaaagaaaacaataaagaactaagattttcacctttggctgagttggaagtaaaggttcacactgggaatgggagaaaataagaggaatttgcaggggcaaatgctaggattttaatatctcccacatcccgtgatgcatattgtgcctgatatctaaaacaaaaccaaatttaaaaacagctatttgggtgaggttagagagacaatgtattgcacaccagcaaaatgagggtgatgtgagcatgagcctgcaagttgcatcgttgtcttggaggtcctcacatacacaaagatgttctgttttcactttgcttgtccatctcccacacatatacaacttgaaattcatttttaataagacttcagtcccagtggtaggcagataggagagacattaaagagaagaaacttcatattgagagtagggcattggtcagttattagcatttattaggctgggtccctgcattgtagcaggttcattatgtctgttgattaaattaacgcaggacactatactgtaatagcaagtggagatggatttgattcctttcctaagagagtcaatttgctggtactccccaatcatgccgtagaaccagttgcccatccatagagactgccatagaatatatgtttgaataattaagttgtagttttatagttaaatcctttttaaacctacttcctcattctcattagaaacactgtactgatccatgttcttttcttctgcttcattacctaagatttttggaatttatctgctttttatttattttttaaaattaattaatatttttttgagatggagtcccattctgttgctcaggctggagtgcagtggcgtgatctcagctcagtgcaacctcggtcgcccaggtttaagtgattctcatgcctcagcctcccgagtagctgggactgcaggcatgtgccacagcacctggctaatttttgtatttctagtagagg

SEQ ID NO: 57211 - DNA, 1038 bp, Homo sapiens
aaaataaaagaagaagaaagaaagagagaacgagaaaggagaagggagggaggcaggaaggaaggaaggaaggagagagagagagagaaactgccctttgggtagcatggcatatgccgcttctcctgttcgcagtcagatcttcctccctttatgtaaagagtctattcttaccactgctgacatctaaagagcacagaagcaagaattacagcttagagaagttctgcaagatagaagtaacaagggaagacagaagattgtctactctggggagttttctgctttagtgttcacaaaacatttcataatctgcagataaatgtgcaggctctgcaaaatagaacatgcaaatagttcttggtaaaatctatggatcaaagctatttctctttgcccttcaaatgatctagtttgctttttaaatatttgaacattttcctacaagttgtgacaatgacacaagtttaaacacaccatgccttttataaatagatcctaacctgaaaaagcttccaccctgactgactcttgtctgaggtttgagaggaaaagagagatttaaagggaagctaattaatacaaatcttctaaaacatacatgaggctaggaatatattaagtgcttaattaaaaaacaatgtaatcccagcactttgggaggccgaggcgggcggatcacgaggtcaggagatcgagaccatcctggcgaacacggtgaaaccccgtctctactaaaaatacaaaaaaaatttagccgggcgtggtggcaggcgcctgtagtcccagctactcgggaggctgaggcaggagaatggtgtgaacccggggggcggagcttgcggtgagccgtgaccgcgccactgcactcctgcctgggagacagcgagactccatctcaaaaaaaaaaaaaaaaaaaatgttctattgggtttaacacctaagtcaatgaagtcgtatcagttgaggaaatagtcacaaaagaggttttgtaaatggcagaattgatgagtgctacagttcacaaattttctacca

SEQ ID NO: 57212 - DNA, 1104 bp, Homo sapiens
aaaagaagaaaaaaagcgttcccccccacccaatatttcaaatgacaagagtccaaaaaagaaaagaaaaaggaagatgattggtaaaaaggagggaagtgcattatgtatacagaaagttttcgcatagatgttagttgcttcaagtcccaaataaacaacaactaaatgaattagcacttggaggaaaaaccccttccagttattgagttgggtaaatgtttagtcttcttaaagtgttactaagagattaaggaaaatgtcgttggctatatgccaacaataatacatgcaacatacataccattatcacacataattaactgctcttaagaaatatgaaaactgaggaacggaactcttatgttgttaaatgtcatacaattacttgaaacttgaattagggtttcatagatataaatgaggcagggtccctacatctgccaataattttcacagcttattgtaaaagcagtgaagttttcacttggactttgaaaagaaaaaaacatatgactcatgagcaaggccatggatacactaaattcttatgcctactgaatttgagtttgaataattaccccaaatctgtttctcacattgataacttataaaacaatacttttattaaccttaagagttgtgttaagttcaaatttgtgaacttggtaagattaagaatttgtatataggccgggcgtggtggctcacacttgtaatcccaacactttgggaggctgaggcaggcagatcacctgaggtcaggagtgcaagaccagcctgaccaacatggtgaagctggtcgctactaaaaatacaaaaaaattagccgggcgtggttgtgggcacctgtaattccagctactcaggaggctgaggctggggaatcacttgaacccaggaggcagtggttgcagtgagccaagatcgcaccactgcactccagcctgggcgacagagggagatactatctcaaaagaaaaaaagaatttgtatataaaaatagagaaaaaagtttgtcctcaatatcttttataaaataagtgtcccttcccattccttgataaatgaaagcagtggctttttataccaaattttctttac

SEQ ID NO: 57213 - DNA, 1316 bp, Homo sapiens
gtctcctctgtcccccaggctggagagcagtgatatgatcttggctcagtgcaccctccacctcctgggttcaagtgatcctcctgcctcagcctcctaagtagctgggattacaagcatgcgccaccacacccagctaatttttgtatttttggtagagatggtgtttcaccatgttggccagaccagtctcaaactcctgacctcaagtgatccgcctacctcggcctctcagagtgctgggattacaggtgtgagccactgtgcctggcctgattttctagtttgaagtggttgttgaaaagtcttatgccattcaaaatcttcatccttcatatgtgacctggccctacgatcttttgtcttcagtatatctgctatgtccctgatattttatgtatcttgtattgactttactttatttcttctacactgaatttagtgggcgctttcaaccagcagtgtccatgattatatggagaggagatatgatctagtttagaggtcagcagactttttctttgaaggttaggtagtattttaggcattttgggcaatacaatccattactgctactcagctttgctgttgtctagtgaaatcaagcataagcagtgtgggactgtggtttgctgacacctgatcttatacaagcagaaggattagcctttgcttcaccaggagtagggagagttactatagaaataggagagaagacaaagtatatggatagacacatgatggtggtagcttgagaacgttctcatgagtgtttcaatttacctttgtgtatagaggccaagctcatcatctgagagtaaggaagaatgggaatatgtattagaggtttgagaaggaataatacatgacatagtcacttgtcaaagagtaaaaaagtgaatagaagagggagagtatgattgccaggcagcagtaagggctcacttgagatacatggttctgaattttatgttcctgatttattttatttatttatttatttatttgagacagagtctcactctgtcgcctaggctggagtgcagtggcgcgatctcggctcactgcaacttccatctcctgggttcaggtggttctcctgcctcagcctcccaagtagctgggactacagttgcgtgccaccacatccggctaattttttgtttttttagtagagacagggtttcaccatgttagccaggatggtctcagatctcctgacctcgtgatctgcccatcttggcctcccaaagtgctgggattacaggcgtgagccaccacactcggccatgttcctgattttaataggagtacct

SEQ ID NO: 57214 - DNA, 1009 bp, Homo sapiens
aaaatagatacaattttagttctttcgggaacaaaatatagtgtattcattgtgctatatacaagtctgtagtggccctgaacactgtaatgactatgagtttccatttatgtcctacatgatgtaggtagtattagtcctgtgattttcaagtaagttacttcctgtcttagtatctcaaattcgatacctataaatgaaggggtgggccgaaatgatcgtcagttcccatcatttccacaattctgtgttttcctaacttttcccccatacctcagagggctctctaagtagaaccattggattagcaatagaagaagaacaatgtattctataaataaagcacaagaagaaaatggcttttgtatttaaatggcaaaaagaaaaaaccagaaatacttatttcttctcctccctgaaaaaaaaaatcaaaaaaatgaaattctttatgcaaattacgtttttgacctaaaattcacctgtcttcttcttaggtgtattttttccttttgaatgaactgcaacagttgtattgctgctttatatgagatcagtgctgtctagcagaaatatagtataagccatttatataactttgttttctggtagccacattataaggtaaaaagaaagatgaaattgattttaatgattttatgtaacctgctacatacaaaatattatcgtttcaacttgtaatcagtgtaaaaaattattgagatatcttacattcttttttctccgctaagccttcaaatccaacatatacaacaattgcagtacatctttatttggagtagctatatttcaagtgcttagtagccattggtggctaggagcttggatattgaagatccagataatactacttgaagacatagacttcacatctatgggaaatttttattcccttggggcatctgatagtactttgtgaaacttagaaataaaccttaaaattcccttgacctttactccatttatctaatccctttgatttttttaacct

SEQ ID NO: 57215 - DNA, 1164 bp, Homo sapiens
gcatcacccttagaacattccttttaagagtattggaacctacaagatgaaatttagatcaagaatttctttgcagaacaaacctacaagatataaggaagctctgacttctgtgaattcagtaattctttcatagggtaggtggtcatcagttgtgggattttgccctccctgtgcttccaaaataaatgcaagtgaaaattgggcttagtagtttcatagtttaaaattaatcaatgaatattctttcaaatacacttataatgactgttaagaaattgcctttatatatgatttactatttgaagatttctctttactacgtgattttaaaattgcaagttaaatccattgtaacaaattttaaggggtatcaaggctgctaaatttcatttagcctttgctaaaatggaggcttatttacatagtatactcaaaacagttttattcctaagtcatacccttgaaaaaagcatcctttgagttgttgagtttacttcaaccttttgatgttcatatgagatattttagtatagactaattcttgaccaggctgaactgtcaatatgcaagatggcatctgtggcataatttatttcctggattgtattctagtgtgacttggaggaagatcttagaatctgaaacagaaagagatagagacaaagggaaaagcaatttttttttttttaatcacagagaaatttagcagctcttgagaggtagaggtggggcagggcaaaattcctttaatgccaggtaaccataaatgcatgtcaaagtttaagaagaaatagtgggttagttcttgggagtcccggtgcaattttagcttcataattcattatgtagttttgtttttattgctgttttttaactttttattttgacataatagattcacaggaagttgcaacaaaatagtacagagataattagaggcccataggcagttataaaagtagtccagaaaagtcccatttacttactcttcattcagttttcctcagcagttacatcttacataactatagtacaatatcaaaaccaagaaattgatatttttataatacgtgtctgtataaatctgtgatttttgtcatatatgtagatttatctaaccactacctcagtcaagattcagaactattgcatcaccacaaa

SEQ ID NO: 57216 - DNA, 1415 bp, Homo sapiens
aaaaatgtaaggaattaaaggattttacagttattaggactagccatgactagatttatcaagaaaaagtgttaatcgcaaaatttggtgtttatttcttaacattatgcaagaatgatgtttatctttgaggtggcaagggacagttcattaaaatacttggacatttgagctaaatatgaatgcataattttctaaaattaggaaggtgattaataaaaattgattaatttaaaatagtaaacacgaaaatgttataatttattacttagttaattttatgaacatacaaaggatatcttataaataatgaatttggattattaatagacaaatctgattttgtcttatttatatactaccaagatataattaaagaagatataactttgaaattaaaatccatattcacagtaaatacaacttcagttcaggtctttgctacaataaaatgagatttgtaaataacttaggtttttctgtttgttttttagttattaagtcgaaaagacaaaactacctttgaaaaattagaatatgtaatgagtaaagaagataactacaaaagactcagagactatataagtagcttaaagatgacaccttgcattccctatttaggtgagttatgtcactgtgtgttttttgtttctagttgttactcttccttactcagtaatttatgtgaaattcaaggtattttttaaatgtttgtatcttttaaataaattacttcaagattggtaagctgaaaaaaatgactaaagatagttgttaccctgttacctggaatgtattttcatattagattagccttttgccctcaaggtttttcttagactattatgttttcttagagtaggaccatatagtaaaacaatatttttagctgttttagtaatgcttttaaagaatataatagttcgtaatgatgtttaatacattaaggaaattgatcaaagtccttatatagtgaggagatattttagtgtgaattctgaagtagtctcagtgcatattggtattgttgtttacctgaatgaaatgagttgattcactgtggcaatttagcttcgtgctgagacagttctgtatttcgcatctcatctaattaagaatttatctctttattatatatcttgtagtgcttataaattcaagaagtatttaaccagtaatattataagattatttttaacaaaatatgaataatgctttgttaggtgtttgaatgaaaagaagacccaaataagttgttcttttaaataggtatgtaaatcaaacataaggaaaatacatgatacatacctagcatacattaaaatgaattgatttgatcctatgtagagagtaatcaaatgatgaagatttggtgctttctggtcctccccaccccccagattttgtgtttgatg

SEQ ID NO: 57217 - DNA, 1061 bp, Homo sapiens
gtcctgtttctttgataaacagcttaggatcatagtaagcatgactcttatcagagaggctctaagctggatattaggagaaagacattctgtatgtgctttacatttttaggttgttgctgtcattgtttgttttgttttgttttgtttgttttttgagacagcctcgctctgtttcctaggctggagctcagaagtgcgatcgctgcttgctgcagcctctgccttccaagttcaagtgattctcctgcttcagcctcccaagtagctgggattacaggcaagcaccaccacgcccagctaatttttgtatttttagtagagacagggtttcgccatgttggccaggctggtcttgaactcctggcctcaagtgatccgcccatctcagtctcccaaagtgctgggattgtaggcatgagccatcacacccagcgtggtgctctgtgttttaccatagccttggctgtgcccatacttgcaaatataatttgaggagagaaggaatagggaatttttcaaaaataataccttcacaattcagaagaatgtgtactttttatagtatgaagaacattagactgagaattggcaatcctcaattccacaatgactctacagtccttatttttcaagtcattgaattttcttctttgagccttgttctctttacctagaaatagcatgcataggactagaatcatgttctccttaaggctggatgggagcattgtgatatcttctttcttttcttttttttttttttttttgcgacagagtctcgctctgttgtccaggctagagtgcagtggcacagtctcagctcactgcaacctccgcctcctgggttcaagtgattctcctgcctcagcctcccaggtagctgggattacaggcatgcaccaccatgcccagctaatttttgtatttttagtcgagatggggtttcaccatattggccaggctagtcttgaattcctgacctcaagttgtccgcccacctcagcctcccaaattgctgggattataggcatgagtgatggcacccagctgtagtgatg

SEQ ID NO: 57218 - DNA, 1086 bp, Homo sapiens
acattcatgcactctcatgcacacacagagagaaagttggggaagaaagcactagccaagttggagtttagtagaatcaggaaaggttttctagtggagaatatacctcttctgtctcagcccccgacctgaaacaaagagtaatcatacctacgggttaaagcaaatgcggaaaatgttgaggtacagatgttaattttgagaaaatattacaagcattgtttttctcgtatcttccatttttcccatcatctccaatgactccttctttttttcagttccctttcattttatatgttctcatgatgtaggatcttacgtttcactctcaccgtgtagttctgcttcactttatacttaagccaatttaaaagtatctcattcttgttgtcacctttttctccatcttcactctctagaaattttcctaataaggtcaccagtgacttcctggttgaaacattttatagatgtttctcaagccccatcttaattgtgtgagggttggtgtcaattatttctcctccttgaaattctccacaagtagcaccagtctttcttggtttcccttctacatttctggcttttattagctgctcttactctacctttgtctcttaaatgtattcttgagaggtctcagtccacttcttttctttctttcttttttttatttttatttttcagagacagggtctcactctgtcatccaggctggtgtgcagtggcatgatcagctcactgcagcttcaaacttctggactcaagcgatcctcccaccttagcctctgcagtagctgagactacaggtgtgcaccaccaagcacagctaattttaaaattttttttgtagagacaggatctcgccatgttgcccaggctgatctcaaactcctggcctcaagcagtcttcctgcttcagcctcccaaagtgctgggattacaggtgtgagccactgggctcagccagtccacttcttttcttactctatataatcggagtggtctcattcaggttttttctgtatattgcctgatcttccaaatctagactgaatctgtctaactttgtatatcactgtatat

SEQ ID NO: 57219 - DNA, 1032 bp, Homo sapiens
tatagtgcatagaaaaaaggtaaccgctaatgatttcttaacatgaggtatatggtccaaactaatagttttttctcccctaaaaatgagaaccaaaacctaccaatttttgtgaagcttgtaaaagggagtagagtcctatatgctggtaaaactcttattttgataccaccaaatttatctgtagttcaatgtggattaaattataagaagtagaaatgttttctcggctctcaactcatcatcccttgaaaaattgtctcttctgttggtttgcattcaaggtaaaaattagtcagcttggacaatatcgtgaaaaattcttagaataaggatataatttgtctagagaggaatagttggcaaatctgaaggaaaaaattgctttataagagaattattgcttttaaatctgaaagtcattaacaacacttatttgttcttgtcattggagaacagtcttaaggggcttgttgaagaatttggcatggtaagttttattttgctgacgagagcaaactagaatattgtgaaaaaaataatttagttatatgaaacatcataaatattctttaatgtgctttttctaagcctcatttctactttatgtactacaaagatgcagtagctcgaccaagaaagcatattttggctaggtgcggtggttcatgcctgtcatcctagcactttgggaggctgaggcaggtggatcacctgaggtcaggagttcgagaccagcctggccaacatggcaaaaccacgtctctactaaaaaatacaaaaaattagctgggtgtggtggcacacgcctgtattcccactccagcttgggtgacagagcaagactccatctcaaaaaaaaaaaaaaaaccatattttttgaactgtggaaatcagtaaattgttgcagtactctgtactgcttcctattaagtagaagcagaatgtaacagaaaagtttttgtaaaatctctagccctctgtagaatgtgagtatactcttttggtggatctagatatgactcctttttc

SEQ ID NO: 57220 - DNA, 1043 bp, Homo sapiens
aggttttcatgatagtacttttttgttagaagagaaatacttttcttataaccctctgtaatatagtgttccttgcctactgctctctgaaaagcaccctgtttatgatattttcattaatctgtctcctcctcaacagaatgtaagcccctatttgtcttggtttaagggtttatccttacagcatctagaacaaaagtagtcatataataaatgtttcttggttcaactaattatccctttctagctcttcccattgtttcagtgattttgatttaatttctgtttaaacaataaatgtatttgtgtggcatatttgcatgggtcaactccttacccacccctgattttttttgttgttgttattttgttttgtttttggtgcctcagctggcacctagtatttacttagcactgtgcttggtgctaaatatatagcaagagattacaatgggctttgtccctgcctttatagaacttaatatctctggaattacaaaggtccaggatatcattaacctcatgaataatctctcctcttttctatatcctggaagagatgcatatcattgccttgtgccttacattgttagtggtgtccttatcatagttaatgacatttttaaagcatacctaaaatgataagaatcttaccgatttggttttcagtcgtttttgcatatattgaattgttaaatattcagtagaatatagttatttagttttagaaatttctaactcatgtaaaaatgttttcaagaataatagttttgtattcatatttctattcagataatttcaacaaagtccaagtctttttgctgatctgtaggaattaaaaggagatttttcctctcgtttgatagaatttttcttcaatatgtaaggctctgacactgatctcagaaatgcctgttggtcaataaatgtcattggcttttaatatttcaagttttattccattttcctttctttagtttgatttgtcaataatatacattatggattaccttaccctattcttttaattatatgttgttata

SEQ ID NO: 57221 - DNA, 1449 bp, Homo sapiens
ttaaattggcgagtgtctctcttcagtcaataggcttgatcatcatctgaactgctcttaaggagtatgacccgcctctgtattcggcccagaaaattccatcttggtgcttgcttctgtaatggcctcctctgtaccatactccatttaggttagaatgtgcacaggcattgtaccaccagcctcctttatgaaagtgggcgcagtttcctttgaggaaaaaatacagatataaatgtaaaagtttcttctaggtgtggtactctgcaatcataaaaaacttattctacctttaatttgaacttcccttactaatcccagttacctttatctcagcagttttaaatgccttcacttacttgatggctgttgcatcaactgcttgaaaaatcacttgaattgcctttttttaactctttgcttgcttacaatgtacttttttaaaaagggggatttaattttctagttagcagagtagatgcaagcagtgtttatatgtgaaagagttacagagggagaaattgggaaggaaagatacagaagaagataaaagtctgaggaaaattgaattgtcaaaataaaatagcaaaaaataatacaaagtaaaataaaaccagcagtcaaatgggtttctgtaaataagacatatgttatggtctatctctcctcttttctcgtttaccagtgtaaaattggttaaaatagagacctgtgtgctgtttgccaaaatacagctggagagaaaaaccagtttgggacagggatgggggagaattgttgggtggaggggaggaggggatctctgtatcaggacgagaagaaacctgggttaaaaagtcaaaagcatatgaaaactaaatttgaaattatgtggatggtctagttgtttctttctaatgaaaatattaatttcccctttgaatcaagcttttttgttattcctatgccacatgtcacagtcatcttggttttccccctcaaagaaatgctcttacaccatgtatccaaatggcttgcatccttcatttcttgcgactctttattcaaatgttgctttctcacagcagattttcctggcgaacccatataaaatagctgccatcccaggccttgctgcccaccactttctattttcttactcagttttatttttgagagtacttattcccacctaacaaattgttttgtctctcctccagtgagtaagctccaaagggcgggaactttgttcactgttatatccctagcacctacaacagtgcctggcacgtggtaggtgttcagttagtatttgttatgaattgtaggcacttgcattttatttccagattaatgtgtttctgttttgctttgtgtttttttcccagaactttgtttttcacatagatcacactttgggattgccttatagaagaaatcctaaaagctatttctttcagtaggttggtt

SEQ ID NO: 57222 - DNA, 1868 bp, Homo sapiens
aataaaagactaacccaaaatgcaggcaccaaataacattaatagttaagaatttcattgattgcagcttgtcaggtgtattattacattctcaaacattttgtttttaaggtagagaagaaggtaatgtgtttgaaaaatgttttttatctaaatactattttttataacttcatgggttttttgaggtagatttttcttataaccatttttaaagaaaataaaagattgtcataacatcttttataaaatgtgatatgcataattactgtcttcaccatttttaaatgtacagtttattggcattaagaacatttatattgtacagccatcaccaccatccttctccagaactcttcatcttgcaaaactgtaactattaaataaccattaaacaactccccattcaccctccgcctaacatctggcagccacaattctactttctgtctatgaatttgaccactctaaatacttcatataagtagagtctcatacagtgtttatcttttgtaactggctaaacacctcttaaaatatacattgttgtatattttcaccttatgcatgtggagactttagaatgaccatgtacctccatgtaaagtacagtaataggaatttcttggtgccagagcatacataagtacaccagtagccatccatctttaccctttttgtgcaagcacctaaacagcctgagacatttttttccagacagatgtaaaaataacataagtgaataattgagcacattgtgtaaggaaaatagccagcctatttgttgttgcttgtagtaatttaatttagtaagcatcacagaatattagaatttgaaaaggatattagaataatccagtccagcactctcattatacaaatgagaaaacacaaactggcagtgacttacccaaggtcacataacaaaggtagtggtagaaccaggtgttcttaattccatgctctttcccttatatgttcattaatgtactaattagtatagtaattcttatggtctagcagattatccctttgaatttaagagatccacatttatagaataaaataagtaaaaagttaatgtttacataaaacaaataatgaataacagaaaaagttatctgcccttaatttttgtgttaaagaaagtttcactggggataggtacaccatgttttcattaaaacaaaatgtgtttaagaggacttttgacatactaaatccctaatatgaggtttaattctgtagcattcgtgggtttttttttttgtactaatgctaagtgtataataaaacatagaattggtatgtttcattttgtataaacattttcttagaaaagtttgtcagtgtttaaaaatgtgaatagtgatttctgctagaattggttataccatccactcaagcttcagggatcacatagaatactccatggcagttgtcttcatacttacataattgtatacctcatcagttaaaaaaattcacacagctcaattatgtttatttataacttacgtatacaaactactgataaattatataaaagcttacataaaacaaaatttttaaaggatatcaaaagcaattttttttctgttttttatttctatacccagtgggtcactttatacactgcattttcctttggaaatcaaagggattgaggtttgtttgttgttgttgtagttgttgttgttgtttgagtctcactctgttgcccaggctggagtgcagtggtgcgatctcggctcactgcaacctccgccccccaggttcaagtgattctcctgcctcagcctcctgaatagctaggattacaggcacgcaccaccatgcccaatacttttttgtatttttagtagaga

SEQ ID NO: 57223 - DNA, 1828 bp, Homo sapiens
caaaattatttctacctaaaatattacatatttttggccttttagtcatgaatttaattacatcttctgggttcttattttctattgttaataccacttacataatgcttttgtgtgtatatcaataacttagcttttccaagtgattccatttgtagcaagtttaatttctgtcatccaaattaaattactattacatgtaagcctggaaagctatttaaaattttgagttggaacaagaaatgccatagattaatcttaaatctgtacaagaatttctgcttaatatttggttatactgtaattgagattttgttgcaaagactttcaactatttttgtatcttagctttgttttatgactacactgagaaatccaacagtttatgtatatcttcagcacacacactgtggctgcaggaagagaaactaattgtgttcacgactatttagtttgtattcctttgtttttaatcattgtgctgtaagccttatacatttaatctgttacttgttaaaatttctttctactgtcactaaagcacttgttttcagaaacccagcatggcatgcatgtatcagtctgtaatcatatacactaaacatcattaaattgaacctcaaataatgcattaaccattgcacagtacttaatgtttttatgtcaagttgcaagataaaacctttttcagatgagataaactgtagtatattccaaaggtctttgtttagtaaaagattctgaaatttctactacaaatataaaatagttatgcatttgctatacataatatttttaaataaaagaaatattaaatacctttttgtgtctgttgattcagtgaatccagaaacttgctgcccttattcttgattttaaaaatcagtgtagaagtttgttcatctgtgactttaatggcagctgcatttttgttttggaccgttgaatccaagctgtaagaaggaacttctttttccttttacaatactaatcaattgaatttgacaagccacctatgtaattttaagtagtatagtggaagttctggtctgtgggccgtctttaatccagcagagaaagcgttgtggctttgctctgtctgccacatggagaaatgcagtaaccagctgcagctgacccagattgtatatacagtacccctgaatagtgattccctctttctcagtagactcaagttcagcccacatattacatcaccaaaaattgctggagactgggggcgggaatctccttaggatttcctctttgtagccttaaataggggggtgggatcagcaggaggttgaatagttttgaacaaggagagattgtgtgcaggttgaaggaagggcaccatctggaaacaaactatcatagttcagcgggcaattataaaacaaacattttagtctgctggccagagatcttttaagttgaataccgaaaaaaaaaatagtgctccacttcacttagaagtagttgcaggctgatgagtttggtttttgttaacaaagaacaagagctagactttgtcaggaggcagccacctaaataatgtaataaatactctttatagcctagaagaatttgtaaacattttactaagttgctaatgaaggttttaaacttacaagaaacttgatgttgttgtagtatgttatgtcttactgtgtaatgtgtcttaagataaaacagcctttatatataattaccaaacataagtgaaattctttcagatgcttaagacttttaaatattacattctggtgttacataatgtcatatcctcctattctacaaaatgacctctcctctctgtaaaaggtca

SEQ ID NO: 57224 - DNA, 1173 bp, Homo sapiens
aatacagaattagccgggcatggtgcatgcctgtaatcccagctgcttgggaggctgaggcaggagaatcacttgaacacaggaggcagaggttgcagtgagccgagagtgcaccattgcactccagcctgggcaaaaagagcaaaactccgtctaaaaaaaaaaaaaaaaaaaaagattgtttgaaatcatttttaaaatagctgatatccatttttatctccttatatccacagtatttcccaaagatgggagaggaaatttttaaattattaaccctttcatctttcgttgatacagtttacatcaaaactgctgggtttttttttaaggtaggaggataaagagcttatttctcttgaagcttcactcttttcttttagcttcatttgttactttttttaaaaagtttatttagctttattatcccatttgttcgcaagctttcaaattgaattttgcactttcacaaatattttttccaataaaaggtcgtgtttcaaaaatttatcgaagtgaaagactagattatttttcagtgttaatgcattacatagaaatattttttatcttcctttggtaatgattattaacttcctttttccagattttgacagtttttaaaaaattttgtagaacagaattagtcccagtaaatggctatagaaattctggaaaacatctaggaataatttttctaaatgcatctaaaattttactgatgtttgaaaatgcctttattgccatcttctctctcacaccataatagcaacactgtatttctgtaccaattttcagtctacaaaaagtttctacatggttacttacttgaaaatgtatgaagtcaatgaagaagctttttaagactggagttgtttcacaaatctgttgccctaggttgtttttcaagtttgatggtctgtgtcttatacttaccactatttttcccttctctctaattactgacatagaactcctacctaataaatacttaagttttgtccagtgagatgtagaacagatatcttaaaattcaaaatgtgagtaagtagctattagtcatttatctggctcaagaaacttactgaatttaaaagaatttaaagtttattagattgaaatgtaatctaagaaaattttgcacagtttatagaggatggcaaattttttgtg

SEQ ID NO: 57225 - DNA, 1054 bp, Homo sapiens
atagggccaggtttcctaaaacattttccctaaactgttcatttgaggcttttatggtaagatctgagtatgacagttaggtaaatcttttatgtcctaaatctttatataaagagcagtttttaaattagtaacaataataaaagatatgaacttttttttctgtttctagtttcattcataaaatgaacacagcagaatttaagagtgcaacgtttccaaatgcaggaccaagacatctgttagatgatagcgtcatggagccccatgcgccatctcgaggccaagctgaaagttctactctttctagtggaatatcaataggtgagaaatacttctctgagagggttgcaatttaactttaaataaaaatgttaataaaacttggctggaaaaaaaccccacccacacacagagaaaatttggttaaaaaaacaaagtagcagttaaatatgggatgaagttaataatttgtgatggttttaaaagtgcttgctgtttttaactccagaaggggaagcatttgaagaaggtggaaaaagaacatatgggctggttgaattagttaactgcatgtgatttggatatggggaggaggaagagtgtggagtcaagaatgacttccggttatttgggttaaacaagtataatagttagatgatgatgctattaccaaggtagagaagacagagtaataatctgtgggcagtgaagcgtttgtgaatttggggaatcaggtgtgttttggacatgtttagtccctatggagatgtcaggtaggttgttgaatatgtgaatctggagctcggggataaggtcagatctgaagatatacgagaggtagcatatttataagccatgattggttgagggtacctaaagagagagtgtacataaataaaaaaacattctcacatttagaagtctgattattttttaaaagaaggatgagtcatcaaaggaaactaaaaaggagagatcagtgaagtaaggggaaaaaaacaaaagcccagtagatgaagtatctcaaggaggaggaaagtactgaatgtgt

SEQ ID NO: 57226 - DNA, 1039 bp, Homo sapiens
ttttgctttataacaggtgttttgctttgcagacatgtgtggctaaaaaaagctacttttcttatgccaagtttaaaatagtgggctcttagaacattttgagaacagtgaaatgaatgctgcccagcaagattcagacatgaaataatagaaagtgaataaagaactaggatataaagtactactcatggatagtgaacttgaaaaatgtactctgaatgttgacataccattttctgttcttattttctagacagacatcaaatacattgtcttattttctagacagaaatcaaatacattgttgtctttttttctagacagacatcaaatacattgtttaagttgctaaaataatgcttttcctttaaaacatcatttatcaacagtgctttcgggttttcctaggcaaagaagtatcagtatttttatgtgtctgtttttattttttttgtttttaactattatgtgccattttggataagtattaactcatcatttttatcatttattggctttgtcagttaatgtagaaataatataacgcctatattactcagttcatttcttttatttactataaaggataaagaggaaaataaagttttcctcatgagtttacaagccacattgcttttaggtgtcttcatagggacatataataaaaatgaattacttatataaatccgggcatcatatttaaactagaatccaagaagtggtatagaaacgtaagaatttttgaagtatttttgaggttttttttttattatttggctataaatagctctttaattcttttagcagatttgtgaaagtgaatgtatatgtaaatatatggtgtgtactaaatacctctaagtatttctagagtcaatagtagaagaaaaaattttttgaaatctatgctgcatgctttaaaaaagaaagaggaacaatcacatactatccttttgtaagatttagaaagctatattacaagaagaaactattatactgttctaggtattgataatgactgtgtgaataaaagtatatg

SEQ ID NO: 57227 - DNA, 1058 bp, Homo sapiens
acaccatttaaatgttattaaaatgtattgcagaaagctagtttttaaaatatattattattgactttattacttctttctgctattttagaattaaattaagcatgttttctttttttttttttgagcttgtatttttattttcagttttatatatacttaaatacttttaacaaatagaatcctcatttttcctaccaggacttaaagtttctatgtggaaaataaggttgcaacagtgatgcagtgtggcatgttaagaagaagaaaacaaatcttaaatttttaatttaatatttactaaagtgaattactgcattctttctaaattatactgttcaaatatgtaataaagtgtgttttttaaccatctgctgactttaataactttctaatcaactttttgtacagcttataaatttcaagattaataaacctttagaattgtcagtgtcttctcagctctgaataaagtaacaaacttttaaaattaagaataattacattttatttaagtacctacttgatgactattgtagacaaaagctcttatgtgttcttttcttcgttattatagttctgcagaatcagaagatttggcagtacatttatatccaggagctgttactattcaaggtgttctcaggagaaaaactttgttaaaagaaggcaaaaagcctacagtaagatttcatcatattatattttaatacacctctaaaaatatgcaaatttataagactctgtaaaagtactaaaacaattaaaataaaacctgattatagtagacttgaaataatattaaataaggtcctcccctcttatccttgggtcatccattccaagatcccccggggatgactgaaacctcagatagtaccaaaccaaattaccatcatttggaacatgtttctgttcatgtcttccattcacaaatataataccttttctatcttaactaagcacttaagcccacacagtaaccgtaacttttgcagtttgcgatgctatagcaaaactagcatgaatttctttttccttcttcacaatttcacaga

SEQ ID NO: 57228 - DNA, 1032 bp, Homo sapiens
acggtgttacttgactaaacatttggtgaagaaacaattacttcagaaagtgaaaaagttattttgagtgttagaatctcaaggaaaagctgaataatgcttaaatatagttaggctcttgagccattgaatgcagttattaaggaaagaatagaattcagcacaaattgtgaaataaaaagaacttaggtcaatgaaaaaaggaaataaagcttaatttagagcagcctatagtacatggatcctttcttttctcaatttgttttctcaccttaatacatataaccatttaaaatatcctcattatatgtcagtcttgaattaaagtcaatatagaaattacaaaatacacacagcacaaatgaatatctaatttcttaaaagagagaaagttgcctcctagactttccccaagagccctcaacagaactggaaatctgtaataatattgacaaatatcttgtaactaaagactaaaagcatagtctatcaatgttatatgactaatccttaattatactgaatagctagtgtttaagtattaaacatattgaagcattctggcatgttaaaacttaacattaacatctactaatatttaggccaggtgtgggggctcatgcctgcaatcccagcactttgggaagccaaggcaggcacatcacttgaggtcaggagttcgagaccagcctagccaacatggtgaaaccccgtctctactaaaaatacaaaaaacttagctgggcatggtggtgcacacctgtaatcccagcttattgggaggccgagacacgagaatctcataaagctgggaggcagaggttgcaatgagctgagattgtgccactgcactccagcctgggcgacagagcgagactccatctcaaaaaaaaaaaaatctaatatttagatcatctaagtagtaagtattcagaaccaatattctgcagtcttatccacacagatctagagatgccacacagttattttatgtaggtgtatttcattctaaagaatatttaaggagacaaa

SEQ ID NO: 57229 - DNA, 1678 bp, Homo sapiens
atacttactcttgctctcatttattcattcagtaaacgtctactgagccccctgtgttagacaagaaagatattgtctctaccccttctcctgtatagatgtcattttactagaaagagtattaactcattttggtgattttctctcaaaaatgttctagcatgttaattattcataaactattgaagctccttatatcaagttccttttaaaagatacttaagtagaaagattgggcttgcctaaataacaaggaaagataagaaatactcctttgaaaaacaacttttaaactcagtttttaatgcttatattttttaggttcctacaaacttgatgacttttgagtagaagcctgagaaaaaaagagaggtgaactgttgcttctacgtgagcatgaggacctgataaaagagcgccagctataaaccatcctgtgccaggaagagcccagaggctctgtctcagtcgttggagttctcaaccaaaaaagcactaatttcagggaatgatttgagatattcccagagaacaaattggagttgcaaaacaaactgccatgaaccatgcttcttatctcagaactgacctgtggaaaccactgccttaaaagaatgaaaggaaaaccaacatgaaacaccaaatagtgtgtgtgaatcttctggcggtgctgtgcttggaatagatcgtagctaatttgcatttcttttaactttgtaataattttagaggggggaattgccttttttagatatgctttaaaaaggaaaaacatactcttgtggattccatcaggagctggttttgaaccgaggtgaagagacttagcagggattgtaccagcagcccacctgcaaggtttgttctccctctagtagtctgcaacctcactggctttctcacagcaagagtgtaggaatgagaaatgttagtcatgtgagttcttgggtttgtttgggattgggtgggggtgtttgttttgttttggatgaggggagaatttttttaaacactaaacttctgaaatgtagtactgtaaggggaacattatttcctgcaggaggtacaaaggctgtgtgttcatttgccagacgctttttttttaaataggttccagaaaacatggttgtttctaactagggttaaagtttagctttctatatgaattcattgttggaccacagatctgcttaagtaaagagctataatcccaacctaaacttttctgagattttacaataattagatctttttccaagttaattgggttttcccttctcccagtcataggtggtttttatcatcaagacagactgatattttgtcaggatattttcttttacagtgtttgatgtgcataatgccagagttatttttttattattcattttctctctttttgttcaatatgagattcaggatcatatttgtttaaaaggtaacacatagagatgtatgtatatattttgttataagacatacaaaataattttaagagggataaaggtgaaaatatcagattctggaaattttaagtatctaaactttatacttgtatgatttaccataaacataccaaaacatttttctgaaaatttactgtcggtctctgacatgaaaccgtattttgtcagtagttgaccaagcagttttatgagaactcttctatgcaatgatg

SEQ ID NO: 57230 - DNA, 1026 bp, Homo sapiens
tgatatctactaatagacttctgttactttgggcctcacataaaatttctcacattcgtattcttagagaattttatacttttttattataagtattttgcccttgagtccatgaaacttcaatagaaaatattgcttatacaataattagcttaaaatccatccaaaggaaaagagaagagctttttttgagtgttaagttttttaatttagtattctgtttggaaaagatgttaagagttcaaatatgcttcttatgtaacagaaataccattatttctggggtttagtgacacaggctggagaggacaaaagtttcctgtcctgaatgatttttcaattaatgctctaagcttaacccatgttgggtaatagaaagacatagccagcagtattactacgtagaccttgcacatcttacttttgttttgcatttttaaaaatttcttaatttgtttatttctcttcagaaatagcgtttttaacagtgtatgtgcttttttaaaaagtattgtgaatgagaaccctgtggattttttttatttcatttgtttgtcataataagctaacgtagaaatgttgtaggttaaccatatctgtggaaatatgcagttggaagtcagagcctgacatcacatagttttgccaaagggagagagctaagctggaagatgtttttgatactttcggctctaaacattaatggatgtttgcgtagagtaagatagcgttcaaatttggttaatagtttatagatagacttgtggcctctgactgactaaatttcttaacagcacagaagtcgttgtttttctgtctttaaaatttattcattcagaaaattagtcattgctttttaagattattttagcatttgaagcaaattgaaaacagaaaagtgacttaaaatagtgtaggtgaattttttatctataatttaccaaataatacctgataataattcaaagaaaatatgttaccaaaatatattaaatatataggtagttcattcgtgggaagatgaat

SEQ ID NO: 57231 - DNA, 1116 bp, Homo sapiens
aaatagctgataataagtcagactctcaagagtttctgtaccttgattattgacaaattcattgttttacatcctactaaagaacatgtgtgtggggagggggtggggaactggttcacaacataatctgaaggagatcaaacatctgtaaggacaggtacccagtgatgataatatatctgaaaacacaagccatttttattctttatcccaattaacttgaggtactctaatgatgaagcactcgattgcactatgacctccttgagtgatgtgcagcttggttcctctctcactttttgtttctttttaatatgcaaatgtgagtgtgcgatcttcagtgtgtctgcataagctaacttaagatgaatttaagtacagttttctgaaatatttctattgaaataaattacttaaaattatagattgggtgaggatgtttttgttactgtatttgcatttttatcatgaacttttaaggtgcaaataaactttaagttgatttttttcccctttctaaggtagtcaacaaggctattgttggtgcagggaaagctctgaaaaaactttagtcactcttctctagcccaagacaagaatgtgccacctcgcatgtggacaaatggggttgtggggaatagagagtaagggcataacatttccaactacatctcccactctgagtatgtgatacgataggagtagtccccaaagaggctctctttgctaatacataacatttttttctttttaccatttctgaaaacaatccatattcgagaccatggagctttaaattggaagaagtacagaaatacctgtgtggagtctcctgtaggctattgtctgggtgttggttatgcttgagaattccacgttagcttagcctctgcatggtttaggaacccccagccaggaaaagcccaatattttggcaaattataattcagttttcagcagttttctcacctccatagtgccctttgaaacttctcactgtccctttacttgaaccaaaagagaagaatgacacttatttgttggggccaacctgtcattacctcatatagtaccacctttgtcatacatcagtttcccatatatgcagaattttct

SEQ ID NO: 57232 - DNA, 1123 bp, Homo sapiens
tgcaacctccgcctcccaggttcaagcgattctcctgactcagcctcctgagcagctgggattacaggcattcaccaccacacccaggtaattttggtgttttttagtagagatggggtttcgccatgttggccaggctgttctcgaactaccgacctcaggtgatccacccatcttggcctgccaaagtgctgggattacaggtgtgagccaccgtgcctggccagcaaaagttttaattacacatttttcttcatttcttcaggtcagtctaataaacattttagtagacatttattaagcaccaactatgtgcttaacactgtgctggcaatacaaagacagtccttgccttccagaaaactaccttttatctgtactaaaactacatcaaaagccctttagtggggcaaaaatgacagcttccatgttttattcttagaatgattggtgacgtagatagagaattctagtttccttctctacctcatcttcattccatctaccggcaattcatgctaatccacagttgtttgcagggttgacagagaaggtgactatagcagaatcaggcttgctaatgggtgtattctaccacttgtgctgtcacctgttactggtgtaatccacgtatacatctgtgcttcccattcactttgcaggtatagccgagaccatgtggtggaaggggaaccgtatgctggttatgatagacacaatgcagaggtagcagcctttcacttggacaggtgcgtatgatcacagcagcttatgttcattttgtttgctttcaaaaatctttcttggagaggactcgtggactccttcagaaggatgcaacactaataaataacttgttatcgattttagatagctaattgactagttccattaaacttgtatgagtctcataatttggttggcaccaggaatactgaagtattttacttccatgcttctttaggtcatttcatttctggcctgctctgttattatcatcagtgaagatattcttggtaaataaactttgaacttaaatctctgaattgaactggtcgttaattgggtctagccatcctgttgttttgttatgtatttgttttaagtaagtaatgctgactta

SEQ ID NO: 57233 - DNA, 1041 bp, Homo sapiens
cagagatcaaacctgtcgccacagagcagctgttgagcaccttcctaactgtaggtaagaagattgtagaggacatttatataggggaatgattaataagttaaaatggggcattgttgagcaagctggctcatgacttttaggaattgaagaactcagtggaatacaaaagcaaatcagacaaccagctctcaggttatttgggaaaatgaatctaaaggagatggcaggaaattgaaattttcctgtatactttgtgttgtctgtgacatagggagtgaggtcatttagtgatggtgaaagcaggtgattatttccttctgctttctcttagagctattagtaagtctcaaactcagaatttggcctaaattggttattgtttgtatatcattggctcagttgtttttacatatataatatgtttcctcaggaactgtctcccatctccttagaattgaggaaatcttaaggcaactctttaggaggctcagaaattattttgtaaggttgtatttggacctggaagatcaacaggcctactccttctgcaagggttaacctataactcattgtgcctggaactggctatgttgcccctggcctctgttttccattatcttaactctgaggtaagagatctgagctaaaattctcactcctgttgttgtgagcaagatgagaatgggaagaattcaaaagtgcggtggtttcttgtttccacctcttcaccttgactctttttcagtgatacagtgctctgcattagggcatgactgttgaaacagacattgcaagatgaacttcaccttgcttttttttgctagagtgagtggatttacatttaaaatgaggaaaaactgaatatttaaaggacttatgacagattcatcattcagaatttcaacttataaggcttgggctatacttttcttatagataaccaaaagcatacaatgttagatattgtatcagatatttgtttcagatattttctaatcacctttggttgttcagttttatgtttagcaagcatgaatt

SEQ ID NO: 57234 - DNA, 1070 bp, Homo sapiens
taacattttttgtgctatagatacctttggcagtctggaaaagcttacagatcctttctaaaaataaaggttttaaatacatacagaaattaaaatacatagacttataaatgaaaccaataatattgaagtataatttcagtatcaaaaattttaaaaagcaaatttagatacagtaatatgtgctttgttatttaacacattaaataagatctatcagattagtcactactgtgatttcaaactatgattataaatagtattttgaggttatctgcaacaatgctagtatgatatgaaaaatccgtgatttcttgtagagacaaagtcacatgtaatacaaatatgacggtttgctccctgccatcataatagaaggaaatgctaatttttagtagaggttagtgaaaataaagatgtaattttgttcccatccagcttacagaccctatgagttgaccctgttccaggtagaggacagagcctggacaagggtgatgagcaatgagagaagagcaacaagctcaggagactgtgctgtttagctgaaggaaaggatgtgtgggggctggccagtgaggaagacagctggtcaggacagtgtcactgaagggcctgtgtaccatgcttaggagtagagactttctctttaggcactagaaagccattaaaagagtttgaatatggaaaaatcagatttgaatttcaagagcgaattgtggcagcattgtcaagggtgcattgggaaggggagaatcaagagctgagagcactctgggagtgttgtgaattcatatgtaataagagaactaaagcagggacagggaatagaaagatttaagggctattcaagagttggaatggaaagaatttggtgaacatttgggctgggagagcaattgagagagaagaaaaaattaagaatgactcctaggtttctggattggatgacaaatgattagtggagctgttaactattttaggaatgtagggagaggagcatatttagggaggtggagcagagaaagataatgaatttaatcttggatattttgtttccttcacaggca

SEQ ID NO: 57235 - DNA, 1547 bp, Homo sapiens
gccgtggctcatgcctgtcatcccagcatttgggaggctgaggcaggcagatcacctgaggccaggagttcgagaccagcctggctggctagcatggtgagaccgtctctactaaaaatgcaaaaattaacagggcacggtggcatgcgcctgtagtcccagctactcgggaggctgaggcaggagaatcacttgaatccaggaggcgaaggttgcagtgagctgagattgtgctgctgcactccagcctgggagacagagcgagactctgtcttaaaaaaaaaaaaaggaggtgaatttttttttaagttttgtaacactgtcctactttatttattagaatctaaggctgttacaatcaagtcgttgcagggtttggatcagctgtaagttaggtatgcctaccaaacatccaaaggtagacgtggagacattttaatactacaaaactaggaaaatcagaactcatggccatttcctgccctcctccaacttgttaaaacatgtttattctaaagttcgaatggataaatttgagtataaaggttttgttataaaactgttctttagtgtaaggctgcattgtgggtttgggggaaatgtaaataattttctgtgtaaaacaaattcataggatctgatttgctcagagtattattcaagaatgtattaataaggcattgccccctgtttgcactcagggttaatatgtcaaatgaaatttaagaaggaaatggaagaattcaggtacattaattgcatattattttgggaaagatgagtcctatacgtggcaatttttcaatgtcatctgaagccagcattatcttccaaagaaatcgatcttttttttctaaaaaaaaaaaatgcttttgccttcccttcccttcccatccgccatatttcttcagcctttcttctcgatcacccgtgtattctttgaccagtaaatgaccacacctcaatgatggtaaaacagcatcatcagtaagctatcttatatgcctcatcctgtgagtttgagcttcaggaaacatgagtaaaagtatatgtaatgtatatagtcgtatatgtattctagcaagaaaaacatatttattttgacaaaggggaacactgactttctgaaggattcagaaagaaccttagtgaaaggttctcagtctctgagagtggaccctaattaacataaagaccattcatcagcgaataactactgagcaactctagtgtgccagcacaggccagacatactagtgagccaggcacatctggccttgggaaactcatcctacaggggaaggccagtttttttcccttcaattcctcaagtctgggtggtgacaaggtaggggctaggtactggactaccacaggtttttaggaactaaggtgtttctcataaacacaaaatgttgggtgaaactgggaacaactactcagaagctcatttatttgcttaaatggaaagtgtgggagccactaccctctcttttgatctgccaaggatttcctctcagagctgttgcacagacagagattgtact

SEQ ID NO: 57236 - DNA, 1053 bp, Homo sapiens
ccatttcaaagcctgagttcaccttctttgcaaccacaatcacgacccagaataaactgcttcctggaagccggctagttgcacctggcctgaagtcagtctcgggactgcctctcaggaccccagacagggtttcgggttcccgcctgggtcacgtgtacggaggctgccagtgcgcactcagcccggcccgccggtcgccacagcaacaccaatcccgggttcaagcccgcctaggaagtgcggtccccgcctgaccgccccgggcttaagggagcctggctaggccggcagccggatggtcccgcagctcggggccggccatgcttcgcggtccgtggcgccagctttggctctttttcctgctgctgctcccgggcgcgcctgagccccgcggcgcctccaggccgtgggagggaaccgacgagccgggctcggcctgggcctggccgggcttccagcgcctgcaggagcagctcagggcggcgggtgccctctccaagcggtactggacgctcttcagctgccaggtgtggcccgacgactgtgacgaggacgaggaggcagccacggggcccctgggtaagaccccgtccccacggtccgccgttcgctgcggagcagagtgcgatccgggcgcggctgtggtcgcctcgctcctgtccggggcgacatctgggcccgcagtcctgctctgctcagccgccggtaccggctgtgggcgggggcagcctccgcggagcagggagccccatcaccgcccttgccccacccgcgtcccctgcgcacccccctggcgcccggcttcccgtcccccgcctcccctgatccctgcgctttccagattctctcgcaccgcctgtgccatctcccagcccaccctggcgttattcgaaggtgttgctcttgacagctctagggaacgtccgctgtggacatgcctggtgactgccgtctcccttgctgcttttggacgcagggcttgaggaccgacagtgggccgagtcggggctgggagttagaatctgagttctgggtgtccctctgtccctg

SEQ ID NO: 57237 - DNA, 1039 bp, Homo sapiens
ctgcctcagcctcccgagtagctgcgactataggtgcatgccacctcacctggttaatttttgtttaatagagacggggtttcaccacgttagccaggctggtcttgaactcctgatgtcaggtaatgtgaggaaggcttaaattaagaaaggacgtgagatgatgacaaatagaaaagacagaaaaggctaggcatagtggctcacgcctataatcccaacactttgggaggctgaggcaggaagatagcttgagcccaggagttccagaccagcctgggcaacatagtgacaccctgactctatatgtgtgtataattaatatataaaaaacatagggaaaaaagacctgtgttattccagaggcatgggagaagaaccaagaaaaggggaaaggcacataatgaacactgtgtctaggcacagtgctacatgtctacacggtgccatttaatcctcagaatgactgcttttctttttatagctgagagtacaggagtgaacattttcatatataagagcaatgtgctatgggagtctcttcagtaggaggttggcatgacttggcttcactgatgtggtcccaaagcaaacagactagacaggcagaccagtcacataccctgccagctccgtgtgtgccagcatctgccctgtctctgccaggccttatcaggattacccagtgtttgtttgaaattttgctaggtctcagaaacagaaagtacgccaaggattttaggaaaatcaaaaattttaatcttatcatctttacatacaacaaacatgtcaagaccccctattgtctttgaaaaggtcccccctcccccgccaaaatctgtagaccataagtcttggcctacactgacctggtttgtaaaatatcttcctctgtgtacttttcccttcagcctcaggctcttggctgattcgctcacaacagaagcagcttggctttcctctggaagtaccaatttgaaagcccaccagcctgcaaacctagagtgtattctccacccctgggtcacagaacttcgtt

SEQ ID NO: 57238 - DNA, 1004 bp, Homo sapiens
gaagacacacaaacaaacacattacccaccttatgcacagcagcctggactccagatgatgccttttgttcacttccaaaaatgtaatccatcaaaggatgagtattcacccccgcagaggacattctaaagaatgtgccaggctgggtgcggtggctcacacctgtaatcccagcactttgggaggcagaggtgggtggatcatgaggtcaggagatcgagaccatcctggctaacatggtgaaaccccgtctctactaaaaatacaaaaactaagccgggcgtggtggcgggcgcctgtagtcccagctactcgggaggctgaggcaggagaatggtgtgaacccagggggcggagcttgcagtgagccgagatcacaccactgcactccagcctgggcgacagagcgagactcagtctcaaaaaaaaaaagaatgtgccagagggatgcttgctaaaatcagcttctttaccttatagacatctgcattacagagagagaaagaaatgctgcttagactccctgtcaactaaaatcatgggagaaacactccaatctccagcctactttgccaataaaatattgcaacctttatttaaaacagaacacaacttggcaaaccttgtgagaagacagagaaagcagtccctttcaagggcctcatttatttacatcaagtttaacactgttagcagttcacagtcagacaacagacggagagaattaaattagaaaaacaactgaaaatatattacaataacaattaagaacaaatacctgacaacactggtaatgtgacacacaattgatgtgtttttagttaaatcccacattgtctcactatgtccccttagcaatgcacacagtgcccgatgctccaaacctcaccctctgtgcaccacatacacacctgcggggcgggacctttggtataaacgttcaacgagttttaaagaattgaatccgcatgtttggggacaaagttctgtcaaccaccatgaa

SEQ ID NO: 57239 - DNA, 2872 bp, Homo sapiens
tttggctgggcacagtggctcgtgcctgtaatcccagcactttgggagaccaagatgggcggatcacttgaggtcaggagtttgagaccagcctggccaacatggtgaaaccccgtctctactaaaaatataaaaattagccgggcgtagtacatgcctgtaatcccagctactcccgaggctgaggcagaattgcttgaacccaggaggcggaggttgcagtgagctgagatcgcgccgctgcactccagcctaagtgacagagtgagacacgttaagaagaaaaaaaaaaaaaaggataccttcatttctgactcaatatcctagatccaaaggacaggaaattagggaaggcttcaccctgtgggatcaagataagaagatcccatacttcttcccaggtaaggaggcctgtggcaggtcatgattcaaagctgacttggaatggcagaaactgctgagaggccacccttggagatttgtgccttcaaagatgggtttcatgagtctcagagaggaaaagacttgtcagctgggttgattttgcatgattattgaactagagctggtagacacgagcttctcagatggcagtggccagatcctccatctgtgagaatccgccacttgaagtggtttcctgagagtgttcacttggcagttgctgcgtttctcaagcccacctggcgaggtctcgccggacccttccctccaagtgcacttacttcttcatccccatgtacatctctaactttgaaattgtttacctctcctacaaaaatcttaccttttgacctgagcagagtagcaaagccctgttcactctgagggagcagctggcgtgttgaaggggaaaggccaggcacagcactgtcctcagaccacaccatatttggagcagaattgtgatacatgtcatctgtgtctattctggaaggttctttgttcatcactgtactcgcatcagcaaattttcagggtcctacctgtcactccaggctactgagctgaaccctcagaagctgaggtctccgagcatgctaagtaaccttttagaaaagctggaggcaaactgtcgaatgctagcaggctttatgaaaggaaacataaggagtttgtgtagtcagaacttgcttaaatttgcttcggaattaggcaccataaactttagttggagaatgggacttaaattttcacatatatgtatacttaattttcagcaattatgacacaataaaaagaatatgcaaatttattgttgtttcagaaggttttgcaggactgggaacgctttagtgtcatcaacagtaaacctcagatactgttctgcacagttcagaagtaccataccaggtattgtgagtggcaagaacgccaggggacagagatgcttctggtagatgagggccagagaaaccagctctcctccattttgacagcaatttctcactgtggccatttggcctccattatgttttgagaggaatttcttgagatcttgagaaatcaccatgattaggccaattgtcaatcagtattcagaaactagaaaggaacaatgagatacttgtttatggttctttagggcatatgtttgaaaaccctctcatctcagatctgtatagctggtgtgtgtttgtgtccataaatacacgtgcattgctgtcgtgcccattaagaaagggggagtaagtaaaagaggaatcgctcagatctttccttggatgaacagcagtggcgtggttggtgtgttgactgtgaacaggctgacttagctgttgatgtatactcagaacctccatctcctcccagaccctgcacttttccttctctgcagtctgattctctaatgactgtcactggacaaaccccagttttatgctcgcttagtaaaaataagtttaaacatttcatggtggttgacagaactttgtccccaaacatgcggattcaattctttaaaactcgttgaacgtttataccaaaggtcccgccccgcaggtgtgtatgtggtgcacagagggtgaggtttggagcatcgggcactgtgtgcattgctaaggggacatagtgagacaatgtgggatttaactaaaaacacatcaattgtgtgtcacattaccagtgttgtcaggtatttgttcttaattgttattgtaatatattttcagttgtttttctaatttaattctctccgtctgttgtctgactgtgaactgctaacagtgttaaacttgatgtaaataaatgaggcccttgaaagggactgctttctctgtcttctcacaaggtttgccaagttgtgttctgttttaaataaaggttgcaatattttattggcaaagtaggctggagattggagtgtttctcccatgattttagttgacagggagtctaagcagcatttctttctctctctgtaatgcagatgtctataaggtaaagaagctgattttagcaagcatccctctggcacattctttttttttttgagactgagtctcgctctgtcgcccaggctggagtgcagtggtgtgatctcggctcactgcaagctccgccccctgggttcacaccattctcctgcctcagcctcccgagtagctgggactacaggcgcccgccaccacgcccggcttagtttttgtatttttagtagagacggggtttcaccatgttagccaggatggtctcgatctcctgacctcatgatccacccacctctgcctcccaaagtgctgggattacaggtgtgagccaccgcacccagcctggcacattctttagaatgtcctctgcgggggtgaatactcatcctttgatggattacatttttggaagtgaacaaaaggcatcatctggagtccaggct

SEQ ID NO: 57240 - DNA, 1975 bp, Homo sapiens
aggtgtttgaaacacccagtgctatctgaaaactatcagtaccccaaccctttggtttatagattaagaaactagcagaagatggttaaattacttgcctattgtctcagaacggttaattagtggcggagccaaggctagaattcaagtctcttgactttatggttgtggggtctttccaccatacctgctgccatgtgagacactgcaaaaaagtggctcagaccgacaatcagcctgtgtggtgctgcacactttctaaagcacatgctcctgacactttgaccttaaggggcttgaatgtggagtaatgggaacacaagccaagcaagcactcagtagaattcagtcatttaaaaaattcaatggggtcattcttttggacagacctcagcaacacagcaatgtgcactttgtagtaaagaaataccaacttgagtttttaaaaaacctagttagtcctacattcccttttctttaaaaaaactttattgttcacattattttaatgactatgagataatgtatatgacagcactttgagaaaatatcaactgtaatataactataaggttgtagtattgtctgtttaaaagataagacagttgattcaatgtggatggaccctgtggggtacctgaaaatgtagatacgtaagaatcacctctgtcatttatcacatttagaaatatgaaactgcttaacaggtatgagcaggtatagcaagtgtttgctaaagttgtagttcagagctgaattacttcaggaaactagggaccaactttttggtttaattccgatctttaaaaagtaagaatgtgtactcactccagaacacagaagctcttccaaggaccttgactcaagaaggatgaggtcctcttactcttctccatttatccactatatgcttggccatttatcctaaatgtggtgggaacagacttgttatctgttgatgttgacagtgtcttttttaacctatgtcctgcatagttttgttaggtttacagggggaggtggatggccataaaaccagtgcactttgggaattacttttctaggatttcctaccagttataaatgacattgacatttgtcatcttttttttctttttctaaaaagaatagctgaatttaattcacctattataaaatactcaaaagtaaattgccttggtggccacttctgaattatagctacatttcattatgaccccttctgctcccttccattttgctactgatgtcattcttgttatcaggctgtgcccctaccaggagttcatattgggttgacagggttatctatatttttgttcttgatttttgagtttcatcatcttgcattaaattgttccacctggatttggggttcatctctgtgccctaaggatctgctatgaccaatcctctttttgtaggtgggtctctggcttaagtattgataggcttcagcggtttgtgtctctgtcttagcttgtatcaagccagtagtagctcacttcctttgtaaattcctgcttcagtctgggatccgtaggagtatgtgagaacttctgaaacgtctccaactcttaacagtcaagatatctatatcatttggatagagttctggttttccaactactagacttaaagaaattctggccgggtgcggtggctcacgcctgtaatcccagcactttggggggctgaggcgggtggatcacgaggtcaggagattgagaccatcctggctaacacggtgaaaccccacctctactaaaaatacaaaaacttagctgggcgtggtggcgggcgcctgtagtcccagctactggggaggctgaggcaggagaatggcgtgaacccaggaggcggagcttgcagtgagcccagatcgcgccactgcactccagcctgggtgacagtgagactccgtctcaaaaaaaaaaaaaaaaaaaaaaaaaaaaaaaaaaagaaattctaatgc

SEQ ID NO: 57241 - DNA, 1988 bp, Homo sapiens
tgggaacctaatgacttaatccttaaatatgttttgcccttgaaaaataggccttttccttccttccttagttataattgtggaagctaattaggatggcatggaagtgaatctaatgagttaggtattattaatgttcttggtatcgggtctaattccagttactgcttcattctctttttaaagctttatgaatacttcccccatcctccccaaggagagctcaatacacacatatttttattttattctctcaaaggaatattagcttaggaagataggaattcaacattgagcactgagttttcttctggctctgtcattgatacactgtcaaaccacagcctcatctcttaatctatttaattaaggtaacagtacatgttctcaagggtgttgcaagtaagtgtgcagctatcccttggagagcctctctggaaagctcttttagtgcagtgttgttatgctgaattgttttccattatcttatttgctgagtagaaaatattaatgaaattaagaattgttgagattatatgaattgggctagaatactaaggggaaaactatgttttgaatagagtttggcatttttgaccaagaacaaaattgagttttcattggaaagaaaggaaaccttgattcttaccattgctgctccaaaggaggcccaggttaagaggattagaggagacacgcggtgctgggcattcctggcaggtgttgggtgatccccgcagtatgtcacctgcagttgcagcacaggcagctagtgattgggttcatctcctcctagtggttggaagagaactcagatgtaaaaaccagcggtccttctcccaccttctttcctgccattcttgctcatcatacatgtccgtaaacttgaagaactcgttttagcagctagccttttaaggtcgaggatgggaaagctaaaactgtagaatattattatgctgctttttaggtttatccctgttgttgtgggatgcaagttaagggattgtaattgtttttcagggtttttttgttttttgttttttaagcaagggctctattttcccttgagagttctggaactaagccttggagaaacactactgagtgtatttaggctccctggttttcttgcccaacaacaatctgaagggtagggggtgggggctgtgtcttactcaggggcagcacctagctgtcttgcctacagtgggtgcacgatatataaatggaattgatttttgtcaacactgtcaagagtggcattgactattggagcataccccgtccacatgatgcttgaactatgtaacttcaggggttgagggctcaaggttcaggttaaagaggcactgtcaacttactatacaagcataatttaggtttttcctttttctacttgaaaaggaccagcttaaacacaaacccttatgtaaattaaaaggtttgaatccaaagcagagagaactgcttctggaaaagtgtagtttaattttaactattctaaaagcaatgagcaaaggcccttgtccaaggcgttgacagttttctaaagtggttatgctgtatatctggatgcatgcctttgggctgccactgcttgattcctttcatgtacagataatattacttcagtttagatttcccactttaaaatgcagtgatttgtgttgaatacatcttgattgtgctttacctaaagtattttcttaaaaggctttgtgtaaaatttaaatgtatatattttcctgtagacttccatcatgattttcagagattagccttaaaaaatttggccctaagaaattcattcagtgtttttctagatgacctctgtacatagaggtcattatagtggagaccctttaccagcagcattttaagatttaaattagatagaaagtttcttaggattcaactgaaaattggctagtaaaatatgtcccaggtaataaagcatgctgactttgctaaggcactgcccattt

SEQ ID NO: 57242 - DNA, 1528 bp, Homo sapiens
caggacagtccacatcagaaacacaggaaggaggaaagaaggcagctctgggcgcagtgcccatcagtgggaaagctgggaggccagtgatgcctccacctcaagtgcctctgcccacatcttccatctcgccagccaaaatggccaatggcacagcaggtactaaagtggctctgagaaaaaccaaacaggccgctgagaaaatctcagcagacaaaatcagcaaagaggccctgctggaatgtgctgacctactgtccagtgcactcacggaacctgtgcccaacagccagctggtagacactggacaccagctgcttgactactgctcaggctatgtggactgcatccctcaaactcgcaacaaatttgccttccgagaggctgtgagcaaactggaactcagcctgcaggagctacaggtttcttcagcagctgctggtgtgcccgggacaaaccctgtccttaataacttattgtcatgtgtacaggaaatcagtgatgtggtgcagaggtagccactgttagcctggtgggaaaatgcacacatttctgaggggagagggaaaaggacttgttttcctgtgttcttgttttcagaaaatgaaagactcatacttgagtgtgtttatgtgaagtacctcagatccctgagttctcacgtttacagtttcatctcaaaaataagaagcaaaccacataagtataggagaggtaaattaagtgggggcaaggcagtagtggacagggttggaaactgcactggaaaatagggaacatgtgtatgtcataaggaaggcaatgcagcccatccctacctggaatgctgggaagtgctaggcagggctgctctcagcaagactgcagcagctgcacccagacctggggctctggtaggtactaatggtgattatgctccaatttacctaatgaatttggtgggacagcagaaaagaaagctgggaatgtaccaagagaaatttttgttcagggctgttggaagtagctgttagccttgcttccacaaggccattgctgctgtaataagaactgcaaatcagagtgctacaacataaaactgggaaatatggccctatctgaatgcctctgtcctattttccgctggtgtatcagttagtgcaggaagtaaagaatgctggaaagttgaatcagaaattgaaaaccttctaaaatcttacacagattagcagaagtcacttctcccagtctggtatattatttcataatggaccaggatcggcttcctgcctgttggtggctatctgtaaaccataagtacaggggtctccctagtggttcttctctgtcttttgctgggcaggctgtcttcctttattcctggtagcattcagagcattaaccagtgttgattttgaaaatagtagtccctacaggttctcacaaaggaatgaatcctgttctgatacagttcccctgcatactgacatactggccaaggacttgagcagctgtgtatttttctttatcaactaaaataccagggaga

SEQ ID NO: 57243 - DNA, 1050 bp, Homo sapiens
gtaaccacagctttcatgcaaaatagtatcgctatttggggacaggttggcagggcctaataaacctgaatacacgtataccctgtgatccaccagttctcctacattgtgccaatcagacgtgcataacattgtgaaccaaaagacacagagcaggatgatgctagcaacgtattcatagtaactccaaactggaaacaacctaaacatccatcaagaggagaacaggtggattgtggtatattcacacgttggcatgctacacagcaatgagaacccctgccacatgcagcagcgtggacgaatctacacacatgatactgggcgaaagaagccagacaaaagagtacatactttatgattccgtgtatgtattttagtactctacttgccagttctttctcagttgtgtgccttttctgaaaagaactccctttttctgctatgaaattgttctttttattggtccccttgtcttcctcacagaggtagctgaggagcttgggagagccgcctcctcgtcatctgttgttccatacctgccccggctacctatacttccttccaagactcggacactgaagaaacaggtggagaacaaggagaacattgaaggggcacaagatgccacagaaaattctgcttccagtttagcaccaggtatgggtcccttagcaggtagaatcaaaatagaaactgccttgtttaaagaagcatggggtgtgaggcttttatgtccactttcatgcccgtcctccctggggaaagcatggcgtctcttttacccacccatgaagcccttggctatccatccaacatacaactctggctccagtttcatctccgtacccctgggttcccaagtatgtatcatctttacagttccatcaaaaacttcgctgaacccgatagaggagaagaggttgcgcagtggtttttaaagaaaggatgagtgttgaggtaataaccagcaggttatctcctcccccattttttttttctttttttttttttgagacggagtctcactgtgtcgcccaggctggagta

SEQ ID NO: 57244 - DNA, 1033 bp, Homo sapiens
gagtagctgaaactgtgggaagtgaaaccatggataaggggtgactactgtatatcaaaaacttttctaagaatagttggattatgcctcagacttcttaaatggtcatagtttattttccctcattacagtaaaggaaatctaaataaaaattgggaaatttaaataaaactgtcttgagattatctgcagcattcctgttgcaaatattttagaaggacaaatcatgctgtaagaattgataaaagagtatattatatattaatgttgttgtaacagtgtgtgaatgttacctaaaatatgaaagagaatcacctaattatgtaaaataaataatcggagaagaaacactaagtgctttttttaattccttatgcagcttttggggtattgttgtgggaaattgctacctatggaatgtcaccatatccaggtattgacctgtctcaggtctatgacctactagaaaaaggatatcgaatggaacagcctgagggatgcccccctaaggtttatgaacttatgagagcatgtgagtatttttgcatgttttaattttgaaggcataagctagcagttcagaatagttaacaaaattagaaacatttctcctctcagtgttgttagattgaatccagcctcatgacatttaaagagtttatcattgatcagccagttgtcatatcatataccattgaatcttattggaatcctaagcatagttgttatggcccaaatattgacccagtttctcagagacatttgcatatttaataagataagaaattgagtttagagattaaggtggggagggccgttttcaactagataaaaatgattgctaaagactatgaagaatgcataaaaataacctctgtgtagataaacagaagcatccgattgcttgcagatgaaaaagtaggaaagtgaatagtggattaaattgcagggttttgtttgtttgtttatttgtgttgttgtttttcaaacactcttgctttgttgcccaggctggagtgcagtgacgtgattt

SEQ ID NO: 57245 - DNA, 1035 bp, Homo sapiens
caaaactctgtctcaaacaaaaaaaaaaaagaaagaagaaagttttaaaaaagaagtccctgccttcagagagctcacagtctagatctcttattgcattggagtgctaatgatcctccctctgtaaagcatcctatttccacattaggttttttgtttttatttttgagacagagccttgctctgttgtccaggctggagtgcagtggcacaatctcagctcactgcaacctcccatctcccgggttcaagcgattctcctgcctcagcctccagagttgctgggactacaggcatgcatcaccatgcccggctaatttttgtcatagtagtagagatgaggttttgccatgttggccaggctggtctcgaactcctgacctcaaatgatccacctgccttggcctcccaaagtgttgggattacaggcatgagccactgtgctcagcctcacattaggttttatcactcatttgcagagtactgtgacacagagcttttttttttttcgagggaagtgtgatgaggtttcctctagaatttgtcctaattgatctggtttctactgctctgagaggtaatatgatttggttgaagcttagtagactgaacaatctggaaatttggattgtggaccaatagaaatagtcataggattctaagtcattttttactggaaatctcaaactcaaataactgagacaaaatcaaacaaatttttttctgctctgaattttatctgattttaaatgaatccatttttattttactcctcttgtattagctgactttaaaactgttatgcttcttagatacagtggttctcctttatcctcaggagaatacattctaagaccccccccttggatgcctgaaaccaaggatagtgtcaagccctggatatataatctttttttgatctgataaccgagaggtcttctcagtgactaaggggtgggtagcatctacggtgtggatatgttgagtaaaaggatgatttatgtgcgaggcgggaaggagaagcatggcttgaga

SEQ ID NO: 57246 - DNA, 1082 bp, Homo sapiens
gtttcgccatgttgccccggctggtcctgaactcttgagctcaggagatacacccaccttggcctcccaaagtgctaggattacaggcgtgagccaccacacctggcctagtggctgaatttttaaaatagttttctgcattagtaaataacttagtcttgtagaaaagcatctattgctcacctatcccagtgtacttataaatagggacccattttataaagcctgctttattccgcatcttgatgagtgctctacagtgacatatcattagtggctttctaaggtgttagtgattatcagaagatactaccatatttgtcagcacttacttaactctgcctataacacaaaaccaagaatagagtgttcatgaccattttcctcaccatctgaatggaatcacattagggttctctttcccacagagatcttgcagctcgtaactgcctagtgggagaaaaccatgtggtaaaagtggctgactttggcttaagtagattgatgactggagacacttatactgctcatgctggagccaaatttcctattaagtggacagcaccagagagtcttgcctacaataccttctcaattaaatctgacgtctggggtaaggttgaaagggacttttttctgtgtcattttatttttttttttataaatgccttgattctttagagcttctcttacgatgttcagtatcctctacctttacctgccattcttcttcagttattcagcaagcatttgttaaatacctcctatctgccaggactgtgttaagaactttgcataaacagaagtataggcctggtgtggtggctcacgtttgtaattacagcactttgggccgagatgggtggatcacttgaggtcaagagttcgagaccagcctggccaacatggtgaactcccatctctactaactacaaaaattagccaggcgtggtggcatgcgccagtaatcccagctattcaagaggctgaaggctgaggcaggggagttgcttgagcctggagggcagaggttgcagtgagccaagatggcgccactgcactccagcctgggcaatagagcg

SEQ ID NO: 57247 - DNA, 2297 bp, Homo sapiens
gaggcggagcttgcagtgagccgagatcgcgccagtgcactccagcctgggtgacagaacaagactccatctcaaaaaaaaaaaaaaaaaaaaaaaaaaaattcttaatctcttttcaagttgtttagcttttctccttttcttaccaggtgtatgtgactgctgagagccgcttcagcaccttggcagagcttgtacaccatcactccacagtggctgatgggctggtgacaacattacactacccagcacccaagtgtaataagcctacagtctatggtgtgtcccccatccacgacaaatgggaaatggagcgaacagatattaccatgaagcacaaacttgggggcggtcagtatggagaggtttacgttggcgtctggaagaaatacagccttacagttgctgtgaaaacattgaaggtgggttgctgagaattacagttttcaggcatctttttcttttgtgctcaatcacttggaaatatcagcatgcccttctttaactttggaacactttccacccactagtgccaagcacatcagcaaattgagatgattaaccctagtgccattgctgacaatgcagaggtagattattcactgcaatgcagtgaaacccacatgtgggaaaggtctgtctctggaggctgttgatgtagatcttagtgggaggttagaagcaaattaaaagttataaaagcaaaataagctcttttgcttcctgagaacgacccctgctggacagaattcttgtctgagagtcatgggcctctttcttgttctgtcctttctctcccttgttcttgttcctcctgtctctttgcagttagatcacttcttaatattaacagaaatctttttcgtagtactactatatgtctcctttaaacatcccagtatcaaattataaggttttcactcacttgattctcccagagcctcagtaactgtctctggtgtatcacttataagggctattctttagctattaagtagtagtcagttctgtttcttaagcatattctgagtgtgaagcaatatataaggccttgctctctaagaagattatgatctaagcaagaagataagtatgtaagcagctaagtgctctgtctcgtcattcaaagcctgagatatctggagaagtaaactatgagagaactgaactatccaatacagggctcctgtgtttcagttgattataggacacgattgctgaattttgctcctcctgctaatttttactccagggcatttttctttctaagttggacttcttaaaataataattatttcagctgggcgtggtggctcacacctgtaatcccagcaatttggggagctcaggtgggcgaatcacctgaggtcaggagagcatcctggccaacattgcaaaaccccgtctctactaaaaatacaaaaagtagccaggcatggtcgtgcatgcctgtaatcccagctacttgggaggctgagccaggagaatcgcttgagcccaggaagcggaggttgcagtgagatcacaccacttcaccccaacctgggtaacagagcgagaccgtgtctcaaaaaaataaattaaattaaaataataattatatcttgtaatatgctaaaatattcaaaagatagtttttacttttaaagctgaagctttatgattgtgagatgaatgaaatgattttaagttgagggtttgtccctctcgttttcttctttcttacctttccctttttctaggaagataccatggaggtagaagaattcctgaaagaagctgcagtaatgaaggaaatcaagcatcctaatctggtacaacttttaggtgaggaaccttgcctgaaccatagatttcctccaaaaatgcttgccctttaaccccttgttatctccaaatgctttttttttttctttttaaatatagagacagggtctcgctctgttgtccaggctgctgttgacgtgatacttccgcctgggcctttcaatatgttgggattacaggcatgagccaccatgccccgccttttttcctcccccaaacctttctttttagtcaccatggtggaagctgcaggtttgaatccacttcaataaatagttattttaatcagtaggttctgtgtttaaaaatagcccaagaaacagtggcctggattgattttggtgtataaaactgctcagtttgtactaattgccccagattcaaagttcagaagtgttcaaaatggtactgaaccaaaaactcatgaaatgtttttgcaaaataaagagacattaaacaaaggactgttg

SEQ ID NO: 57248 - DNA, 1528 bp, Homo sapiens
tcctgtctctactaaaaatacagaaaaattagctgggtatggtggcaggcgcctgtaatcccagctacttgggaggctgaggcaggagaatcacgcttgaactcgggaggcagaggtttcagtaagccgagatcacgccattgcactccagcctgggcaacaagagcgaaactccatctcaaaataataatgataataataataataatcataataatcataagtggaggaagagagacataaaagtgttgttatatgacatagacatttggatagtttgcctttgtagacaggcactaaaaatagtctgatcaagaaaattgatactggaaaaactgttttttgtataatcgatctgggctgtgagaagcaggtgatctttaagatggtatagggatcacctgtgctatgtactatgaataaatttagaaactgtaaaggcttaaggaaaaaacaggtcgtaaaaggcttggaccactttgagtagaaactcaataaatgcccgatgatagtaatgttttctaggctcttcaattaagttattgatatttacaaaaaatcactgctcaggaaaacaaaatagagtttaaaagtcattcaggccgggtgcggccacatttcttttgtttttttaaaacgaaaaaaagattattttttgccatgttggccaaaaaaagatatttttctaaaagcactttttaaataattttttctatacttaaatagagggcctggatttatacagtattacctaattctgaaaaataatccctgttgtcttttctacagtttgttttctgtggagagagaaaggaataagggtagtttgagtggacttgtaagaaacttacaatcatttcttccttaaaactacaaccactactacaacaaaatatcctctatgttttataaagctagtaaccatttctctttgagattcttttttccattttgagaaaactgcgtttcctattagtttatgtctgattttggtgagtgcatataaatcacggctaaactctcattttgtggtcttttctctgactaccttgttttacattttcaacaagtaaattgcttcctcatgcttaggagacacagtgcctatttgctaattcttcataacactttatactgtacagttctttcctactctggagccagcagctgaaatactgtgtatataatgaattcaaacaaatgtttcgctgttgaactcaccgtgaattcccttcccttcttatgtctttcagaagctttgcatcgtccctatggttgtgatgttgaaccccaggcactaaatgaggctatcaggtggagctccaaggagaacttgctcggagccactgagagtgaccctaatctcttcgttgcactttatgattttgtagcaagtggtgataacacactcagcatcactaaaggtgaggcttctatgtagcatcctttcacttttcagttttcattaatgattaagagataaaggggcctggccaggcacagtggctcacacctataatctcagcac

SEQ ID NO: 57249 - DNA, 1150 bp, Homo sapiens
gaacatgttatgatgtttggggaacaaacatacgtagaatgtattattaatatagagataaagatagagtattaatgcagcaactgtgatgcttttgagagtacagatgggaggtgcagtagcccccattatccagttttgctttatacagtttcagttactggcactccaccccagtcagaaagtattaagatattttgagggaaaaagagagataccacattcacataaattttattacaatatattgttataattgttcattgtattattgttaatctctttctgagcctaatttataaattaaattgtatcatggttatgtatgtgtaggaaaaacgtagtatatagtggatttggtactatcctgattgattttaagcatccactgggggtcttggaacatattcctcatggataagggggactactatatattggagctgagtattacaagtagaaatcagccagtcaaaagaaaagtggggtgagaacccattccagttagtctggactgtgtgaaccaaggccagaagatgggaagcagcatggtgtatattaaagtttacaatttgaggtatggagtagggagaggcgaagctggagaagtaggtagagacctgatcatgaaaggcctttgaatgccatgaaaaggagactttagcttgatgttaaactattgaagaagcttaagaaaagtgacgtggtcaatttttttcttaaatagatcactttgccagctgtgtggaggatggatttgagggagacaagactggaggcagtagtccaggtgagagatgttgagatgttgcagatttgaactaaggcattggcagtagagatggagaacagggaatggatttgaaaataaatggaaccacaaattcaagggtttttcctttcatatatgataaaactatttttatattaaaaataagttggcctggctgggtgtggtggctcacgtttgtaatcccagcactttgggaggccaaggcgggcagatcacaaggtcaggagttcaagaccagcctggccaacatggtgaaacttcgtctctactgaaaatacaaaatttagctgggcttggtggcgtgcacctgtaatcccacctactcgggaggctgaggcagtagaattgcttgaacct

SEQ ID NO: 57250 - DNA, 1026 bp, Homo sapiens
cggtgggctggcactgctgggggacccagtagatcctccacagccgctggcccaggtgctaagtccctcattgcccggggctgacagggctggctggctgctccgagtgtgagtgcggggcccgccaagcccacgcccacccggaactccagctggcccgcaagcgcggcaggcagccccggttcctgctggcgcctctccctccacacctccctgcaagcttgagggagtgggctccggccttggccagcccagaaaggggctcccacagtgcagcggtgcgctgaagggctcctcaagtgccaccaaagtgggagcccaggcagaggaggcaccgagagcgagcgagggctgtgaggactgccagcacactgtcacctctcagagccatgaaggattccatggtttttggcctcaacatttgaaaagatggaattgccattaactgaaatggggaattcagtgagagaaacaaatttggagggaaggatggatgatagttttgcatattgagtcccaatggtgttattagtgatttctcatctttatattctgaagcccagcacagtgccttgcatgtggtattcactcaaattactagggatttctttttccccaataaacatttaaaataattaaacaggctgggcgcggtggctcgtgcttgtaatcgcagtactttgggaggccaaggcaggtggatcgcttgagctcaggagtttgagaccagcctggacaacacggcaagaccttgtctcaataataataattaaacaatatctgacagccactggaaaactctcctaaactggcagcattttggagcttgaaaagatccctgggtcattctctggagctgtaatcaaagtaactgagttatcagcatgattaatatccaggcagggggcaggtttcatagtgaggtttaatgctgtgtgcttaaaacaccccagctgttttcagaaatacaagaaatcttaagttgcactgtagattccctgagcgtccatcctgagagcttgggct

SEQ ID NO: 57251 - DNA, 1002 bp, Homo sapiens
aggtttttaaattttctttaactttgttcctgtttattaacaaagattgggctttttgctttaaaaacttttaacactcaggctgggcatggtggctcatgcctgtaatcctagcactttgggaggctgaggcaggtggatcacgaggtcaggagtttgagaccagcctggccaacatagtgaaaccccgtctcttctaaaaatacaaaaaattagctgggcgtggtggcgggcgcctgtaatcgcagtcacctgggaggctgaggcaggataatcacttgaacccgtgaggtagaggttgcagtgagccgagatcgcgccactgccttccagcctgggcgacagagcgagactccgtctcaaaaaataaataagtaaataaaaataaataagtaaataaacttttaacactcaaaagttttcaacactatattgccatgtttttaacctttattaagctatagagccagattgttagcaaaggcagttatttcttggcttctgtgctcatgaatcagatcacagctatttctttgactttggctttgtggtttcttgaactatttaagtgatgtaaaagatgagtcttgttaggcgtttcctttcttttaaaagtgtatttcgtgttttattgtaaacagattttctccaaggaaacttttctctctagtctcacctcatcatctccctataaaatagagatatattaacttctacattgttttattattaggctatttgttatacatatatatgttggtttttattttacttacattttaaaagtgttctcagagattttgaagtaactccattctgactcagtcttttgcggattgctggaaattttcctttaggtcactctccacccactttgggaattgtgaatgctcaccattttattggttccctctggccactgagtacatgagtaaatgtcacatgcatgtggtattgcttgtcagagaatggaattctaagacttcctctttacacagaaca

SEQ ID NO: 57252 - DNA, 1040 bp, Homo sapiens
tatgctcttgaccaccatgctctactgctgatttatactcataatataacagctgccatgcagctattattataattaaattaatttcatattgcctcacacttcacatgtgttaggtactcaataaatgggagatgatattatattctcattaagtacaactagaaagttctacaaggcatgactcttttctgttaatatgctgtattatatattgatttccatatgttgaactaaccttgcactctagggacaaatcatagttggtatagtaaaataatcttattatcctgctagatttggtttgctagtattaaataatttattgaggacttttgcatctatattcataaggaatgttctttttgtgtgtgtgcgctacccatgtctggctttatgttttcttaaattcattcttcaccatccactccctcatcatggaaaaggacttacgttagtcactggtttctagccttaggtcagaggccagtttcactacgtaagtgcagaaagacaatcaggtggttgtgggggtcccttaaactttctggttgtgatagtccaagaaaattgatctctgaaccaggaggcagaattccaaatcctattccagaattgtatctctacatcttaccacatggtctgttcatctgtgaaatgggataatataatatttttagcagagttaacatgagggttcattataatatatgtaaagcacctggtttatataaccaagtattcaacacctgttatgtattatttctctcccattctctatcttctaaattgctcttggatattgtgatgctcaaaagtccagaatttaatttttcctgttgtggagttagtatttcattgcttttctctaccttttgcctattctttcctgtccccaatcctagtcctcacaatctggctcagcattcaggaagaaatttgatgtctgatttgtattctttccttgactctcctatggtctccttttatttgtgaacaccgtattccacccttctgccatcaagatagaatcagtggaa

SEQ ID NO: 57253 - DNA, 1012 bp, Homo sapiens
attctgagcagaaggtaattatatctaaaataagtgtggaaatttaaaattcaagtgaagctgcaaaattctcatctgtagttattcaataataactatgtgtcctatgatatgacattcatggcatgactttttattatttacatataactggcatgaaaatgtgcttcaacacattttctgctttttttctcttaatttaaaaaatcgtcacacagtaaaatggattttgttggtttattgtacggttctgtgaattttaacacatgtaaattcgcataaccccacaaacagcggaacagtttcatcaccccaaaagactgtctcatgcaatccctctgtagtcacatattccccccctttaatccctggcagccactgatgtgttctccaccactagagttttgtctttcagcagtgtcatagagctagaatcatatagtatgagatcttttgagattggcttctgtgggagactcagcaaaatgcctttgagattcatccaacttgtgtctatcaatacttcattcctttgtattgttgagtggtattccatagtatggatgtgtaccacaccttgtttatcccttcattcactgaaggacatttaagttgctttcagtttgggacaattttcttttctttttttgtttttttgagacggagtctcactctgtcatccagactggagtgcggtggcgcgatcacagctcactgcaacctccgcctcctgggttcaagcgattctcctgcctcagcctctcaagtcactgggattacaggtacctgccacaatgcccagctaatttttgtatttttagtagagacagggtttcaccatgttagccaggctgttctcgaactcctgaccgcaagtgatccacccgcctcatcctcccaaagtgctggggttacaggtgttagccactgcgcctggcccagtttgggacaattttcaatagagctgccataaacatttgtgttcaggtttttgtgtgaacttaagtttcca

SEQ ID NO: 57254 - DNA, 1051 bp, Homo sapiens
caatgatctagtgtgtgtttttgttatttccctggcataactgtcccctcccccataatccagaaaagtaaaagtatgtatttatctagaagaagcactcttgtaaattgttactgttatgttaatggcttctcaatgccaacaaaataaatctgaacttcgtagtgtgacattcaaggccatctaagatctggtccttgcttacctcctctactttaatattcttagcacatcatttctatgcacacataccctctgcacaaaaagcaaatggaaaatctggggctgtactagtttttttttttaatttccaaaacgtattatggagttttgttgtcatcagtcaccctctacctggaatgccttcttcctcattcactttacctgcttcaaatggttgatataaaaatgacttgctagtgcctttaaactggaggtggtacatggggacacagatctcatccttccagtttattggtatatacctggttcctgttacagtagttggcacatagcaggtgtttactaaatatttgagtaattaatacattgataaattatagttatgcatttataacttttacatgctgtgtcacaatgtctgcatcattcacctcacttcatctcatcatgtagctattttatcatctcacattatcactggaagaagggtgagtacagcacaagatacatttgagacatagatcacattcacctaacttctactacaatataaattgtaattattatatttattctattttattgttcatctcttgccttacctaatttatgaattaaactttatcataggcttatttgtgtaggaaaaaagcatagtatatatagggtttggtactatccaaggtttcaggaatccactggcggtcttggaatgtatctcatgagagcaaggtgagactactctacacagatacattcatatatatttcatgcatagaaactatagtgtatgagtaagcagttgttgcatgcttccatagtctcaagggaaacagctgactgcttgggttacaaaggattgtattgt

SEQ ID NO: 57255 - DNA, 1168 bp, Homo sapiens
gggagatctggtggggtcacaagattatatgaattcgtgtattagaaagaatgagctggaaatataaaacatggtattcaaaaagagttgcatgaaattgagattattgacagggtgcattagagtgtgctgagttagggttacatttagctctttgcttttcacagcagcaccatgatatagatagtgtaagcatcattaagcatgtttcataaatgagaaaactgaagctcagcgaggttgggcagttttcccaaggtcacaaagctgctgataggctagttatttaggactcagatcccattactctgattctcaatactcactcctctaccatactatatcagttttctgaaagttagtaacttatttccctatctttgcacctagattgcaatctcaagttgaaacttttgacaaatatacattaccaaaattattttcctcttcagaaatcttcagactctaatcttagggcaatgttggaggggtttactgccactatttttacctagctgatcttattgaaaacacacatatattagaggcttaaatatgatagttttgtttaaactccgtttcataatggggcttaaggtgggtggaagatggaacaagaaggaatgtactgttctttcagcagcatgcctggacagacagctgtactgttagaatgtgtccaaatccatgtgtgttctttttggtggcagtttgcaccattgcaagtctaaaggatagttggttattggatgttgtccatttgggatatgattctcttctttcccccaatgaaataattatcacgctttttgcatttttgcacatttagctttgtggtagggggcggacttggaagaattctttaaatgtgaaggaagaatgggggaattattattaagtatactctgaactgatctttatcattttaaatgacagaatagaaaaatgtttcacctaaatttcagatggtttttttcttttaaaaattattttaaattgtgataaaataaacacaacataaaatttactttgttatcagatgttttaatatcctctattattttgttggtataatgttctgtttaaaatatgaatagttccctggaggtgacccttatgcaccttggccacgggaactctctttcttctctgttacttttctgtttcc

SEQ ID NO: 57256 - DNA, 1040 bp, Homo sapiens
gtgatgtgattgtacagtttttctgcatgccatgtgtttcattcttttatgtctggcacataagtaattaaaggttaagtcaattgtcagatttaactcaacctgcttgagttaatttacttgatttttctggtacttacaggtacaacaaatgggtgaattggtgtgccattatgataacatgacttggaaaatggaaattcaggcagtgtgggacaagaacaaggatatttatttgtccagtgagaataaaagtggtctaggatttattgagagtttgttgtaattcgagcttgagtgataattttataggatgttatggagataacagtgttggtggaagggtttgacattccacatttgacattctcttatcatattttttggtttgtctctgtctccctaatgaaatgaaataggaaacagctagagagtggtgggatatgagtagttgtgcatttggatagattgactagcatgctcaagatgccagccatatctacctttggtagagtgagagccaaggtattcctgtggattgtttttcgtaactaaatctgtaactactgagtatagagtccctgctatatacgtgactaaccaaggagtgaaatatgattggttcaaatattttgttatattttgactgtaggggaatggtaaaatgtcaccaagtataagttactcttctgctttatactttgtttgcaattaaatgtatttttcttaaagagaatataaaagcaaaggaaaaaccatttgtaatgcttttgcttaggtccaaccttaatttttatatgacagtttccaattgattgtcagattttctgtctcatttcaattgagtaattgttccatctgtcatttaacatgacacagactgtttcttagtaattgttttgaaaactctttagtgatttttaaaaacctttacagagtgttgattatttaaatgatagcagaatatgtatatatgaagtaatttcagaggccggacaaggtggctcatgcctgtaatcccagcactttgggaggccgaa

SEQ ID NO: 57257 - DNA, 1066 bp, Homo sapiens
gaggggcactggatgttccccttggagagggaatcaccttggattactatctttaaatcttaaagggatttttctcatagatattctacttaagtatagacaaataatttaatcatcccataatgtatccaccatatttgtggcttgtaaaagttttaaaagttgggcataagtagctgataagttacaaaaagatacaaatttcaataaggtaattttagttaaagtgacaggaaatgggggtgcattttgaatagaaaaacacagaactccaaaaacaagacaaaaaaccatgttatttccaaagagaacatctcagttgtgcagaaagaattaacatagcaggcctgattgagactgatatgcttagcgaggtctgcttgcaaggttggcccttggctggcatctaggaacttagatttggggagggttcctacatttccagaaccaaaaagagtggcccattgtgcctaagctgtttgtataaacaatgtggtttatagagaacacctttctttctgggagtctggaattttgctgtgtagtaggcagagggtgcttatgtgatcaccccctaagaagaaccttggagacagcattttacacatgttgttttaattcattgctggaggaagtaagtatgtcttgtgtgactccactgggagaagacttggacacttgcgcctggttttctctggacattgccccatgtacctttttcctttgctgattttgctttatatccctttgctgtgataaagcacggccatgagtacaactatgtgctgagttttctgagtcctcctagtgaatcatcaaatctgagggtgttcttgaagatttccaatacaatagtggatcagataagtttataattggaatctccatgttcatacaaaatctctacatggaagctttcaatgggtaggtagcattttttgggtttaagttgtgcccaaatggggtgggagatagaatatgcgaaactaaaagtttgggatctgaaggagagaaaaaaaggctcttaatttgtgactgaaaaacttctgtttaacttttatctttg

SEQ ID NO: 57258 - DNA, 2053 bp, Homo sapiens
gaatggggggggcaagggttgaaaaacctgttgggcaccgtgcttactacctgagtgacaggattattcgtaccccaaaccttagtgacacacaatttacccatgtgacaaatctgcacatgtaccccctgaacttaaaagttgaaaaaatatatatataacatatacaattcactttattaaaggttaataaatataactgatttatttttaggctagtcttcgtgtactatttttgtgcctttctcagatattttgtggacttgagtctgaagtaaatatttataaagggaaagtagataactgctattaccaggaaaatacttattcaaaaaaaaaggatatttaagagataattagaatgactttactgaccttgttttcttacactaataattcatgaagcatttagattttctgattgagtgttttctgtgacaatatcagtcagagatgtaatcatttataaacatgctgttaatggcatggactctggtgtcagtctgtgtgggtttagatcctctgttaaatttctgattttggtagcttgacataggtataaaaaaatttacaacctgaagagaccttagaaataatgtattcctgggcaagttattcattcgctatgtgtcccttttctcaccagtaaaataggtatgctaataatacctacctcatagagttatgagaattaaggaattattacatgtaaaattctcagctagtgcatgattaatggtaagtactcaaaaagttatagctgttattgttttttaaacattattttttaacatttttattggttgaaataggtttcagacaattgtaaataaattttaaaaaattaaaaaatgttaaggctgagagaattttgagaccttaatacaaggtagtatattgtatcaggcttgttctgtgcctaggcttaattaccagatttctgtgcttctggacttataatgtatagttgtcgttttaatgctaacattctgattggatacgtccagcacttcacttgggtaaatcacaatctttctttcctccctcacaaaggacactttgaaatgatcctaaaataccttcttattcagatagatagaacagctagtggtagaggccctaacaaaaaaaaaaaaaagaaagaaaagaatggagaatcagaggagctgacttcagaaggtaatggaagggactgttgttatgtgggcatactggggatcacgacactccatggacaggcatcactgtacagctgtgcctgttggaaactggagctggcaagctattagaaattaagactgcatattctgtctctctctttcaggaactgcaaggtttggcatctctttttcgctctgtacatctgttcagttttcctttcttccagctggctttctcagtttcagcttgtatgtggagtgtaatggctgctcagctcctttatcaagagaattctcaatctatcctttcggcatttatccctgctgctaaatggctgagttttttaaaaaaatttaaatcatttgtttgtttattgaagggtcagtacatttatgtggttcaaaattcaagagatacagtttgaagtcttcctgccactccttttcttcagccacccaaattttggcaatccaaatcaccagttcgttgtatatactttcagagatatattatgcatgtgtacctgtatccgtgtatattctccccattctttttttttccccctagatggatgctattatatagcttatgttggacattctttcatgtcagtaaataaagaacttgcttttttttttttttttaaatggatgcatagcatttcattgtgtggatgaattatataattactttgttttcagttttttgctgttgtaaacagtgtcctagtacaaaccctaatatgtgtcattttagacatgtgctagtatggctatagaataaatgccttgaatttggaattgcttatagaaagggggtggggatttcagaataaccatgtgttgaataagcttttatccacctttttgtatgctaaatcctgtgtgcattt

SEQ ID NO: 57259 - DNA, 1671 bp, Homo sapiens
agctgggaccacaggtgcatgccatcacactcggctaatttttgtgtttttagtagagatggggtttcaccatgttggccaggctagtcttgaactcctgacctcaggtgactcatccaccttggcctcccaaagtgctgggattacaggtgtgagccaccacacctgactgagccacaggccgagcggctctttttttttgagatggagtctggctctgtcacccaggctggagtgcaatggtgccatcttggctcactgcaacctcggcctcttgggttcaacctcggccttctgagttcaagcgattttcctgcttcagcctcctgtgtagctgggattacaggtgcacgccaccacacccagctaatttttgtatttttagtagagacggtttcaccacgttggccaggctggtcttgaactcctgacctcaagtgatccgcctgccttggcctcccaaagtgttggtattacaggcgtgagctcccacgcctggcctccaatcatcttatattagaatctatgtaactggccgggtgaggtggctcatgcctgcaatcccagcactatgggtggccagggcaggcagatcatgaggtcaggacttcaagaccagcctggccaatgtggtgaaaccccacctctactaaaaatacaaaaattagccgggcatggtggcgtgcgcctgtagttgcagctactcgggaggctgaggcagaagaattgcttgaacccgggaggtggaggttgcaggcccagatcacgccactgcagtccagccaaaaaaaaaaaagaatctgtgtaaccacatgatatatttagcttattattgcaatatgcaacttataaagaccttttcccccaggtgataatggcaggagaatttttaaaaaattttagcttaacactccagagcattttctatttttttattcatttattctgtactaattgcctatgttgatggctctgagagaatttttagatacaatttagacagaactgctatctaaaagaatgttgctgatcaaatagatgttgatgaacatccttacgaaacaactaaaaagagatgtgtgtgtctgtgtttgtgaggatattttgtacaaaaactcttggttgcctttttggattgagtgcataatttcagtatgtaaatttgttgtcattatactaattagaacattttgtcagtattttcaaatgaaattcactcaaattcatggataaatacacattaaatatattactatccaacgtttaaacttagttgcttaaaaatatgaaaacagcacttagcttttttcccacttgctggttgctgtaaatgtgctgattctgccgtggtagaactgccggcttctctatagtgaactctgccattattggcttttgatccagcagaacgctaaagctgggcaggcccaggccatttgtattctcgggtttgctttctagggagaagaagtgttcaaaaacctttcacttcatgtggacaaggtcaaaaaaatattctggagcttagtataatacataatatgtacacatgtaattttgttaacatgtttctctctgtgtgctaattccagcaaattaaaaaaacagtactgagttaggactgaagattaccacttagcattttgtttctaggtaattgctaagaaaaca

SEQ ID NO: 57260 - DNA, 1058 bp, Homo sapiens
atttgtaaagtggtgataataatagtacctagtattaaatgaatagtggctgggcacatagtatgagctaaatgtgtgtagctgctgccattactaatactactgttattattaaaaacaggagtaattcggccaggtgcggtggctcacgcctgtaatcccagcactgtgggaggccgaggtgggcagatcatgaggtcaggagttcgagaccagcctgagcaacatggtgaaacctcgtctgtactaaaaatagaaaaattagctgggcatggtggcacgcgcctgtagtcctagctactcaggaggctgagacaggagaatcgcttgaacccgggaggtggaggttgcagtgagccaagatcgcgccactccagcctgggtgacagagcgagactctgtctcaaaaaaaaaaaaaaaaaaaaagtagggataattcaaagatgacaccaggatttagaacctggctaactgggatgatgaagattctattgacaagtttggaagttagaagctgattgaaaaaatgggaataggtcgagtttattgccaaagactagtatgaaaagaaaggaattagcaaataatataggaaacaaaggtgcagtgagtactgttttttagacagatgggtttaaaaagtttttttctgtacatcatagtttctttttttttttttttttttttttttttgaggcggagtctcactctgtcgcccaggctggagtgcagtggcgcgatctcggctcactgcaagctccgcctcccgggttcacgccattctcctgcctcagcctcccgagcagctgggactacaggcacctgccaccacgcccggctaatttttttttgtatttttagtagagacagggtttcaccgtgttagccaagatggtcttgatctcctgacctcatgatccgccctcttcggcctcccaaagtgctgggattacaggcatgagccaccgcttccggccacgtcatagtttcttaacctcggcggcattgatattttgggctggctaattctgtgttttggggggctgtcctgtgcattg

SEQ ID NO: 57261 - DNA, 1286 bp, Homo sapiens
gcctgggctgggagggagagaccggagcagcgccaggagcccgaggccggagccgaggaggaatgtgaccaggggtcggcgggggcgcgggagtacgcgagagcagggatggggcagcaggtgggccgcgtcggggaagctccggggctccagcagcctcagccccgcgggatccggggcagcagtgcagccaggccctccggccgcaggcgggacccggcggggcgcaccacagagaccggcttcaatatcttcacccagcatggtgagtgtgtctgggagccggcatgagagcgtgggggaggccgggggtggggtcggggcggggtgggtggcggacgggctgcccgaggggtcggagggtggaaggtgcctgagagtgggggcggaatccgctgccatctggtccagtcctgggaggcgagtcacacccctcccccctcgcgtctctagcctggctggcagatcccgggggcggagaaggaaagagaagtgggtttggggaccctggatggtctgtcctctactctgggacgggactatgcggctgcagaaagaaagtgaatggcagcttcaggagagggaaggatgaagggcagtattagctcagtcccagaggtgggagcataaacccgtcgttagtgaaggggaaatgggttgtatcctaagggattgggaaatgggaactgaatttcaggagattgtggagtacaaggtatgtgtttacgttaggtgatgagcagtgtcaggatagtgaactgtggacagtgtcaaatgcttttctgtagggaagatgaagttagcatcatcttatcacttttgacatgcttttgtggtttattttgttttgtatttcgtttttactagaaatgaaaggctttgccaaagcctctgtactatgcttcagagtaggacacacaattctgagattgctggcaagggctagaggttggtgggcatggttaggacgtcagtcaggatatgaacaagttttcctttgtagtgtgtgcgtgtgcccatatacatacatacatgtatgtatgctccctgtagtctgaaacctattattttgatctcattgtcaatgtatttttagaatagttgtctccaaactttttttgtcttgtttttttgttttgtttttgtttttgttttttttgagacagagtctcgctttggtccccatgatggagtgcaatggcgggatgtcggctcactgcaatctctgcctcccgggttcaagtgattctcctgcctcagcctcccgagtagctggaactgcaggt

SEQ ID NO: 57262 - DNA, 1042 bp, Homo sapiens
gagaatgtatcatcacatttcacctctcctaaatatagtggtattgtgaaattcacgtaagccagatgcttagttcaaagctgatatattggtttgcttctgtgtccccacacaaatctcatctctaactgtaatcaccacgtgtctagggagggaactggtgggaggtgattggatcatgggggcagtttcccccatgctgttctcgtgatagtgagggagttctcatgagagctgatggttttaaatgtggcacttccttgctctgtctctcctgccgccacgtaagacatgccttgcctccccttggtcttctgccatgattgtaagtttcctgaggcctttccagccatgcggaactgtgagacagttaaacctctttcctttataaattacccagtctcaggtagtgtatagcagtgtgaaaacggactaatacgaaagctttttacaccttctttcctagacaatacaatggtgggtgaagagaagatgtctctaagaaaccggctgtcaaagtccagggaaaatcctgaggaagatgaagaccagagaaaccctgcaaaggagtccctagagacacctagtaatggtgaggcttaattttttttttttaggtgaattagtgaaatagagaacaaatacagtgttatagaataagtattgccatctctttaattctttattgtaaatgggtattgatagagttttatatgtctagtaacaaagcaattagacaataagtcctttctcgttaattaatttggtggtcatctattggtatctgctgtgttttagagaccattcattcagtcacgtaacctaccaataattgctgaggtcccccgctggatgctggggctatagcagtgatcagtacggatttgtttgccattatggagctccaagttaagtgaatgacaaaacctccaaaatcatacacataactagatttatcacagtgtaatattcttgtaattaactactttcataatagatgtaatgagtaaaatgtgagtaattagcagggtgcctaacccag

SEQ ID NO: 57263 - DNA, 1035 bp, Homo sapiens
gcatcttagtggtctcaactgtggaatctgttcagggaatctaatttcccatgctgtcagaatcagatctatagcattgcataattaacatcgttgtaattactgtgtgtacatttactagttttgttcttagtattttcatgtataaatttccttctagttattttgaccatgctgtcgtgttttatggttgcaccacagtttacgcagttacctttgtatttgtttgttttcaactttatgatttagacagtgctactaggtagctgtatccatcaacttaaaagtcatgtttttttcttcccgtaggtcgaattgacataaaacagttgatagcaaagaagataaagttgacagcagaggcagaggcaagtaactccctcttctagaaacaaaaatgtagagttttagatagaattttgtttggtaacatttttaatgctaaattgctcagataattatttaagccattcatcagttgctgttatcctgtggaacaagaaaataagatctgctgacttgtcatcctgcgtaaggatccagattgcctttttctctcccatctcatctatcactggcattttctgtctcttaccagcaaatcttggttttagtgacccacgttaacagttgatagcgttgaatgtctgtatgagtgctttgtgaaagtatctgtcatgattcatagtaaatagcagctctccaataaatgttgaatctgaatctagaagtagattccctgtcaaggaagtagaaataacaactcgaaaaaaaatcatgaaatcatttcaagtggggataaatagttctacaaaccagaattcttcagtaccctcaggaaattgtggagggcgaagaacacttttttaaaaaaacattataatccaatacctgggtgtaagttgacttaaaatccaaagcaaactcctgttttcccaaggagaagatcacttccaaaatttgttggccagtttgactatataaacatccggtgatgaagatgaagtagccctgttttatttatttagttacatg

SEQ ID NO: 57264 - DNA, 1080 bp, Homo sapiens
gattggcctctgctcaggaatgagcaaggatggccagcctgtgaggctagaagcatgatggagtcagacatggtagacgtttctcactgtcgtagtctttgcaaaggcagtttcacattcataggctgtggtcctccttattgcccacatggctctagtcattttgtctgagttccaagtggccaaattgagggaaggaaaggagtgggggtaaggaacaggtatctgtgtctgttaaggaaattttctgtggactttgacaaatcatttccacctgtatctcattggctacctaggtgcaaagagagactgggaaacttatttactctaagcagtcatgtgcccagatagaaatcagggattctagtactaagaaagggggtaggcactgatagggttgacaaataacagtttctactatggctgtccatttttctttgctgtcccaatctactggtcaaatttcacctttttgctatgcaagtgtgactatacatttttctgatattttcctttctgccttttctcatttaaatgcacgagtgtaagaatctctagtctattttgaataattttgtgaaagtcagtttattgtgctttatgatttcatcacttacaaaaggtagacaggtacctgtcctgttgccctcgaatgtttagcagttcaatttaatgaatgcctgcttggtttctttgtctatcaggtactacattaagtgctgggattttaaagaagttgtgttttctgttctcatgctaactgagaacactatatgcaaaatgcatgagcaaggggaacagtgacttaattagataccttaaaaatgttctttggccaggcacagtggctcacgcctgtaaacccagcactttgggaggccaaggcaggcagatcatttgaggccaggagttcgagaccagcctgggcaacactgtgaaaccccgtctctactaaaaatacaaaattatcagttaacaaaaagatacatcgtttaaaatcagttgggtggggggcagacagtgagatgccaaagagcatatacacttgaatatatagaatttcaagtaagtgcaatgaag

SEQ ID NO: 57265 - DNA, 1072 bp, Homo sapiens
gcgaccttgccattctctacaagaaggaaaagtgattgccaaagtccataggggctgggtgtggcgagctttcccttcttaagagttgtgtatgtacctgcctcacagagagggtaaatgaagtaacatacataaaactgtaacacaatatttggatctgttttagctgggcatggtggcgggcatctgtaatcctagtagtgaaaaggtcattggtcaattaatgttagatggtgttattggtatattctcttgtctgtgggattagatttcttataatacttgaagtacttatatcttgttttaatttttcctcttctcagggatttgagagcacctccagaacaaggaaagatttttattgcaaggcgctctctcttagagtgagtatttttagttgtttttaaatatgtttgatttttaaaaaactattctgatagaatcattgcttagtatatggacatgtaatgagttctgtatctgtataaatcattagtgggtttttttcttctatgctctctcttgctcctttctgatcttttggttctgtatctagtttcaaaagaggagttagggataagaatggttatctgggcttggcactgtgactcacacctgtaatcctagcactttgggaggctgagacaggcagatcgcttgagtccaggagttcaagaccagtttgggcaacacggcaagtctctctctacaaaaaatacaaaaaattagccaggcttggtggtgcatgcctgtaatcccagctactcaagagtctgagacaggaggatcgcttgagcccggaagggtggaggttgccatgggctgagattgtgcccctgcactccagcctgagcaccaggtgcaacacccagcaactccagcctgggtgacagagcaaggctgtctcaataaaaaaaagtgtacttttctttaaaaagacatcttatgcttatcaaaagttactttctgtgagtcaagttgatgtttactacttcccctagataagaaggccggttttctaagcatgtaatgtgctgttcagtgttttctaagcatgtaatgtatagtgtta

SEQ ID NO: 57266 - DNA, 1359 bp, Homo sapiens
attctcctgcatcagcctcctgagtagctgggattacaggtgcccaccactgcgcctggctaatttttgtatttttagtacagatggggtttcaccatgttggccaggctggtctcgaactctgacctcaagtcatccacccgcctcagcctcccaaagtgctgggattacaagcgtgagccactgtgcccggccatgttacgggttttaagcagcaggaaaacaggttccaagagtaagctcttctaaaaatatcatttggtaaagggttaggaaaagtgatggtagaaactaggcttgagtaatctccctgaaggattatagcagtcttctatactagtgttaaatggaatacatatgcgaacattactgtaagggtcacatctgtactttcttttggagagaaaaaaatcgccttccatcttattaagccatcgttattataattctgtctctgttatgttccaggtctttggttgctttttctatgtgtactacatctttgaaaggctttgtgcccccttgtttcggaatatcaaacaggagcccttcagcgctcgtgttctggtcctatgtgtatttaactccatcttgccaggtaacatgggtacttgttaatttggtcatgcataaattcacgaggtaaatagaaagctattgcctatgagcacctttgctttgcctactttttcatctaaacttctatacatctatgcccatcttgacctcttttgcatctactttataaatgaagtatccttcatccagtctcaggtcagtctttcatcttatggctttcactcaagttgtgcctttctctgacagtggacagtccacattcatgctgtgtcttcctgttcgctattaagttcattgtaatcttgctcctgattccaccaagccacttaaatgccccttgttgaaattactagtaacttgtagaaattacttgtagaaattactagtaatccatattctaatccagtggatggattaagatgtactttaccccttatccaagttgacctccatgaagcattgggtgctgctgaccacatttttaaatctctcttgtcactgttttcttgccttttttttttttgaaatcgggtctctctttgtcacccagtctgaatgcagtggtgtcatcatggcttactagcctcgacctctggggctcgagtgatcctctcgcctcagtagctgggactacaggtgcatgccaccatgcctggctaagtttttattttttggagagacggggtctccctatgttgcccaggccattctcaaactcctgggctcaagttatcctcctgtctcagcctctcaaagtgctggggttacaggcttgagcca

SEQ ID NO: 57267 - DNA, 1019 bp, Homo sapiens
tctctactaaaaatacaaaaaattagccagatgtggtggtacatgcctgtagttccagctacttgggaggctgaggcaggagaattgcttgaaccctggaggcagaggttgcagtgagccgagatcgcgccactgcactccagcctgggtgacagagcaggactctgtctcaaaaaagaaaaaaaaaaaccagactgggtaatgtcatttgttgaacccactttgaaggaagttactgttttaaaattaagataattaactccaaaagtatatcatctctggaatgggtaaactggaataataacttatattttacaaaataatcccagctaaataaaatgatgtgatataattagttgcttggtatgtgagctatttggaaagactgttaatattgttaatcttatttttaggtgtgctgattctcttccttactttttttgcctttttgcactgctggctcaatgcctttgctgagatgttacgctttggtgacaggatgttctataaggtagtatatacttagacttagctttctttttacattttattaacttcttcattattagtattttgacattgttggctaatgtcaccagcctttcacacaaacattgtgaaataattttcttttctacaagttttgccagtattttctgaaattcggttacagatataactagcataaccttgtgttttcttctgtctctaatatctgctcccttaacataagcacatggtttctgctggatcctgcaaggatatattggtgattccagtaggaaactgtttgttcagagcacaccatgagacttccctgagtgttcattcatttgaaatggaccgtctagttctgtaggaatgacctcagcaaattattccatttaagacaattgagcagttcatgagggaaataacttttccctctttagttttgaaaggtgttaattttgcttcagatagtatccttatgcttctaaagttggaattaagctatagaattagagtcagaatggctc

SEQ ID NO: 57268 - DNA, 1070 bp, Homo sapiens
tattgggagcaagaagcatatatagggataccaggactttgaggtagccaccatctcaccctggataattttgccatttatggtaaccaccaaacagctctctagtgttagcactctctctggtcttcatgaccatagaattttctcatgacattctagtagggtaaggggggtggggcttactgattgctgtttagatgaacattagatttaaatgattctatgtgttccgtatgaacctaggaactaaatcatatatagtatgagaattcatgtcatattcaacactaataaccaaaatgcctttgaagatttttctgtcaccagtgtatgaaccaacagtttatcacagtataatttgatttttctgttacatatgttctttgggaagtcaggggggtttgctttcgggtgggatgtgtgtgtgtgtgtgtgtgtgtgtgtgtgtgtgtgtgtgtgtgtgtgtgtgtgtagttttatacctttactttttccctcaggattggtggaactccacgtcatactccaactattatagaacctggaatgtggtggtccatgactggctatattactatgcttacaaggactttctctgggtaagtagcaaggtttaagttgatattatttatgaaatggagattctttttcagaaagtatgagtattatacagctggaagaagttatatttaattgctcatgaggaaagggtgatagtatcttttcagttttcttttgagaaatttacatctagaaacctgctttgaatggtactgcttagaaaccactgtgtgtacactagtaggtctaatactgtgtcttttgctctgaattttatcttacataacaaagtaagaatgcatggaggttgttggagttgaaatgatccaccaataatggatagtttcttatgagtcttgttgccaacaaataatctccctttggtctttttcattcgtttttcatggttaaaggtagagaaacactttttttttttttttttgagagagtttcgctcttgttgcccaggctggagtgcagtggcatgttgtcggctcactgcaacctcc

SEQ ID NO: 57269 - DNA, 1050 bp, Homo sapiens
taaaaaaatatataaacagttgttgctcactgtgattattaaataacagcagatacctgaggtccctcatcttctgataaattatgttttgatacctgtatatttctttctttttttttttttttttttttttttttttttttttttttgagacagagtttcactcctgtgacccaggctggagagcagtggtatgatctcagctcactgcaacctctgcctccctgcttcaagtgattctcctgcctcagcctcccgagtggctgggattacaggcacacaccaccacgcctggctaatttttgtatttttaatagagatggggtttcaccatgttggccaggctggtctcgaacttctgacctctgataactgtatatttctttgttgccttcctatttttagtggctttcaacttcattgtcaatgatagtcggaaaaagccgatttggaatgttctgatgtggacttctcttttcttgggcaatggagtcttactctgcttttattctcaagaatggtatgcacgtcagcactgtcctctgaaaaatgtgagtcaccaacctggttggagtgcaaaagaacctgtttattctctgtttgtgagagttggtgggcaatgttgaggagcacagtagtggagattatgatgaattagtgttaaagagagggaaatgaggagtaaaagcattagtttatcatctgatcttattgtacttgaagtttttccttttgtttagttttcttcacatttaactctcctagcttttggttttcttcttttactgccttttcttcagccccttctaattttttttttttttttgagacagagtctcactctgtcgcccaggctggagtgcagtggtgcaatctcagctcactgcaacctctgcctcccggattcaagtgattctccttcctcagcctcccgagtagctgggattgcaggagcatgccaccatgcccgctaaatttttgtatttttagtagagatggggtttcaccatgttagccaggatggtcttgatctcctgacctcatgatccg

SEQ ID NO: 57270 - DNA, 2576 bp, Homo sapiens
ttagtcatttatatatgtgtatatataatatatatttatatttatatatttatttatatattatatattaactaatatatactaatatttagtaccttaaaatctaaatggtggttatatataaatatatatatatatatctatttgtcgtccttaaccaccatttagattttaaggtactaaaagtagggctgtgctaaaataaagatacagaaagaaatagtgcctatttagaaactggtcaaagtccacacaattgtgtatagtttactggactttaaaagctttatgtgaagcacctaattgaataaatctgtgttatagataaaagtactgaacatcttttgaattagtgagctgcttataccttgagggttgttgaaatggtgggaggcattttagagatgtacaatgtatcatattaacatccctgcctatctccacacctcctctactctgtacacaaattatttttccattcttatttttccccactgcagcccacatttttggattatgtccggccacgttcctggacttgtcgttacgtgttttagaagcttggactttgtttcctccttgtcactgaagattgggtagctccctgatttggagccagctgtttccagttgttactgaagttatctgtgttatttggaccactccaggctttacagatgactcactccattcctaggtcacttgaagccaaactgttggaagttcactggagtcttgtacacttaagcagagcagaactttttttgtggggctgggtggggggagaagaccgactaacagctgaagtaatgacagattgttgctgggtcatatcagctttatcccttggtaattatatctgttttgtttcttgactctgtccaatcagagaataaacatcatagtttcttggccactgaattagccaaaacacttaggaagaaatcacttaaatacctctggcttagaaattttttcatgcacactgttggaatgtatgctaattgaacatgcaattggggaagaaaaaatgtagaatgatttttgctatttctagtagaaagaaaatgtctgttttccaaagataatgttatacatcctattttgtaatttttttgaaaaaagttcaatgttcagttttccttagtttttaccttgttttctctataggtcatgatttctgtgaagcaaaaagatgccttttaccatgaattcttgagtttacatcaataatattgtatattaaggggatcagaagtaggaaggaaaaaataagagatagcagaggaaaaagaaaaacatttcctcttataacttctgaagtaatttgtaaaaaagatttgtagagtcaatcatgtgtttaaattattttatcacaaacttaacatggaagatattcctttttaactttgtggtaacttctttgaagttatttagaaatatcctttggaacaattattttattgtctaataaatattgacttctcttgaattattttgcagactagtgagtctgtaccataagtattaatcacctccactcatattaaagtgatcattaagaatccagaagctggcttctgcatttgctcagttatacttttaatggtagtatgtttttaggtggaataaattaatatgtgattggtttcaaggaaatgtactctattatgtaatacttccattttataagatgcccatttctaatacaatgtgtgtaggaattatttgtatgtatgaggtatgattgtaaagattgagcattggaaggggtatcagagaccatgtagttcaactttccactcaaagtaagatttatgaattatttaaatgatagttgttacttggaacagccacttgagaggctctcttggtattgtttggaattgttttaaagtcagtttgagtctcacaagaaggtaagtagagtttcttaatagtcacaacttaatttgaaccacaagtatccagcttaatcacgtatcttactcacgataccactggtccagatgagtttaggtaattttcaaacattaaatccaacttcaacggaaacaaatacactcaagggaagttatttttaaaaaggtactctgcatgttcccgcagtaatgttctgcacaacagtattgtaattgtaatggaatcataacctgctaactagtttgctttaatatggcttgtaattcttgacatttttcttaaaattaaaacgaatttttattttgaatttataactgcattttaaatatattggggacagattgcgctgagacctggttatgagcaagccaatcttttgaatctagagaatggaattcttaggtttatatttctgttaagaaatactataaatatgactcttatgagaagactttgttgctctgtagtgtttctgaatactgtatttgttggattgatcaaggctatttttcaaaaagctctctgcttcctgtttgtttgtttgtttgtttttgagacagagtcttgctctgtcgccggggctggagtgcaatggcgtgaactcagctcactgcaacctctgcctccctggttcaagctattctcctgcctca

SEQ ID NO: 57271 - DNA, 1030 bp, Homo sapiens
ctgaaaagtaataagcttaaagtttttgtttctgtaagatgtaatgatagtaactattattttgggcatattaaccaacagaacaattatgtagtatgtatatcactttctcattagatctctaacttgaccttctagtacctttatgtgtgaggataaatttgttagatccttttattctcaatcttggataatgatgcaaaatggaattttgttttgtttgttggtagattcacatactaaaactttgcaggtaaagttgcttgcctcatgttagaatttaattagaaaactgaggctgcctttttttttttttttttttttttttaagacagagtcttgttctgtcgcccaggccagttttttttttcttgtacagatggggttttaccatgttgctcaggctggtctcaaactcctggagtcaagggatctatttgcctcagcctctcaaagtgctgggattacaggtgtgagccacggctcctggctccttgctccagaatcagttttttaatggaagatagctcatactttgtttttgtttttaaagagacagggtctcactctgttgcccaggctggtagtagcgtgatcatagctcactgcagtctcaaactcctggactcaaatagtgctctggagtacctagaactacaagtgcctaccaccacacccagctaatttatttgtttttttttttttagagatggggggggtctccctatgttgcccaggctggtctcaaactcttcacctcaagcaaaactcccactgcagaaagctttgggattacaggcatgagccaccatgccaagcccatacttattgttaataaagtttcagtgacttgcttactaatcttatgcaaaatttcatgtaatttatgtaatactacataacaatgctacatatggtatgtatacatacactgtatacacacaaaggtctgttctgggtattttatgtatcttatctctaggctttatggctctgaaatggagggaactggacataaatgtttcaagga

SEQ ID NO: 57272 - DNA, 1082 bp, Homo sapiens
atgggttaatttcacgagtgcatatcacttttgactatattagtcaagcatattattaaagtttaaaaaactctaaaacttctgtactgtttttttcttaagtgctctcttccttatttctacattactacattcacatttctgctgtcaataagccctaatggagtgataaactttaagctagtagatactgcaccatgtcttgtggtggtgttttcttaatgaaatggaagctgtacttcctgtttgtttttaaatacttttgaaacagacagttcatgtaccccatcatttagagatgcagtttgaatttccatggaaaaaggtgccaattttggattgggaaaggagctgaagccccagtcaagactttgccatttggggtaatgcagcagattcctgtgtctgtatctttccagtgtgtgtgttaatccatagtgttctgagcaccagaagggtcatgtaaatctgaagttgttattaaaggtttttctatagtgaaagatgtcttttctgattcattcttgtatgttactttcctgaattgctattccctctgccccctgcaagtccttgtctgatcactggtaccaatactttgtttagtatgagttgtattagcattaacttaaaaatttttaggccgggcgcagtagctcacgcctgtaatcccagcactttgggaggttgaggtgggtggatcacaaggtcaggagttcgagaccagcctggccaatatggtgaaacctcgtctttactaaaaatacaaaaaaattagccaggcatggtggcacatatctgtaatcccagctacttgggaggctgaggcaggagaattgcttgaatccgggaggcagaggttgcattgagccgagatcgcgccactgcactccagcctgggtaacagagcgagattccatctcaaaaaaaaatttttttttaacttaaaaatatacaaaaaaggcaaaatactgcacatgtaaatgtgataaatatatttggaagaaacctagtctattttttatttttttatgtctttgagacagtctcattctgttgcctaggccagagtacagtggtgt

SEQ ID NO: 57273 - DNA, 1050 bp, Homo sapiens
ccctaacatatgagaattttggttctgatcaagatctttcacagctcttcttccctctaaggaatagaatcatccactcagcattttgcgtcatgtttttagcaggtgattttataaaggaaagaatgggtttcaggtagaagctccctgccacttcctgaggcatatcctcaggttcatctgcttctgtgctcacccttttccctcccctccagtctcagtctttccatttaaggttatttcttccttcgagcacttaatcccatgtccaatgtcttctctgttttgcctctttaatatcttctctaattgttccattttatcaatctaaaagcaatctaaaacatggtcatttctcccatcctaagaaggatgtcccttgaccttgtctctctgctacttctttctctctttccattccatcataatcaatttgtttaaaactctagaactactataaggtcaccagtgattccttattgccaaatccaagtatcttcaattttgtatttaacctggcttctgtgtagcatttggctctcttaaccattcactccttttacaatgtcctggtttttctcctacttctttatttcacccttgttttagagtttcacccttttctgcctcttaaatgttgatattctgtccttggcttgctttcacttctcatttgtacacactacctattactgtgtttcctgtggttttcattgccacctgcttaccgagaatctcaaatcagtgactatcatgtgccatcacaaactcaactcttgtttgtatttcagcctctttgaaggcgttctcctccagtaaattctgaagaagctcccattgttatcagagtcatactatacaggtatgatctgatggcctatatgtcagtgtcttgggtctgagaaagaaggggaaggttctatctacacatttatgaaactttttttttacatttaaacactgaagaaatatcatctttctaaattattcacctttaacaaatgtgctgtctagatcttggcaagaattattgtgaaataaccactgaat

SEQ ID NO: 57274 - DNA, 1014 bp, Homo sapiens
atctatacatgaacagcagaatgtataagctagcatttactagcatgtctctgatgcttttgttcatttctgttaatcgtcatttctgtcccctctgcatggaattttatacttgtctagggtaagagtttgtagactctttcagcagaacagattttaataaccaatttatttgttttattttaaaaatttatttttgaataaccaatttaatagtaaattttatatgaacatttggcataactttaccagtttatttctatgcagtgatggaacattatgtaatgcagctcatttcttgaccaactagttatagaagtaccattaggttaaaaattagagaaatctaagagatgttatacttagtgagaggaagcagaaatggtgggtagattctcagaggttttgatgttcagtactgacggaccatgttctgtgattgtaagaaagattgaaaacagtttgtatggagatagagttgattagcatttgagctctgaaagcagaactctagtaaaatgatctcgacctaacaaagggtctgttccattatatagactattaccataatcctggattatttcaactgggttttggcctctccattatatgagatcatatgtatatagctaagaagtctgattaaagtatggaaagattttaggaaacactaagaagatacagggatctttactgatacctaaaaagattacaattgagtaattgctcaattgagtgtaggggcatacctgaaggaagaatttgcatttgggacttcgaaggaagcttccaagagatttgggaagagacctgaacaaaaagttaaagcatggtgaatgtgatatcactgtcaatccagtataaaagcagaggaagttgaaggaaaatctgtatcccatatgcacattttttctgtctttttagatcttagatgctagcgttacatccacaaaaccagtgttgccttgtataactattatattggcctgctgacctgtgctacctcagatctgt

SEQ ID NO: 57275 - DNA, 1480 bp, Homo sapiens
ccaccatcatatttacagcagctcgggagggaagagagaccctgaagtgcctgagccaccatgttgcagatgcctacacctcttcccagaaagtctctcccattcagattgatggggctggaaggacctggcaggacagtgacacggtcaagctgttggttgacctggagctgagctatgggtttgagaatggccagaaggctgctgtggtacaccacttcgaatccttccctgccggctccactttgatcttctataagtattgtgatcatgagaatgctgcctttaaagatgtggccctggtcctgactgttctgctagaggaggaaacattagaagcaagtgtaggcccaagggaaacggaagaaaaagtgagagacttactctgggccaagtttaccaactctgacactcccacctccttcaaccacatggactcagacaaattgagtgggctgtggagccgaatttcacacctggtactgccagtccagccagtgagtagcatagaagaacaggggtgccttttctaaagctaagcacagagttggttacagaaggtatatgtttatgaaaaagtttgtttaaagaccttccatttatatggaaggaggttgataaaatagcttgaggaaatagcctgaaaaacaaagatgagcttattttagaaacaagtttttattttttattccttgtaaaatctttctaatctaagccttgacaaagctaaaaattaacctgactttttttctttggaccaaatcaggtttgaaatatcgatgatatatatgagaattttttttaaattctaaaatatagcaacattgcacaggaagatactcttacttcttagagtaactacagagtgattttttttttttcttgagtgagactctgaagaaccttttcgataatgtttggacttggactaaagcaattagaattatgaagcaatgataacctttagaaaatttttctatcacatgttgaatattttcaaaccttactttaataatctaaagttacgggattatatcttatattaattttgcagttttgagtagtatgataaaagaaataagaattcaaaccattaagtacctacctaaatactacatgtaaggcactgtgcttttatttcattcagctgaggtataagcagctgtactcaaatgttcttaaaaatgagaaccagtggggaaattgtttataatcattggaaatgaagaaattccaattggctatatctttacttcagcttttcttgaacaatttacagcattgattttcaaactgtgtctactggcacccttcccctttgtatcagagcagttctgcttttaactgttttatatgttggggttctctatgagatttcattggaacaaagagtttcactgatattcgagtttgaaaaccattgattaagtgaaaaaacatcttagaagataggaaatatgtttaaaaaatgaatgtatta

SEQ ID NO: 57276 - DNA, 1050 bp, Homo sapiens
taagtagaataaaagtaatagtcttaaagaaaagacaggaaaaatgttaactttggttttttttttttttttttctgagatggagtcttgctctgtcccccaggctggagtgcagtggcacgatgtcggctcactgcaacctccacctcccaggttcaagcgattctcctgcctcagcctcccacgtagctgggattacaggcgcccgccatcatgcccgataatttttgtatttttagtagagacagggtttcaccttgttggccatgctggtctcaaactcctgaccccaagtgagccacctgtttcagcctcccaaagtgctgggattacaggcatgagccaccgtacctggccaaggtatagaaagccttttagtcaaatcattctttggtttggtgagagatataaaggtatacatactgtcattagtgtactgcctaaaaataatattgattcttttcctctccagaggctggaagtcatccacaacaaacacaaaaattggaagaaattaaagagaatgcacaggacaccatgagacagattaataaaaagggtttttggagctatggtgagaacaaacctggttttactgcagtgttgattcactttcagaaatcctcagtgaaaatgcctagaaaactagcagatttaaacagttttaacattgtgtttatatatacttatttaatgattggtagtgagacatagtaaaatagtacactagagttttagggatttttcccttacgggtgctggctgatattttgctgtgcttaacaaaatggaatttctcacaataggaaaggcttttcctaaacaagaaacaaaaactgcctttctaattagagaatattaatttttcaagtgcactttaaagttatgactcctaaaaaaatggtcggctataggtagtaggtgcattgagaagatgaaaaaaaatcttgatcactcatgtctaaattacatcattagttataataacaaatacatagactcagcttttaccttttatttttaaaaattttttaccgagtacttaactct

SEQ ID NO: 57277 - DNA, 1315 bp, Homo sapiens
gttcagcagttgtcagtctggctcatccactataaaagtccctatcagccttttgcataaggttttgctaccattgatgagcattgcctttcattagggaagaggatatatttaatatagccaaaagtttgttctgtcatataatttgttttatattagtgtcattttatatttattaacatgataagattttttttgttgttgttttaattgcctttagtgggagccaagagaaataatgtttaggaagtgtcttgtaaaccatgaaaatctatgtaaatattattattaaacagggaccttgttaaaatataaatttatggggaattttttccaataaaaattataaacttttatctcaatagactctcaaaaggatttggaaaatgatccatcagtaaattctcaggcgcaggagaccacaatcatagcaagtaatgctgaagaagctgagatcctacactctgcctgtggtcttagcaaagaccaccaagaggtagagacagaaggtccagaaagtgcagatacaggtgataaatcagaaagtccagatgaagcaaatgtggggaaacatccaaaggataaaacagaagatgagaacaagcagagttttctggatggcggaaaagggcatcacctcccttcagaaaatctgggtaaagaacccttggatccagatcccagccattctccaagtgacaaggtaggaagagcagatgcacacttagggagcagctctgtggccctccctaaggaagcgagtgacggaactggagcatctcaggaaccacctactacagactcccaggaggcccagagtcctggtcattccagtgcagggcaagagggtgaggatacactgaggaggcgactgctggccccaggtaagagaaccccctgaactactctcctgttttgtactgctctgttaactgagaacacagcagaagtcagaggccttctttccagagaacttttgtcatctttcataggagtaaggcctttgggccttgcccaagctcacaccaagccatgactgagttgattttagaatgaggtttctcatctaggctagctcattccactatattaagttgcttcctacacataaactgcatttctaagcatgtttttattaactgtttatattaatgtgatatgacaaaaaggggcatgacttttaaaaaattcgcttctggttttttatttcttatgagaatatttcgacttacaatttttaaaatcttttactttttgggaaactaaatgttacataaatcaagagatgggtatatttaaaaatgagcattaatgg

SEQ ID NO: 57278 - DNA, 1035 bp, Homo sapiens
ccaggaaatctgcagtgattgtttcagcaatgacttaaatttctactcttagatttattttttattttaattcaagctagtctgttgaagattctggtcacttgatcttactttttatactctttcaactatgctggaatatattagattatgaaattcatgaaagattaataatctggagcttttttcagtagtctaggatttggaatatgattctcatgaaaggaaattttcttcacgaaaaaagtttcacagaggaaatagtactcaagctacacatatttaataaataaagctgatacttgcatttctcccttgtatggataaaaagtcatttaattttttttcattttgttttagtcactgtatatatgccttatttcctgggtccatgggaagcatgagtctgttgggacttgggacaagaagaaaacaagacatcttcacaaggaaaaccaagtactaaaaaaagtatcctcccaactctgaagagatagaacacaaacatggccgacagtggacttagggaacctcaagagggtaagactgatttgtctggcactgaggttgctgctgtaggaaaccaggggtgtgcagagagagaaaatctctgatgactaaaatctgaggttttgaagtaaaaaagctaattcagtgggttcatttgttttgattatacttattctttcaaatttactgaattttactataatgcgagaccctaattataatataaggaagataaatgttttagagactccaatagtaaggacttatagtaatggaaaaatacaatgcttctttaaaaaatgatggtagacaaatctttagagttatatatatcctgtgatgtgctatatttagaaggtatctttcttcttcctcttcttctccttttttttttttttatgttacccaggctggagtgcagtggcgtgatctcagctcactgcaacctccgcctcccgggctcgagtgattctcatgcttcagcctccagaatagctgagattacaggcgcctgccaccacaccc

SEQ ID NO: 57279 - DNA, 1018 bp, Homo sapiens
aaatcatacttgctacatgttgtgaaacctgaagttatttgttagtctgtatgaagaatgtaccccagagatgcaccctgtatctgccttatgtctcttacaatggaggttctctcctgttatattgctgaataaactatgtgaactgctaaattgactgaagactagttagtttatcactaactctttaatgaagaatttcactatcctacaactcctcctaaaaagtgaaaatttactttgagagagtgctttcgagaatagtattatgatcagtattattgcccctaaattttttaattattagagaatgcttatgttacaaggacatatactaagaaacattctacaaatgtgaaaatttaaatatcagcaaaatagagaaaaggtttttgtttttgttttagtcaatatctccattaaatagtaagatcagattaaaaggatttatatcattgatttctcaaatcaatacctaagcagtacctgtgagagcttgtttaaaaatggagatttcttggtctgctttagaaattttgattcctcaggttgcttgtagggcccaggaatctgcatattataaataacacctcatgccgggtgccatggcatgtacctgttaccacagctacttcagaggttgaggcagcaggatcacttgagcccaggagttcaagaccagcctgggcaagatagtcagaccactgtctctttcaagaaaaaaaaacaacataaaagatataaatagtacctttggagattctgatgcaggtgctctctagaccatactttgagaaatgctgtagtaatatgtccatagtgtttacttatctggcttaaaaggatgggagcagaatactcatagtactgcaagatagtaccatttatttggtaatactggctatgtaaaaagagatttcatgtcagactgaagatcactgttaataatttaggtcataactcagccacatttttctcattaattaaactaatcaggaatgtttcagtcttcttcaca

SEQ ID NO: 57280 - DNA, 3800 bp, Homo sapiens
attgtgggagttttattcgtcatctctctgtaccatgactagagacccaagatttaattcagtagctgaagctttcactggtagctcttgtcagcagaccctcagggaaatctattatgccctgtgctatcagcaccaagtatctagtcattgagtcggaaaccaagccttttgtccactctgcctgaggaactgaattagtagccctcacccgtacattgttacctaacctcagaaaacacatcagtatgtctacttgactctatttcacccgctctgggacttccatcaaaatatgggccccatgttgtcgtagcactatcagagcctcttcattcgccttttaaatttaccattttaaaatctgagaatcacagctattacttctgtaaggagagtgctttggcttaccacaactaaggctataattccttctatttttcaggccagatctttatattttaactcatgccctccccagcgtctcttattactctcataggatcaagtctcagaatttacaaaaagaacattggagaaaggcatggtatatatagtattctgattctgtgataccctctaggtggccttctagttgctccatacatcctactgtcccaccttatttacatgctacatccagtgtcatgaaggaatgcaaagatgatgataacatctgcaaattccaacttatttactatgcattttccaagaatagctcaggactattgctcagggctgtgccttacttgccttctcagaatgacacggtgtataaaccaataaaactaggtggtgggcacccgggcacggtggctcactcctgtaatcccggcactttgggaaaccaaggtgggcggatcacctgaggtcgggagttcgagaccagcctgaccaacatggagaaagcccgtctctactaaaaatacaaaattagccgggcatggtggcacatacctgtaatacttgggaggctgaagcaggagaatcgcttgaacccaggaggcggagattgcagtaagccaagattgtgccattgcactccagcctgggcaacaagaatgaaactctgtctcaaaaagaaaaaaaaacaaacaagaataacaaacaactagatggtgagcaattagacttgcccctcttgatttttgacttttttttagccttcaaaaggatttcattcaactttctatggttagcttttaagaatattatctaaaaactgtgtaagctttttttttttttggatggattgaaacctattatggaaaggctgtcatcattaatgttatcccatacattatggggataccatatgtggcacccatttcacagaagagacgtacaagagatcgctaagttttaccaggttagacgtgattatacagaccttattattcccaaggcacacatggagtaaagaagaaatatagtcctaagaaattaagctagtcctagtataaatgatccagaattcttcctagtgccaacatatcagttggtttgaacccatgttaaatagtcatgggaaaacccatgagacatttcttatctgccttaactaacctgaataatttccaaatgcatgtttctaataataatgtgaacaactgcaaaacccatgagtcgtctgaagttttatcatttacaggtatgtgacgcattcccagactcttcagccaactgagcatcagcttcttcacagcaattgggtcctgattaatgtcctcccaagacagacttcattggatccacgatcaagaggactctgccaggtttttctgacccctctacattgctataaagtgccaaggccttaagacttgggtacgtgtgttacaacggcaagagtgccagcgccaacaaaagacccattggacctgtcagctcctctgtttcaccaagcagacacaataaccttaccaacaaagcagagtaagccaagtgcctctgtgtgacaccaccagcagctgatgacgcataagaaaaatataactaatttagactagagccctatctcttcttgagaagctgggatttgaaggagctatcctgagatctgtactgctagtaagtgactgataacattataaactggatcggtccctgagttcagagactgagttgcaattgagtgaaaaatagacaacgaaatcttgaagaattgcacggaggtgcaagccaagtttatttggctctccaaataatattggttgaactaagaaattggtaaacgaaacctgtaataggactggtgtttgggcgtctctctctgtcactgttgtctcttgctgtcacattgctgtctgtgttgtctttctaggtccagatgttttcagataattcacattgccctgattgtggacaacagtggttccctagtttagaactaggccactggttgtaccaaactgaacttgttgaaaatgaatgttaccaggtattcttagaccgtattaacagagctgattattgtcctgagtgttatcctgataatcctgctaatagaagccttgttcttccttggtctttcccacttgagtgggctccccagaatctcaccagatggacctttgagaaagcttgccatccatttcttctgggtcctccactggttagaaaaagaatacatgactctcgagtagctggttttaaccctgcattacagttaatcttgaccagaacagataaaaccttaaacaaaaaactgggccaaaacaaatagcttctataatagtcaaaattgtcaagtctagaggcttttgtgtaggtagcccaaggaagatggaaaaataattcatttctaagtctgacccagattgtcactactttgggaactgcttaaattgttggatctgcttccgtggcctatacatattttattcacatgaatttagttagtattccagccagcctgttcatctagactgaggctaatctgttcatctagactgaggctaatccgtatttcctataaactgttttggaactaacttaccactcctaaaaaaatttctgcaacctaatgagtgtcatatgacaaagtagtcctagaggggaagtcctatactgtgtgcttcatagtggtatttctaatgataacttttgtgggaaagcagcctcgttatagctggatcctagattagtccagtgaattttaataagaaattacactgttgtaaactcacctcttatgcattggtcagtgatgagatatatatataaatagatagatagataaaatttgctcttatatagccatttattcatcattggccctgtttggcccatcctcagtgtggctgtgagattattgataactggtcactgtcagataaatcacattctattaggaaacacctatataggttatgcagaaacatgcagaaatgccacctgtccatacttacgtggctttacataaacaaaagactgtcttgtctttgtggtgactgaatttacaacgtcctcccctggaaatggaaaagtacctatcaggagatgtatgacaaaagaaattatcaagcctgacttcatatatattatgaacagtctagaggaagcatctttcttagaactaaggaggtctgctgaacattggccacattctggactttcatgaaaatcatggacccagagttggggttaagccacttagaaaaagctgttgaaaacatctcaaaggccactgaacaatttttaaattacacttaacatgccaggtatctaggtatctagtgcttttagcaatattatcaatattatcaaggtcccagcttctttgtgtccttcccccttgc

SEQ ID NO: 57281 - DNA, 2014 bp, Homo sapiens
gtcagaaatcttagcaaactcttagatccttcgtgcatagcttaatacctctacgtggtcaaccgaaactagagatacaagtcaaaggagttgggagggagtatgaaaaagggtaagtaggaaaggaaggctttctgcactcagaaaatatctgtagaatttgatctgcgccaggcattcaattcctgtgtaaaaaacaattccctaaggaagtagagtgctttttgttccgaggctagtactttttcaaacttctttcaaaaatctagaataagtcaccagttagtgaaaatacagagaaacgaaaaattgtgaaaataataatgctgggatattatgacagtggatatggtacagaggagtgggcaagacttagaaatttagttttagacagacaataaatagctagcacaagttatagaaatacctaagcttggcaccagatctgactgttgaaagttgtgtattagccttaaaggtttggctgctggtgttttgaagtgaaattgtagacagaatttggaccatgggcttttggagcattagagcaacatagatagaaatgtaccagtaggtttccaaaccagttgttctcctttatggccatgcccctcaaaaagtatggtagcaatgcatacacacctgtttcgtttgtcagttcctggggcaagagagaggagaacattctgcagctattttctaaccttgggtaatattttttatttggcttctctgttctaaagagggaacagtgtgtgtactaaatagtactgaagattgtcatccatatgccttctctcagtgatctcaagattgccaaattaaaagtagtttctcacaaaacaagttgacttttttccaggagcattttattttcaacaaaaaattattttagattatatgaattcaaaaagaagaatgattccttttttcatactccttaatctctcattatctaaggtagttgtgaaataggaaactcttaagatttcactttgtgtatgaaacttattggagaaaccatctcatacaaaaaaagttatgattattgattagccttgactgtagtaccccctagaagaaaatatttaaaatgggaattcaagagagtttaaagcatttatactttttctatgtgcctatcttgattttatgtatcatatgaggaattggttgaggctgaagtctaagggataaattgcctggaaaagtcattccaatccagactcagtctgaaacttaattattatgctaccacaaaaaagaataagggaatttttatctattgaaggcagatttgaacttactaacatacattcaggaaatagcaaagaacaagatagactatttagagaagttaattaaaaagttgccatggttagttgatgtaaatttcagtggattaaatagaactacattttctattttggtgtgaaagtactattttcttttctaaattttcttttaataaagtttcaggaaggatcttaaatttattttagtttacatacacaaaacccctgatttgtattttcttttgtatagcatttgtgcagtagagaagctcctcaaattttgtttttttgctcactgtttttagtgaaggaggtttgaaaatacaagcatcccagcttttgctgtgggcctccctaaatttcctgtgatctctacaggggatctttttatatccctctaagagcccttagcctacaggggatctttttatatccctctaagagcccttagccttcacctaaatcactggttccagtctggattccctagacatctagaagtcctgaatgattttctttctgtatccatagtacttggcattgggcctagcacatggtgcgctcctcaaataagtgaaacaattatgtttaacaatcataaagtaatggtagttctcaaggtatttttatttagcatttctaaaaacctaatgatagtcatatacttaccttaaatcagctgcttaggacttaagctaatgaagttgagaaaggaagcc

SEQ ID NO: 57282 - DNA, 2481 bp, Homo sapiens
taaaagacaaaaaatgtttcctgccttcttggagattatattctatgggaggagtcgggcaaaaatcaaaataagtaaaatagtgtgttggtcaggactgttatgggaaaaaaaagaggaaaggggaagggagttttacatgaatagatttcttcttgaaatttggttagatttgtcctgaattgctgtaggtcaagaacaggaattttagacttacttcatttttcccccaacaaattgtatgttcttgggtaaattgctcgccatctcttaattttcacatttataaaattagtagatcaaaacagctattttttgtcactactgtcatttaacagaaatgctgcatacgtcatctaatctactaataacaaacttatgaggtaagtaacgttgtccccatttgacacacgagcaaactgaggtttagattaggcaactcattggattacatgctcctcttaatggcacagagggtgtgttccaggacatggtgcttgccattatcatttggtactgctgctcactgtgttggtcctatgagtttcttcagtctatgaatttcaggtcagggtggtcgacgtcttacagagatgcctgtaatcctgtcagcatgagattgcatgggacctctgcggtttggtcgcgcatttaccgcgcctgtcgctgggtcagacgacctggcagtagagggtgaaggatggagaaggcagaaggcagggcacggagactactagtcccaggattccacgggcgccttccggcggaaagtgtttgtcatatgggcggggaccctggacgacattcgggccgcggcggccgctgggtgcagccgagcggtgtggagcggagagaatactcgaagggctctcctgatactaacagttttacgatttaaaacttcgccagaatttgtaagtaaacaaaatgactatgcagcttttccatgttttagtattgaaactgatatcttgaatttttgaaaaggactttcagaaacggtccctccccacccccaccttcgtaccgcacaaatggtatttttatttttattgtttttgagacaggtacttgccctgtcaccgaggctagagtacagtggcgtgatcatagctcaccacagcctcatacttctgggctcaagggatcctcccgcctcagcctcccaagtagctggaactacaggcccgcaccaccatgccctactaattactttattttttatttttatagcgacagggtctcactgtattgcccaggttggtctcgaactcctggcttcaagcgattctcccacctcagcctcccaaagtgctgggattacaggcgtgagccaccacgcctggcctcactcaaacagtaaacgaggtaggttgggggtatatttttgttttgggataaaaagaaactgaatcttataaatattaaatgggttaagatgtgagtaaatttttgggtttagactttaaggtgagaagccgaattattttagggttcgaaatgtgagtgggaaatttgcctactagtgtaggcggcgattactccattcccaacatgcctaggttctcgacattcataatcttaatcctgaaaagataatacttaaaaaaaaaaaaaattggtgctaaaaagggcaaagttgaagttttagtaagacctcctaccattttgcttacatattatatatgtaccattctcccaattgtatttaatacctgatgaaaaagtttgtgccttttccttcttttaacaaatttcatagtactctctactttatgagtaatgcttaattatcagactttatactgttacacagatccagaaatgagttacatagattaaacatactggctttgttttacctgtctttaggttttaacacattttattttggatctgtatgagagatcctttctttgttttaagctgtggcagttatccatgttttttgagcttttttttttgagcacaagatgaggatataaaaggccagtggaaacatttaataaaaaaaggaacttcatggtagagtaactacagatgtttttggaagactttgtgtggattagaatagtttgaaaaactaacatttgttatgaaaactgagtgcctgtcttcagtaatgtttattatgctgaacgtgcagtccacaacttgattacctgtttttctgctggtttgttacgcaaccttgcgtgactcatttaagaactattttatctagtttctttcctaatgtagaggtaatgctagcttgagagcttcaataatttataaataaattaacttcagaatgtagctaattatttgaggattattgggtgttttaataatgtattgtatcttgtatataacttatttttgcctaagaagtaatttctgtattccattcatttccatggaacacagaagtcaaaattctattccaggaaagtccacacttctttgaagtgccacttgaatttcctgaaggaatgtttg

SEQ ID NO: 57283 - DNA, 1137 bp, Homo sapiens
tccttgaaacattttaccaagacagatgactatgtagaaactgggatactagcttataaaacttggatacaggcttgtaaaacttaggtttgagggacaaattaaaaaagagacaagagattctacatattgaacaatcagaggagaggttctgcatattattgaataatcagaatatgcatattttgtaattaaaactgcttgtaaaggcttaggaatggcctttcaactaaattaatgagacacttactgtaaaattagaggtatggtaactttaatgctaacacacacacacacacacacacacacacacacatatatatatgcatcggattttccctctcatctaggttgtaagcataaggaaacctacctctactgtgactgcctccttcacctagaaaccttacagatacgaaactttcatcactagctctgaggcaaagctaaactgttatgaaactagatactctgctgtagctattatccagactataagagtggctgaaaagaggtgacattacagtgacagtagagtcatagccaatattataagggatgcgctgggccactaaaaaaggatgcctcagctctggatattaaagttactttgggaatttgagaaatctggaggaattcagtgacccaaaaaagaagaccggtaagaaaagaaatgattaaaacaaagaatacacttaataattcatttacttatcaaacgtgtgccagcaatgaggaagactatctttagggaatttgtcatttattgggaacgacagaaacacgaaaaattacaattcagattaaatggcattaattcacacacttaactattagggctaggtctggaaatcctgtgctcttgagactgggttcctaaatcagttattttatttcatttttaattaatttatttatttagagacggagtctcgctctttcgcctaggctggagtgcagtggtgcaatctcggcttactgcagcctcccccaactccaggttcaagtgatcctcctgcctcagcctcccgagtagctgggattacaggtgcctgccaccatgcccagctaatttttgtatttttagtagacatggattttgccatgttggcaaggctggtcttgaactcctgacct

SEQ ID NO: 57284 - DNA, 2047 bp, Homo sapiens
gtctggcaaatcagactgacaaagtaacctgaaaaacaagactattaattagagttttcgtctaaatggacaaaagggatgctgacaaagtgagtgtatagtgttaggtaagtcataggtgaatcagtttccttaatctatcctctcccaccctgccccccccattttaggacctaacactgagtcacagatgaagtttcatgttaatcccatgtaaggcacctgtgaggtaaaaatcagcggacctgagtcacaatgggatgacatagtttgtggtagactattgataggcggaggagtgggttttcagcttagagcacggtgataggctgcaagtttacctgctgactcgtgaaggtactgacagatttgaagacttgattttggaaactttatgttaaagttatgtcagttatttttgggtgtagcaactgaagacagtttagcccatatatgtgttagttttatctcttttaagattacaaagtttttgcagacaaggagcctataatatatttgatagtaatttaagtacttggtttaattcagtatttttcagtacctggaagaatgctttgtacatggtaggcaaaaaatatgttacattgtattgagttccacagagcctagtgcagttatacaggctaacttttttttaacaagtaaagaatttacccctattttattaaatctttaaggatctaaacatttttcactcttctgctttcttccacatcatttgtgactctctaccccatctttttgattttctgaagtaatatatttttgtaaaacaacaatggcaaatattattatattctgttgaattcattgtattctgtctcaagaggagttctgactggtatatttcctaagttttggtaaacctaaccacctgtttctaaagaaacgaatttcttgaatttttgcttatgtattgttacaaaaatgcataatctgtgccatgatctcccaggtcatatattctgaattttaactcttgttatgtctgttttttagaggatgaagcatcttcccaaactgatttaagccaaacgatctcaaagaaaactgtcaggagcatacaagaggctccaggtaagaatagttaactttttgtttttctccttacctaccaactttttaaatgttcattgaattaaacaatgtaagtatgtgtaaagaaaagacaagggcagacacgtgagtactcaagagtaccagccacccatataaccttgtaagataggtattataccaatttcatagaagagaaaactgaaacacagagaagctaagacaattctgtaagatcacatatgtgactgagccaaaattcaaacccaggtttgtcttctccagagcccttttactttccccccaagtgcctcactatcattctctcatgtcataactagctactcagtaaaatttgttcaatgtcaaatgaatgaatatgttatactgccctgtgtttaaaatggattaacttttcttcatggtaaaatcttgacacagtgtgatcagtcttttcagtttaatactgtggtttatcaaatcttaagatgctatcgactataagaaacaccatcattgttttatgtaccacctagcaagggaaaatgctgccaattttttggtaatttgtagtaatatgccataattatatgatgcatcccaatttcaaagatgttaaagtgtttaaaaaaattgtcagaatcaatgtaacatggaagtaggctacatttaatagttcacttaagttttaaaagctgattaaaatattttaaaaagctggagaagggatcaagtccagttattaatgctttgggttttagttccatttaattttcaatttgctttttttgatattaggaaagtctcacaataataaacaatcatagctgttaaaactgataatccttggtttttagtacccagatcctgacttatttacctgtttctaataagattatgctttataatgtgagctattgtattctaaacttagaataagtatgtctggttcaagttgagtttcaaataa

SEQ ID NO: 57285 - DNA, 1047 bp, Homo sapiens
aaaaaaacaaaaacaaaaaacaaaatctaatgctttaactttcgacatgtagcagccaagtttaaaatagaggtaggtgaaaaacaaaagagggaaatgaaattaaagcttatgtagtcatggctactgattcatcatcagatcgcacttaaatatttatttccattctttgcagcttgggtaaaaaggtggaatgtttaaaaccttgcaggtatctaattattaagcactaatttcagactttttaagttgctaagtaacgttaatcatagtatgagaaatattagcaaaaatctggacttaacatctttattctataatcataaaatctattttattcatggaacaaactttttttatttttattttttttgagacagggtctcactctgtcacccaggctggagtgcaggagcgtgatctcggctcactgcaacctccgcctcaaagtgctgggattacaaggcatgagccaccatgcccagccaaacatttttaaacaccttctttatgtcagtgaccgacctaagtgctaggatcataaatagccattcaggttttttttttttcctacctcttagatgtacgtgatgtaatggaagagaaaaacaagtttacaaatcttttttttttttaagtgctgaaatagtgacatatgtctgcgggatcctagacgagaagcaccctactcagtggaagaggttgaggcggttttatgagttggaaatgacatttggattgaattttgagggatgaatagcaggcagaatgaggacggagacttgcaaatactacagtttgctttataatagacattttacctttagagagcatgcaatatgagaaattaaagtcttttatattacagacaatactctcacactagccataattctttatctgagacgttaaataatgtttagaatgacattcgaaatcatagcaggcttgggtttcttgagctttgtttaccagaatgaaaaccttgttttaaaatgtatctgtagccaagacagtagataacctgattcaataatgattgattgt

SEQ ID NO: 57286 - DNA, 1049 bp, Homo sapiens
tttattcacagataatttggggaaagatttaaaaggctttatgttttggaagttgtcagtattttcctctgccttttaaatgcagctcaacatgctaagtaatatttagctaatgtcacaagatatgaattggaatttgcctggattttaaatattcagatagaaagttgcacataggcatagattttaatgttttaatgcagtagcaaatccttcatatgggaaaaaacaggttgtcagaaatagtgatcaatatccatgtactccacctgattgttttgttttgatggtgatccttgttttgaatttggggaagtcgttattgttgccatgttaacgatacctcctgccctgtatttgaagagttttaaaagaaagactatctttggcagagctagtaacaatctgaaaagttctgtagaaacaatgataaaatactaaaagttgccctccattctgaaaatttcttcgtttaatatattgtttttaaacaaggaaatgcactgctaatgacatggaattgtgactttgagggattgttagacccatgctggaagttgcttcaaagccatgggcgtataataattagtttcggtgtgctaaattgacaaattttatttaatgtaatgaaataaatctgaatcatttgaactgtcagtgcattaaatttaagatactgtaatctgaaaataaacttcaagctagaatacattgtatatgtggataaatacatgtgtatctctgtatctcttcatcctcagtagcaaaattttgtgtatgtagagatggcaagttgtatatgtaaaaaatttcatacgtatgtgaacatatttctttgattttctgagataaattggtgtgtgtgtcatgtaagagcgttaatacttaaacagccaaccttctgtggggcaatcaatttatgaattataaagtttttggattttttccttctgcttctgattgtcagtcttttgcccattttataacacttctaccatatatgagcagaagaaaggagatgaagtactgctataatcaattttatttgt

SEQ ID NO: 57287 - DNA, 1016 bp, Homo sapiens
gctcactggaacctctgcttcctgggttcaagcgattcttgtgtctcagcctccttagtagctgggattataggcaccctccacacacctggctaattttttgtatttttagtacagacagggttttgccatgttggccaggctggtttgtgccttagttcttgaggtttaggaatcattatttggtacttaactttcaaagcattttacatttatttcagatgtgtgggtaaatcaagatataaacaaatggttaactgacttggggaggttagggtttaaaaatatcattatattgtaaatcttttgaccttgacagatgaacataagattaataataaaacctgtatggttgagtagatacacttcttacaattaaaatttaagttttaatttcagtgccatgtatttttttaggtagtagtcatcttataagtacatcttcttggcgagatggacaaaaattagtaaagaagattctgggacctgctcccagaatggagccaaaagagcaaagaacagcatcaagtgacagaggtggaagagaaagaactgctaaatctggtaagtagctataattaaaatagttgagaaaacaattaaaaattgctattaagtacttagagaaggaaaaagtactcttaagaatgtgttaggactttgctttataattttgaatgtagctcaaaaaagaaaaaaatgttctattgggcttggttatggataatatctgcatataggtgttatgttcatctttatgaaaaattgtttatgttgtgttaattacatttagctgtcattgtgaatatgaaagcattattgtaatgaaatcatattagacttttagggaccttagagagaatcaggtccaacctggttcatcccaacatattcaagcaaacacggacaaacattcacaaggttggattttttttatttgacagattaggaaacaggctctgaaagagaagtgatttttcccaagggttatgtagtcagtgggtgtcagatttggt

SEQ ID NO: 57288 - DNA, 1315 bp, Homo sapiens
attcataacaaccataagagctatcttttttgtccagaaatatttcaaactgtatttaaaaacaaaccaaggaaatatagtttttcagaagattgagattcttcttttactgctaaaaagggaggcttttctttccttttataattttcttcagaagactgtaagatatttgaatttgagtttaagtaagataaaatgaaattctctaattttcttgttaatgcagttaaatcttaggaatgagtatagaatttcggtatatcactaacagttcatactttgcagggggtcacattggaagagcagaatctgatcccaggttggacgttttacatagacatcttcaaagaaactcagaacgttcgagaagtaaatctcggtctgaaaataatataaagaaactagcttcatctcttccagataataagcaggaggaaaatactgccttaaataaggactttttacctattgaaattcgtggcattcttgatgacctacagctggattctacagctcacactgcaaagcaagatactgtagagttacagaaccagaagtcatcagcaccagtacatgctcctaggagtcacagcccagtaaaaagaaaacctgacaaaataacagctaatgaagatccccctgttatttccaaaaggcgccactatgacacagatgaggtacgacagtacattgttaggcagcaggaggaaaggaagagaaagcaaaatgaagagaagaaggctcaaaaggaggctacagaacagaaaaacaaacgattacaagagctctaccggaagcagaaggaagcctttactaaagtaaaaaatgtccctccttctgagccatcagcaactaggcgactacaggaaacttactccaaattgctactagaaaagaccttgcttgaagagccatctcatcaacatgttacgcaggaaacacaggtaatagtagtgacatatacaaaggagagtcattcatggttaggaaatgcttatttgctatactatttaaaaattacccatcattcctagtatgctcagataatacttataataatcatggccttcatgaaatatattaaatatgaggagtaatgtgataaatgtgatggaaaataaaagctgaattaagaatttcctacagtgattgttactgatttattttcctctcatcattgctattagttacatccctgcatagttttcattgtagtactgaacaagtacagttgacctttgaacgatgtgggggttggggtgccaacccctttgcagttgaaaatccacatataacttttgattctccaaaaact

SEQ ID NO: 57289 - DNA, 1865 bp, Homo sapiens
ggcatcttagttgaaaaaagcagcttgcaaaacagtatatatggtaaaatcccatttttgtacaaacaataccaccaaaacataatgtacaaatagaaaaatgtttggaaggatataattctaaatgaaatattaacagtgcctcttttttattgttttgctgagtgatctttatcttttttatattttttatctgtcctttttttgttgcagtgcatcctcattactcttataatcagataaaaaaaaaacttttttaaaatggtggtttagttaactaacatattgtgactttcatttccagaaaagacttgatggaatctacatggatgcagcctgaaagattgagcccacaagttcaccattctcaaccacagccttttgctggaacagctggaagtttactctcccatctcttgagtttagagcatgtaggaattttgcataaggattttgaatctattttaccaaccaggaagaatcataatatggcttcaaggccattaacttttacacctcaaccatatgtgacctcaccagctgcttatacagatgccttgttaaaacctagtgccagccaatataagagtaaactggatcgtattgaagccttgaaagcaacagctgcttctttgtccagcagaattgaaagtgaagccaagaaattagctggggccagcattaactatgggtcagcatggaacactgagtatgatgtgcagcaggcacctcaagaagatggaccttggaccaaggctgtaactccacctgtgaaagatgataatgaagatgttttctctgccagaattcagaagatgctgggaagctgtgtatctcatgcaacttttgatgatgatcttcctggtgtaggcaatcttagtgaatttaaaaagcttcctgagatgataagaccacagagtgccatatcaagctttagagtgagatcccctggtcccaaaccagaagggctactggcacagttatgtaaaaggcagactgactcttctagctctgatatgcaagcctgttctcaagacaaagccaaaatatctcttggttccagcatagattcagtcagtgaagggcctcttcttagtgaggggagtctctctgaagaagagggagaccaggatggacagccccttttgaaagtagcagaaattttaaaagaaaaggaattttgtcctggagaaagaaatagttatgaacccatcaaagagtttcagaaagaagctgaaaaattcttgccactttttgggcacataggtggtacacaaagcaaaggaccatgggaagaattggcaaagggaagtccacatagcgtcattaatatttttacaaaatcctatcagttatatggaaaaggtgagaaaaataaatatagcttgtactgtttgtatattaagatgaattattttataatttctgtatgagatatgtactttagtacacatttttcgttgagtggataatggagacttattactgtccgtattagtcatcttctaaatttcctgcaagccttaagtaagagtattagtaatttaatctttaaaatttcattttaaaattgttattatcataaaataatagttgagactggtagctttagaaatttttatctagttcagagaaattcatagatgatgttcaggattggatatatatcacgtatatactacattttctgtgaccatagttatgtacttcagtagaaactaagtataaaccaggcgcggtggctcatgcctataatcccaggactttcagagtccaaggcgggcggatcacttgaggttaggagttcaagaccagcctggccaacatggtgaaaccccaccattactaaaaatacaaaaaatatt

SEQ ID NO: 57290 - DNA, 1140 bp, Homo sapiens
ttgatttgaaagttattttgatttcttttgatgaaagtaaaatgcttaaatcaacatcatttttaataagaaaattgtttcttcttaaattctgttaaattttcattaagattttatagttaaactgaaatatttagagatgaaatgagaatgaaatgttgtctggaatttgctttaaaatagtctggggggtgggagatgaaggtagtaggaggtttatttgaaactagattggtgatgtattggtcattgttgaagcaggatgatgaatactttggtttcattatactagtctccctgttttctgtatgttttaaaattttcctaattaaaagctttaaaaaagtatcattggatataaaggtaaatagaaaagaggcactattaaaggaaactaaaatgtccctaagcccatattgctaatctccatgtatgggatgcttttcttacagtttcttgattttcgtttttaaccatgtttcaattattacttttgtcagggtttgaagacaagttggacagaggaacatcaacatcacggcctttgaatgccaccgcaactcctctaagtggtgtttcatatgaagatgattttgtctcctctccagggactgggacttcgacagaaaaaaaatcaactcttgaacctcagtaagatatattggcaatatggaataaactctgaagagtgagaaaaatgtacaaatgagaactctggtctgaatattagccaagttttgctcatttaaaaatacatatagaggctgcacatcatagtggagatccagagcatgggctctggatccagactgcctttgtttaaatccaggctctcctggttattggttgtttgtatttatacatattacttagccttcctatgcttctgcttccttctctgtaaaatggggacattaatagtacctgcctgcctcatagagttgttatgagtattaaatgaaatatagggaggctgaggcacgaaaatcgcttgaacctgggaggtggaagttgcagtgagccgagattgcaccactgcactccagcctgggtgacaaagctgaccctatctcaaaaaaagaaagaaaaaaaaatcacttacttagaacagggcctggcacatagtaagcagagtatagg

SEQ ID NO: 57291 - DNA, 1594 bp, Homo sapiens
tgctccagagaaatcttttgtgaaagcaagagtcaatcgatgcagtaaacttcattattgtcttattttaagaagttgccacagtcactccaacctttagcaaccaccatgatcagtcagtagctatcaacattgaggtacgaccttccaccagcaaaaagattaggacttgctgaaggctaagatgatcattagcatttttttagcaatacagtatttttaaattaaagtatgtactttttttagacataatgctattgcacacttactagactacagtatagtgcaaatataactcttatatgcactggtaaaccaaaaaatttgtgtgacttgctttattctgttatttactttattcctttggtctggaactgaacctgcagtatctccaaggtattctgtactgagtcccagttttttctacaaaggaaagcaaagttgattttggctcttaaaatgacagattttagaaatctgagtgtaatttcatgttaacttttccatttgaccattgtcatgccttccaggttctaagcgcttttctcctgctggcctccatcatcgtatggcagcagaactcagttatctgaacgccattgaggagtcggtgcgccaactgtcagatgtagaaagagttagaggcatttcacttgctcagcaggagagtgtgtctctagctcagataataaaggtatttttggagttttttagctttctgtggtttttcttttttcttcgctatttaaaatggtcttaatgatgacttaaactactgtgtcaaatagaaaaaaatagtctgccatatagcacctataaataaatagtcctgggaaaaatctgtcgggacactaaaaagatacagtgtttggcagcagaacaataataaaatcattctctctcaaatactttgttttccatgttttctgctttgtttagttgacagtataaaaatcatctagtcaaacattcttaatattttctcctttcattgataggtgagagaatactgagggtttttttttttttttttaagttctatttgtaccaaaaagagaagtttctgagatccgggtgtttgataaagccaggataatgtggacttttccttagcaaacaaaaatccagagatggtctaagcgctcttcccttagtggagatgctttaaacaacaacagcaacaaaaaaacccctgagttattattcacatagtataaaatacacagattttaagtgtacaattttgatgagtttatttatttatttatttttttgagttagagtctcaccgttgcccaggctggagtgcagtggcacgatctcggctcactgcaagctccgcttcccaggttcacgccattctcctggctcagcctcccaagtagctgggactacaggtgcccgccacagtgcccggctaattttttgtatttttactagagacagggtttcaccatgttagccaggatggtctcaatctcctgacctcgtgaaccacctgcctcggcctcccaaagtgctgggattacaggtgtgagccaccgcgcctggcccagttttggtgagttttgaccagtgtatatacctatgtaag

SEQ ID NO: 57292 - DNA, 1050 bp, Homo sapiens
atagcatatttaagaaaagaaataaagaccattgtggctggaggcagagagcaaagaaaatggtatgagatgatgcagggatcagatcaaggtataggaccttgcagacttaggattttggagtttattctaggagcaatgaagtcattaaagagattatttttggcgggactgggtgacattaccatatttgtgtgtgtgtgtgtgtgtgtgtgtgtgtgtgttttcttaatcatattttgactgtctctaattcatagattttaagtctctgtttacattcattgatactaggagtgatttgtgtttacttccttagtaaaacagaagatattctttaatgtgttgtaagttattttataatatctatttgttcaagattttatctcatattactattaagcaatacttaaaatctttctgttattagagactttgaatgtttaatcagtttttattttatttgtaggaaaagtccatctgtttcactctctcagagtaaagaagggacccttgactcaaagcatcagaagtattctgcttcatatgatagttattctgagtcttcaggatacaagaatcatgatagaaggtgaagacaatttgatttctttgtcagtacagtttagtagattgtgataaatggcttaaacattgctttctttgatttcttaatcttgtttatttaaatagaacagtgtgtgcccttcaaagtgctggcttccctaattagccaatttacaaaatagttggtccatgtaataatgtaactactgttccttgagaacctacattgtacaagcattgtataaattgttcttcctgcatttaatattcacagcagccttccaaggcagatggtattatccttataggttagaaaactgaggctcatggagatgttactatgcagccataaaaaatgatgagttcctgtcctttgtagggacatggatgaaactggaaaccatcattctcagcaaactatcacaaggacaaaaaaccaaacaccgcatgttctcactcataggtgggaattgaacaatgaga

SEQ ID NO: 57293 - DNA, 1311 bp, Homo sapiens
tcctcaaaaaaaaaaaaaaaaaaaaagaaaagaaaaggaccaaaacagaaccatcaattttaaggaaagacagaaaaatttaaagcaaatgaaagaaacaaggaaagcttgttagagagatgggaaaagcaggtgagagtaaaatcataggatataagaagggagggctcttttatttaacatttaattttgacatgatttcaagcttatagaaaagttgcaagaataatagaaagtcctcaaatatctttcatccagattattctaacattttactacattttatttagcaagtagagcttttaaagaaggagatatggtcaacatctaatattgcaaagcaataaattatgtattggatttggcaattcaaagtatagattaagcttatttagaacagttttagtagagcagttggggtggaagcagattgtgataaatcgtgatgttaatgaaaagtaaagaagtggaaacagtgagtagtagctccctttcccagaagtttgattttgaaatgaaaggaaaaaagggagtgataacctaacaacactgcctattattattatttaaaagtgaaaccttcctctctcctactcatctttctcatcttttccaatatattctcagacttatgttacttagctttttctgttttatattacatctttcttcatttttatcttgactataaagtacagtcatttggccaaataagtttactttgaagctataatccttattttgttaattttgttgttgttgtttccatgtatccataaaaagaagtagcagtggtagcagccgccaagaaagtccttcagttccatcttgtaaggaaaatgagaagaaacttaatggtgaaaagatagagagttccattgatgaacaggttcagactgctgcagatgattctctacgaagtgatagtgttccatctcttcctgatgaaaaaggtaactttctttgcaaataaatgtgtaatcatttgttcagaaaccagaggaaaggtgatccttgttataaagtggcaaataagctggatgtggtggctcatgccagtaattccagcactttgggaggctgagctgggagaattgcttgagcctaggagtttgaaaccagccagggaaacatagggagacctctgtcgctacaaaaaaattaaaaattagccaggcttggtggcacagcctatggtcctagtacgtgggaggctaagatgggaggatcactttagcctaggatatcaagtctacagtgagctatgattgagacatagcactgcagctttggcgacagagcaagaacctg

SEQ ID NO: 57294 - DNA, 1164 bp, Homo sapiens
taatcccagcactttgagaagctgaggcaggaggatcatctgagcccaggaattcaagaccagcctgggcaacgtagtgagaccccgtctttaaaaaaaaaaaattagctgggcatggtgccatgtgggaggctgaggtgggaggatcctttgagcctaggagatcaaggctgcagtgagctatgattgtgccactgcactccagccagggtgacagagctagaccctgtccccccccaaaaaaaaagtatctgcacatgtacccataacaaagttttcccttcttttattgaaagaaaggcatttctttcaataaaatttctataaaattttaattttatagaaattaaagaaattttcaataaaatttctttctactaatttggggaagcaactaatggtatatcctgacgtttcatcctgtgactctctggcatctctcaggcttattcaaatagatgaaattttaacctggtgagtaggtatgagttccttagctgaaagcagaaaggctgaaattttccaggaatgttgatttgaaagtcttaacattcttctaaaatagttctaagaattattttgtaaagactcttaaagaaagctactccaacttagatatagctcagttgtacatcattgttgaccatataaaatgaaatttatgtgagactttactctttggggtgtatatttaattaaatacggttaaaaattagctgcttgtggactctattcttgcctctgtaacctccaccccatatctagcttcctcgaaacccattaaatatggaagagactcattagaaatttttgctgactaccattttaaattcgcaatttgaactactgcagattgaatttaagttttaacttgataacctttggcagtataccacacatcaccaaatttaataatgctctatgtttatatgttaaatcaatctgtgatttagtttgttttgcaacagtcaagagttgtaagttaaatccttactttctgtaggtgcagttctatattggcacttcattgcaagaacggcatttcataacttaaaaatacctaaattgattatgaaaataagtcttgaaaatacagtttttaaaaattaaaaatataagaggtgaaaccaaatattgacaaatatatgaatgaatgttcctttt

SEQ ID NO: 57295 - DNA, 1050 bp, Homo sapiens
ctccttatataaggatgtatttatatttaataaggaacatgtttatggaaagaagttctaactttaagttaaacttttcttactctgttttttaaactattttcattttctattagttatttcgttcctcattcctaaactagagctttggaatatgcttaatctttaatagaggaaaattattggtctctgtgttgggctagagaaaaaatttaaattgtctatttttaaagtttatttcacgtgttccaatattattttactttttgtactaggtcatgcatgcatttagcagttatacacttaagagggtgggtgatatttgaatgttatgaatagattttttgagccttttgccaagtgcctttgttttgcataatattttgataattggcatcaaaataagtttattgtacgttcataaagaatggcaaggaagattgtaatgtcttaacttgaaatttagcaaaactgtttttcttgaatttcagtgcagaaaatcaaggcaatccagatatgaatatgtgtgtttttgcgtgtgtgtatgtgtgtgtaagtgaaggggaaatgaaatactaagttatatgtgaggaaacagacattaaaatagtctgttgtctaaaaatacacataggcaagattatacataattttacaaatccaagtgaatggctggatttatacctagattttctcacttctatgacatactgatattactccttgcccttccaaggcaataaatgttgccttgatctacaagttattgtcatgtgcatgtgaacaggagcatgctctgtcaaagagaattaacctttccaaaggtactactagactttttaatccatacacacacgcacggatctatttattattacaaaagaagaaaatatgttttttcctgcttttataactgtaaaatggaatgttcttcttacctttaaccttatgattgagctgtccatatcaggtttttttttctactgactatttattgggactagctcactttattaattatgcatcctgatatcttatagaatggatagt

SEQ ID NO: 57296 - DNA, 1061 bp, Homo sapiens
gcaatttgaagtggtaaaactctagtttgattttaatatgacttaaaaactattaaattatgtattaataactaaggcaaaagacagttaaatatgattatcttgttaccagaagtaatttcttgcagaatatccaaatttcatcaatctaaaaatttctcaacttccagctgcatgtcttaccaagacagcgtatctcaagatttatttataatttcaagtagtacaattagaaagtgaaaataaataggaggaaccaagccaaaaataaagtgtatgtggcgggcggcggggagggtgggaattatagggatacattttagtaataaatcttcttccgaagctcatattttaattattagattggctttatttaaatggaatattacattacagctttttattagtagttactgagttaacattattcttaagtcaaaattataaataaaagattttgtatctctttcagaaactacatctgaccagagtgatattgaaggtaggatcagagctctgaaggatgagttgcggaaaagaaaatcagttgtgaaccagctgaagaaggaacagaaaaaaaggcaaaaggaaagactgaaagcccaagaagccagtctgatcaagcagttagaggttagacataggaagaagggggtttagtatcaaggctaatgtgtatgtgacgtctaaaatgtttttaatgttgttaataaagtaatggattaggattcttcattattagtgtggtgccacattttattctcttaaaaaaaatctgagggtatccaaggacattcttgcttaaaacattaaattttattttatttatttatttttgagatggaatctcgctctgtcgcctaggctggagtgcagtggcgcgatctctgctcactgcaagatccgccccctgggttcacgccattctcctgcctcagccccctgagtagctgggactacaggcgtccgccactacgcccggctaattttttgtatatttagtagagacagtgtttcactgtgttagcgaggatggtctcgatctcctgacctcgtgatcc

SEQ ID NO: 57297 - DNA, 1655 bp, Homo sapiens
gacagtcgaacagaagattttcagaccccatctccagttctcagatcatcaaggaaaatcagagaagaatctggagattctctagaaaatgtacctgcattacatcttctcaaagaattaaatgccactagtagaattcttgatatgtcagatggcaaggttggagaatctagtaaaaaatcagaaataaaagaaatagagtatacaaaattgaagaagagtaagattgaagatgccttttctaaagaaggtaaatctgatgtcttactgaaattagtcctagaacagggagattcatctgaaattctttcaaagaaagatcttcctttagattctgaaaatgttcagaaagacctagttggattagctattgaaaatctccataaaagtgaggaaatgttgaaagagagacagtcagatcaagatatgaatcatagtccaaacatccaatcaggaaaagacattcacgaacaaaagaacacaaaggaaaaagatttgtcttggtcagaacatctttttgctcctaaagagataccatactctgaagattttgaagtgtcttctttcaagaaagaaatttcagctgaattgtacaaagatgattttgaggtgtcatctttgctgtcactcaggaaagactctcagtcttgcagagataagccacagccaatgaggagctctacaagtggagccactagctttggtagtaatgaggaaatcagtgagtgcctaagtgagaaaagcctttctatccatagcaatgttcattctgacaggctgttggaactcaagtcccctactgagctgatgaaaagtaaggagcgcagtgatgtggagcatgaacagcaagttactgaatccccttccttggcttcagttcctactgcagacgagttatttgatttccacattggtgatagggtgttgattggaaatgttcagccaggaattcttcgattcaaaggtgagactagttttgctaaaggattttgggccggagtggagttagataaacctgaaggaaataacaatggaacatatgatggtattgcatattttgagtgcaaagaaaagcatggtatttttgctcctcctcaaaaaatatctcacattccagaaaactttgatgactatgtagacattaatgaagatgaagactgttactcagatgaacgatatcagtgctataatcaagagcaaaatgatacagagggtccaaaagacagagaaaaggatgtcagtgaatatttttatgagaaatccctacctagtgtgaatgatatagaagcctcagttaatagaagtagaagccttaaaatagaaacagacaatgtacaggacatttctggggtacttgaagcccatgttcaccagcagtcttcagtggattcacagatttcttcaaaggaaaacaaagacctcatttctgatgccacagaaaaggtttccatcgctgcagaagatgacactttagacaataccttttccgaagaattggagaagcaacagcagtttacagaagaggaagacaacctatatgctgaagcttcagaaaagctttgtacaccacttctggatcttttaacaagagaaaaaaaccaactggaagcccagctgaagtcatcactaaatgaggaaaaaaagtcaaaacaaca

SEQ ID NO: 57298 - DNA, 1011 bp, Homo sapiens
atgactttgagtaacttgagccagatggtcaccagaggtgagaaattttatatcccatttccatatcccatagacagttctttagaaacagaataatgataatacaaaaagcggggagagccctaatcaataaacattttataaaaattcagttatatgcaaggtttatataagtagaattgagggaacaggataactttttcttagattgtttattagtagccaccatattgttttttattctgcttacttatagagaaatattagatatataaataatgcatttactctgtctttttttaaaaaaaaatgatatgaggtccctaaatggtgctctgtttgaatggttccatttctataggagagcccagtatttggtgccagtgggcaggaagaacttgctaagagacttgctgaacttgaactcagccgggagttcctgagcgcgttaggagatgatcaagactggtttgatgaagactttggtttgagctcttctcacaagatccaaaaaaataaggcagaagaaaccattgtacctctaatggcagaacctaaaagagtaacccaacaaccatgtgaaacattattggcagtcccccatactgcagaagaagtagagattcttgtacataatgcagcagaagaactttggaaatggaaagaattaggccacgatcttcatagcatcagtattcctacaaaactgcttggctgtgccagtaaaggtctagatatagaaagcactagtaaaagggtctacaaacaggtaggtgaaataaaaggataattttagtttttaaacttttctcccattgtctgaaatttggattcttagccattttgttttgttttgttttgtttttctctatcaaggcggtttttgatttaacaaaagagatttttgaggaaatatttgctgaggatcccaacttaaatcaacctgtctggatgaagccatgtagaatcaactctagttatttccgacgagtgaaaaatccaaataacctt

SEQ ID NO: 57299 - DNA, 1115 bp, Homo sapiens
gctttgtcacctaggctggagtgcagtggtgcaatctcagctcactgcagtctggacctcctgggctcaatcagttctcccacctcaccctcctgagtagccagaactacagtcatgtaccaccatgcccagctaattttatatattttttgtagagatgaggtctctcactatgttgctcaggctggtctcaaactcctgggctcaagtgattctcctgccttggcttcagagagtgctgggattacagacgtgagtcaccgtgcccagctaggttttacttttatatgttgcgtaagtgaataaagtctcagcatttggaatgcttttcccttcaaattgctatgtggaactgtaagtggaagaaatttgtatgataattttattgtaaatattatattcttatcgtgaatctgtttactgcattgtaaacacatgaaactcaggaatttctgttgtttgtgtttcgtgtatttgtcttgtttccacagagcttcatagcaagtgaagtactcaagttgttcagtcttaaaaaggagccaaaccacaaaacagattggcagaaaatgatgaaatttggaagaaagaaaagagaccgagtggatcatatcctggtcagtgtatacaaccaaactgtttttattttgaccatatcttttaaactcagaatgcagttagattctaaaaggaaaagggatagacttattcttaaatctatggtattaaaatcttaaagcctttacttgctgcatttctacccctcagttttgttaactattttcttttgtactcagtagatgaacatttaacttgatcaatagtattttatgtagaacttgagaaatttactcaaatggaagcaaagtttaaggtagtgaattgaaaagagaccagtgtggactctggagcctgactgcccatgtttaaatctcttgatgtgtaatcttggacaaatttgtctaacatttttgtgcaaagtgaaggtaacaataatagtacttacctgataaaattattaagaaaattaaataagtatatgtgtaaagcacttagaatagttcctcatatacaactcagtaaataatagctgttacctcatcatcatcactattatc

SEQ ID NO: 57300 - DNA, 4773 bp, Homo sapiens
ctctgagcatgtttcagatggactaggctaagctatatgttcagtaagttaggtgtattcactgcatttttgacttaatgatattttcaatttactgcgaatttattggacataactccattgtaagtagaggaacatttctgtctaatattttgtgttttcctcccattaaattccttattctcttatgttatggaattccttatggaatacatattcccttacgttgacattgacaacatactggtaatctttaatatatatgaaatacttgaatattgtcaaatgttatttttgaagtcattttgatatttggcaattgaggttttttcaactttttgcaattttaaaaggggtattgatatcatatgaattatcttttttctctggtttatttccttgggctgtattcctatggataggactacaaagtcagcaattatattttctagcttttgtatgacaggaattttctaaccttattgtcttctaaatcctaggttcaggagctccatgaggaggaggcacagtgggtgaactatgatgaggatgagttgtgtgtgaaaatgcagctagccgacgggatctttgagaccctgatcaaagatactattgatgttctgaatcagatcagtgaaaagcaggggagaatgctacttgtgtgacatcttgcaaataaatcgaacgctgagtgctaatgtgagtcctgggcctttctgcctcctgatgtacacccatcgccatcatagcaagagtgcttctggaccttgtacttattcttaaagactaccagtatggagttcataggacaatgtggtacacctggtattacagcctttgcctttcgagactatccactggattaatgggttattttcagtgggcagggttgcacagtgtaatcctacaccttttgctaacacccctactaggtcccagagggccagaaacacctgacttacctctgagtttagactagggtatcacttctttgagtctgaagtcaagtgagagaggtatagataaatgcatcacatcacttttgaaatgtaattctggtctataccatggaagtcataaatggacattatagtctctaaacagtattaaacccttaaccacttctaaaataggcaagctcaataatgtctgccaacttcacattctggagtttatttcatttctttttgaagaccattttcttccattattgtagttgagcagcaccaagtggactgtcaggctaacaggaataagtggtagccttgctttctgagcaccatctaaagaattttaaacctctgcattatgtttagtgttctctgtgtgggcatgaaaacaaagaaatgcccctactgaagactgggctcaaaggaccaatgcagggctggttcttttaccccttggtttactcctgcacttgtcttactcattctgaatctctaccagctgctcccagaatcacagatactcaggaccatctcaggcatccaggcatggcaaagtggaaataattcattttggcctgcaaaccttcaactcccatctttccccaagaagtcagagatgctgttacttgaatgatttaggaaatgagtgtgtgcaccaaagacaaaaagatattgtctattgtttgtgtgcttgttttgcgctatggaacattttttaatttattttaagataaattattaagttgaaaatgtgtgtccctattcagaagtgaaagattcatcttgtaatagttaaacctccatcttgaagcttctatggttcatagtctttgcacaggaacctgtggttttaacaaaccaatacacatattgaagaagtcattttaattcagtgaaacgaagatgggcttttccagatcacctgcaatagcagcagtgggataaaatgatttaaaaacactgtacaatttaactctgcctctcttgcagcattgcttctcacaactattacctgcatctgaaaaaaaatctatagactccagctgctacattagagcataagagatgctctcctgggacctcagtaccctgccttcttgactggtttccgttcatcagtcctgtccctcttcaagtaatctagaagaatgtggatactcttaggcgtgaatgtaaatgccttaatattgaaggtcctggttagaagcatgatacaagacatctactggattcatatttacaaatatcctggaatgttatagcttcaaagtatattagaaaaaccccaaagatggtataatctttaagtgtgcacgttcgtttatttctgcatcttccctccaaacttgcctttgcatcttaaatatttcactatgcacactcccattcctcttgggtttcatcttgtcgtttaagaaatgtactgaaataatcattggaatatttgcattttgcacaatgactggtatgatagctcttgacaaataaggaaagcactgaaatgttgtgattgggtctcgggaaatgctcagattgatgtcttaccagcatttcttctgggcttgtgatgttgagctgtagtcttgtagccataatgagcaaattgactaagagaagcaaaggtttcttggggttattaaccagtagtgtggaaatactagttttatgtggccaaggaaaagcaaaggcttttcttttcagtttgtgttatttggaagacagaaaaacatcttgtctacatcctttggctgtttgtaggatcacgttgtccttacgatactgaaactttacagctgctgtaaattttttataaatgaatttcaaaatgttataatgggactgtaggttgtttttctacatcttcattatttggacctaaaaccagtttttaataagaaagtttatctttactctttctgaaattatgactccagaaaaagaaaaaaaaaatacaagtcatggaatcagcaatctggtaagaaatgctgccaagaatgtggcagtagctgtcctgacagactccaactgtctttactatctgaagaatcctaggctccacatgagaggcagaaatggatcagtcttattcttttctagaaatggttatctgtagtttggtagcaaaaaaaaagaaaaaagaatccataattagcagatttcttattaactatttggatctaattgaaatggctttattcttaggattaagaaagatagatgtggatacccagccactcgttccatattggtatctttttaaatcagctctgcctcttaatcaagaacctaaatattccctctttctaatctttgttccttctccctacaccctcatcctctttcactcttccttcataattcctctaagaaaaatatctttgcatcagcagtaatatcttttagaatagcactatcagaatttagcagtaaaccaacatacaggcttcagatttacttctgagtccaaaacaatttgtgctatccagggtagttaactctgggttaaacaagtacagggtatagattccctcttcaggtctacacaggaatttttaccatagggaaaagtggggagagctcaaacgtagttaataaggaaggtaatttgtttttcttttacctaaaagaaaagaaaattccttctgtgactacaggtctctgagaaattatctttcaaaagagatttcattgctcataagagtgttgtggcctattgataaaaacaattttgttcagtttcttgtcttgaaaaaaaagtggccttagctttttgcaatacttgaataaagtgtgtactcgcaaaagaatttctgtagcacagcattagagactcataacttttctgcaagaaatacaaacttacatcttccttttactaccttaagaatactagtgaataaaacattaattcaaagagcaaattatagaaactacaatgacatttaatgcaaattgtaggaatttacatgtttacaaatcatcttcaactggttgtgcagcaattcaataaaatatctttgtattataaaaatgtgaagaaaaaatgtaaactgatgtaaaggaggtactgtcattttaattaacctatgtttaatagcttttccttctggactttgcaaagccttcttggcaaacacattgcaaagcattctctgggaggttcagcctccttgtgtgtactgtactgtgcagacatgaaaaaataaacccgtttactgtgtgcgtgtaaatagcctggtcatcaggccattttcagccaatagtcacatccagtgcaattttgcaccgaacacttaagggtgtggtttgtaagtacgatctgtaaaataactgggatgaattcccatgtatacctgtgtaaatagatttgttaactgaaatatactttaagaaagataaaatctgtaaataaactgatttataaattaatttcatgtcaggtctccattttttccctcctgagccaacttcagaaaattagtccccataaaatacatctgattgcttatttagtcatagggtgctgatgcttggacagtacaatcaggtaagctgtggataagagctatttacctgcacataaatgccatcagcacatacatttgagcagcctgggctttgctcccacactcattgattcagcagatagccactgagcaactttgtgttctgagtactgtgctgagtgctggaaacatagcaaaaaagacagacatggtccctgatctcaagaaacttaatgtctaatgaaagccaccaaaagatattttgaaaacctgtgtgacaagttctaacaagtgctgcacaggaagcatacataaga

SEQ ID NO: 57301 - DNA, 1117 bp, Homo sapiens
ccctggccccgattagtaatggagaaacagataccattatgaggcagtatgacttatgctaatcatccaaaacacaggttcccttttgtgagacgctagaaatgcagaccaactggaatatctcagaggtccttttccaaggaaggtgtgacctttgtcataagagctttgggatcaggtgctttgaggttggcaggggtgaggcattgcattaggggagatgggcgggcagagggggtaccagcccctcttatttacccctgggttttttgtcctttcagcctggaggccggccctgtatctcgccgccctggactgtgctgaggagaccaacagtgcagtctgcagagacttcaacatccctggcttcccgactgtgagggtgtgtgactgacaggaggggaaggcaggctgggcctgctttgtttccctttataagggaaagggaccatgtgggatgtgtcgggatgggcagatttcagctgctctgatttgagctgggaggtgatcatcacttgggctggtgagagctcccacctcccaaggtcctcttcaattgctctccctcttgacctccaagccttaagaggtctgatctaactctataaaaccaggattcaggctctgacccacctgtgggcagggtcagactctagaagcctagtggtcccccacaaagggaccccagacactctggcaagcctcagcctcctcaggcaaaaatgccttgaaccacaggtagctaagaagggacctgtcagggtagcctcaccccactgtcagaatgtcagtgcctcaggcagcagggatccccggcacgggagttatcacacccaaggcatgagggctttgtcacccccgctctggtggaaagtggcacgagatctctgatgatgccttacctgccagcctgcccagtgcagggcatcaacagcttaattaacgtctgaacagcttccaaggctctcaaataggaggccctggatagcccagggcagcaaggctgctgcagttatggtgagggccctcccctgggctcaggcctggctccaatccaattagttttcttccagattagagaagccaaattcaaatctctgtctctgtagcaccagct

SEQ ID NO: 57302 - DNA, 1046 bp, Homo sapiens
tcagaggaggggagggagctgtcaactttatggatgtttgtttttctgagataataaactagtcccaggtgactaaaatatgagatttaaccccaaagttcttgcctgggctctccattgctgtgcagaagccatctgttgaaatctatttaccattttaatggtctctcttgctctttttttttaactgcttatttccaactccaaatgtgtgccaagaccacttttttgggtctatattttatctttcagaaagcaattcccagcctttcccaaatccccaacccctcccagccaacaggagatcctggtccagggttggcaagcaagagaaagataaatcattaatttttttaaaaaagcctctcctacaactctagaggcagctcagcctctatgagccttgtaagttctgaccagttcagggacaccctgtaacttgcccaatttaattacagaataacataccagtttgtgtgtaatacttttattcaatttttgtgtttttggagatggctaaaggaaaaatcaccaaaaagaaagggttctaaaggaaaatcctgaaatcacaatggcaaaaatgacagaagaaaatgaattaaaaaatcaaaagagacagatgttacatgcagaagcccacgtctgctttctctgagaggatgtgatatactcttccccgggcaggagctgatcatttaaaagacctttatttaatagtttcggatggtttatttgtattactccttttagaaggatgataataaaatttcccttttcctaatgatttggccccattttataaacattgattttttttttctccctcctaactcaatacttctccacagtagtggctgaactatgtacttccctgtggcagtcatgagacaaataatcatccatacagagcttgatcagtgctccctgcacagccaggcaaaggggctttatgaagaaaggcactaggaattctgaataaaaatgaaatagcattcttctaagcaagtgtggcaaaggacacactttcagactgtaaaggacaattt

SEQ ID NO: 57303 - DNA, 1054 bp, Homo sapiens
attggttgtttacatatttacaatccattctgaatagcaggaatcttacctgtattcctgactggactggtacagtatgtgctcaataaaatggctatagggccgggtgcagtggtgtatgcctgtaatcccagcactttgggaggccaaggcgggaggattgcctgagcctagtagtttgagaccagcctgggcaacaaagtgagactcccaaagtgagagccaagcatggtagcacacacctatatagttataactactcaggaagctgaggtgggaggatttgcttgagcccagaaggtcaaggctgcagtgagccatgatctcgccactgcactccaggttgggagacagagccagaccctgtctcaaaaagtccgtgaaattcagctccataccctttctcttgaaacaaatgagcaacaacaacaacaaaaacccacacactgtgttgtgtgataatcatgctgcaaaagagtatataaaatgtatatgaagaatttaaacaaagcttttaaaaatttacccactacttagcttaagaaatagaacatcaccaatatctttgaacctcctgtgcatgcctctcaatcatatggccttccctagtggtaatctttgagagattaccactatcccaaattttatattaattaatgatttcctttgtagtttcagtacatatttgtatgtctgaatcatattctttagttttaccggtttgcaaaattttgtttaaatgaaatgatatcatatgtattcttctcacttgtttttttcccttcaacattatgttttggagataaacccatgttgtgtgaagctatagttcattagtttccagtgttctacaggatttcattgtacaagtgatcaatactttatttatatgttaccattaatgagcgtttgggctgtttacatttggggtctgctgtgtacatgcttgcaaatatctcctggagaacatatgcaaaagtatataactagaagtagaattactaggttggagggtatatgtgtgtttaggtttaacctgtaatgctctagtgtt

SEQ ID NO: 57304 - DNA, 1040 bp, Homo sapiens
gctggatcgtatagtagcctattttcagttctttgaggaacctccaaactgttctccatagtgattgtactaatttacattcccaccaatggtgtacaagggctcccttttctccacatcctcgccagcatttgttattggttgtcttttggataaaagccaagttcagtatttttaatagttccagaaggagagattgcaaaaaattaatatttgaagatatacttactaataattcctagaattgatttaaacattgggaccttcagattcagaaattatgagctctggttagtaataatctgtgatgttcatctgctagaatactatacagcagtgagaatgagctacatctacatgcaataatgtaaatgaatcttacacatgctactgagctgagatgccagacacaaaagagtacatacagtatggtttccatttatataaaggccaaaaatgggaaaaacttctctctagcattagtaaaggggataatgattaccttgggtgaagtaaggaggtagcaggcaactagaaggggttaacagggcacgcgtgcttctgagagtctaataatgacctgattgttgatatgtgctagttacatggataaatttccttaagaaaatttatatacagttgacccttgaacaacataggtgtgaactgtgtgtgtccacttatatgcagggtttttttgttttgtttggtttggttggttttgtttgttttttttttattattatactttaagttttagggtacatgtgcacaacgtgcagtttagttacatatgtatacatgtgccatgttggtgtgctgcacccatcaactcatcatttaacattaggtatatctcctaatgctatccctcccccctccccccaccccacaacagtccccggggtgtgatgttccccttcctgtgtccacgtgttctcattgttcaattcccacctatgagtgagaatatgcggtgtttggttttttgtccttgcgatagtttgctgcgaatggtggtttccagcttcatccatgtc

SEQ ID NO: 57305 - DNA, 1027 bp, Homo sapiens
tgatttgattttgttattaaaattgtttttcttttggggttttttttggggtttctgtatgatattgctaatgttacttttttttttaaggataaccaaagttaatatgacttattttagaatacatgctaaaatgctgtgaggttttttttttttgttgttgttgttgttgtttttgagacggagtcttgctctgttgcccaggctgaagtgcaatggcacaatctcggctcaccgcaacccccgcctcctgggttcaagcaattctcctgcctcagccaactgagtagctgggattacaggcatgcgccaccatgcccagctaatgtttgtatttttagtagagacagggtttcaccatgttgatcaggctggtcttgaactcctgacctcatgatccgcccacctcggcctcccaaagtgctgggattacaggcgtgagccaccgcactcggccctaaagtgctgtttttgtattacatgatagaagtctaaagttgcagacatgtagaatgtgaaaacctctttgttaaaaacaacatgactttcaaggaatttttctttttaatggctaccatactttccagcattgttaggcaactttatccctgaccaaagtatccagaacaatgatttctgtatgcccaatttatgttattgagggctataaaattttaccccaaattcaagagttaacacaatatgaacgaccaaagaattacaagagcttatgaaataagctctgctggcaagagcatcaagtctctagcaccatgaaagtcttgccaagtctttcacctgtagggaagcagttctgcttcttcatgcacactgttgctccttctttcatatactgagaagaggaagactttgaggatcatcttcctgaaggtcttccagcttctagggaacctctactgagacctgtcttgatgtgtgctggtgatagaatgtgtttgtgatatttgtatcttcaaaacacttgttttagatcatttaatcttagtataaagttaccttttttgat

SEQ ID NO: 57306 - DNA, 1031 bp, Homo sapiens
attgtagcattgttttaaatatttgccatccctttttttaaaaaggtaaagaaaaagcaggaaaaaaggcttagacacatcttgtattcttgttggtatcatggcatttgtcagtgtgttcatactttttaattttctagtacttgccgacttaatcccatgagcttacttctaatatcagtaaagggtatgagctgtctatgtggttcaagctgccacttgagggtttctccattttgtggagctttctaatggaattcaaggttctctctaaggatgagcattacaaagccttccctggctgctgtgggaggaggaagtgcaccataggttcaaggacacatgtgaagtttaatgtgcacaagcatgctcccgctcctgctcctgctcctgctcctgctcctgcttactctgattggcaaggttaactctgagaagctgctgcttttttaagtgatttgattagacccatcacttcattcctttcagtcctccctcccaaggaccaaaccaccactgtctttgcagtctttgctttgcccgttacattttctctccttttttcctgctttttcatcaacttttaacatttcgtaaaacaaaataaggaactcaaaagtaaactaacttgcctcactgaaagctttgacatgaaaaatttccatacttttgttttctacacttgtaaattacaaaacttttatttcattttcacttagctcataaggaaaaatagaattattattcacattagttcacttagataattccacagtcctctatcaaaatttattttgtacataatgaattctttcctcacaatcgttttaaaaataaccttttaattacaaaaacttcaacgaggtacaaaaataaagagaatatctagtttcagcaattaccaatttgtggccaatcctgtttaatctgtactgctatctcacaacagtggtctttaaccattttaggaagaatatgaggaaagttatgaacaccagagaaaaaggacctacatgttaaatttttgcaaa

SEQ ID NO: 57307 - DNA, 1031 bp, Homo sapiens
atatgtttgaggtttttagatctctaatttctatacttcaatataattcttacaccatttatatgatgttaagtcattgtctatatttcaaatattttatctgtaagtgaaggtgtaaatatgtttcctgttttccgtcacatagtgtctttgtgattttaattcaagagtcttttgaaaagtctgggctaatgtgttaagtcacctgttgattttctaaagaattactttaattccacttaagaataggcaggtcaggtgtgaaaacagaagctctttaccaaaaacacaatacattttgtcagttgatcttctttttctgctgagtggataattgtgaaaacactcttagccttcaaattattttcttaatccttgattctctcacacattgtaaacagtctctccatatcagttttacttccttcctagattactactatgtttcaggtactgaggaagaaatgtttactagcacttgagtgtagcacctttccatagtaaaatactaaactcttctctaaaatgagtgaaagttttacatactctgcagcgagtgtgcatgtgagtgtaaggggggagaggggcatgtggagattaaatccagttgctgtacttaaaaaatatgtaatggtttatttttcattatgggaatcactttcatgcatgccagtttcttttctacaaaattatttgatgagaaaacttccatttttagtggtttgataaaacactgatttattatgttgtggcatatctttttgcactaaggatgtgccttccaaatatacttgtaattcttgccaatttaagggcagagtttatgtgttaattttgcattgcttttaatattgaaatcactacctgggcattctaattaaatattttctttatgttacctggagccaatcaaaaattagaatttcaataaataaataagtaaaagggtttttactacatcaaaaatatcaattgataatgtatatggctttaggattttctttacactttctaaaaattttataatttca

SEQ ID NO: 57308 - DNA, 1052 bp, Homo sapiens
ctaaattaaaacaacaaagaaaaaaaaaaaaactggccagatgtgatggctcatgcctgtaattctagcactttagggggctgagtcaggaggatcacttgaggccaggagtttgagaccagcctgggcaacatagtgagaccccatctccacacatttttttttaattagatgtagtggtgggtgcctgtagtcctaactactctggaggctgtggtgggaggatcacttgagcccaggagtttgaggttacagtgaactatgattgtgccactgcattccatcctgggtgacagagcataagaccctgtctctaaaaaacaacaaaacagttttttgaaccaaacacattgtttggaggtattgtatatggaaatatccccaagttaggcattgcctgaggtttttgccttgcggatttcttacgttctatttgtttggatagtgtgagacaaacaatccaaaaactataggtggctttatagaacattctttactaaacactaagctttaatgcaaagtaaaagttccgtgtaggtttttaggacggatctgttagaattatatgcctgccacaatgttttcctttgtattcacatgaccattgtgtgtagccaccagctttgattctcttttgacagtcataatctatacaatctaactttagttaatgggttgcttttggcttttccagtttgagttgctaacatgcttcgaagtcagagggcttctggagattagcgctcagaataactcttttgcttgtaatatcttctttggttttgttattgaaaacgcttttcaaatatagacaatacaaacataataaatggaaggaaaggttcatctcctcatgactctatatttcttaaacaacattattattgactggcctattggttgccaaaaaggaaaatcaattttattggaagtatttgcttggccacagatcttggtactaactcagcacagacagtctgatgttatcagctatctgaagactaatttttaccattagtctgaaacgaagcagtaattagagatatgtcaaa

SEQ ID NO: 57309 - DNA, 1016 bp, Homo sapiens
tgttgtagtttttgagatggagttttgccctgtcacccaggctggagtgcagtggtacaatctcggcccactgcaacctccgcctcccgagttcaagcgattctcctgcctcatcctcccaagtagctgggattacaagcacccatcaccatgcccagctaatttttgtatttttagcagagacagggtttcaccatgttggccaggctggtctcgaactcttgacctcaagtgatccacccacctcggcctttcaaagtgctgggattacaggcatgagccaccatgccctgccccattgattgtttattgctttttccatagtgcattttttatatcaatcattcttagaataattaacccataattttttatatttccttgtctttcttaaaacattatatcttttacatggctccacaactgagataacaaattcatttatcttctgtgtttttagggtagggctctacttcactgggcctgtgatcgaggacataaggaactagtcacagtgttgctgcaacatagagctgacattaactgtcaggtaagagtgataaagaagagcttttattttttaaattgaagtataattcgcataacataaaatttaccagattaactcttttgaaatgtgcaattcagtggcgtttagtacatttcacaatgttgtgtaatcattgctactatatagttccgtaatactgttgtcaccgcaaaagaaaaccctgttcccactaagcagtcactttttaacattttttttatttctccccttgccccagaccttggcaaccactaatctgctttctgtttctatagatttgcctattctggatattttatataaatgggaatcttaaaatttatggttgtgtttgacttcttttacttagcataaagttttgaaggtgtatctatattgtaacatgtaacaatacctcattcctttttatggctgaattttttggatatcccaaatgttgtttatccattaatcaattgatgggcag

SEQ ID NO: 57310 - DNA, 1062 bp, Homo sapiens
aggagttcgagaccagcctggccaacatggtgaaaccccatctctactaaaaagaaatacaaaaattagctgggcatggtggcgggtccctgtaatcccagctatttgggaggctgaggcagaactgcttgaaaccggaaggcagaggttgcagtaagcggagatcccgccactgcactccagcctcagcaaaagagcaaaactccgtctcaaaataaataaataaataaataaaaaataactcctagtgggctctgaacaaggcaaaataaattttttttattttgatactacaataaattgtgaatgatttgaccacactttttctctgctttcccccctcttaggattttgtgtaagcttattagaaaacagatatttacaggtaaataaaagtaaatcaagcaaatgaaagcaaaagaagaagacaatttgtagggaagaagttttcctactttgttttttgtttaaagaatagatcctagtttaattatttgaaataataggtatgtgaagaaagtctgaatgataaaaagaatgtaggcagttttagaaaagctatttcttgaaaggtgctttttactttaaatcaatccttgccctagcttatatctatttaaatcttttctaaaatcacataaagtagggatgtcaacttaatgtggaaaaacattccattctttataaatgacaacatcatcaccatcctcagaaagtagtaagccatgcatcactcatttattcagaaaagcccttagcttttggggttttgtttattcttttgaaccaagtaggctttttttcattaactaaaacaagattttctggcagtagagaatagaaataacacacgtaatagtaactgtgagtctttggtagacaagtgttaaaattaatatttcatatttagtactttatctcctaatatttagtcatccattctcttttacaagtggctttcacagtcaactgtttggtgatagacactgatagattgtactagtgtttttgaggtatttcagagtgtaaacttgcaatagtaaggagaaatgcttattttca

SEQ ID NO: 57311 - DNA, 1027 bp, Homo sapiens
ccctctctctctctgaccctcctaacgtaattatatcacaacttttttattttattttattattattatactttaagttttagggtacatgtgcacaatgtgcaggttagttacatatgtatacatgtgccatgctggtgtgctgctcccattaactcatcatttagcattaggtatatctcctaatgctatctgtccccctcccctcaccccacaacagtccccagagtgtgatgttccccttcctatgtccatgtgttctcattgttcaattcccacctatgagtgagaacatgcagtgtttgattttttgtctttgcgatagtttactgagaatgatgatttccaatttcatccatgtccctacaaaggacatgaactcatcattttttatggctgcatagtattccatggtgtatatgatatcacaacttttaatttcagctttctgattgaatctctgttgaatcaatattaatattattatgactatgtaaatactcattgctaagctgtggattgtacttgtgtgtatcagtcagcttttgctgtggcacaacccccaaatttcagttgcttacagcaacaaacatttgtttttttgcttatatcactgtctcatgagatgagtgacaccatctcatttatatattctgataatgctcttacttgatttctttatgtttatctgatatttcaaaagggttttggatcagttgagacagtctgtatattttatctacttttattattaatagtatgagtgaaggatgatgataatataacaaatcaataagtaggccacttaacttttcaaagtcacagttttttcactggaagtatcttgtgtgtactatatggtgcctgttaatatttatctttcaaataacacataatactttatacaatgcatgtgatagtttacagagtactttcacttattactatattatctctacaacagttctctaaggcagatattgtccttgttttacagacaggaactgaagttcagagacctacattt

SEQ ID NO: 57312 - DNA, 1043 bp, Homo sapiens
aggcattttgttcttttttctaccatgtattaaggtattattgatactagtcagtcatttatttcacacattagttttatacttactgtgtgcaagttgtagttctaggggctggggatttagcactgaacacagcagaacaacccctgctcttaggaagcttacagtcggacagagataagtaataaagtaaatattatagtaaatattaataatgtattagtaaagttgtagtgtcttagaaagtgattagcactgtggagagaaagcagggaagaaggatagggcacacaggaggcaggggtaccttcttaatttaaaataagatggtcaggagaggctcactgaaaaggtaacattgagcatagattgaaattaagtgaaagaatgagccatacagggggaagaacattctgtatagaggaaacagctagtgcaagtctctaaagtaggatcatgcctgacgtactctagaaactgcaataaggactgaatgtatatgagaacgaggggtggagaaatagaaaatgaggcagagttgggcacatggtaatatagcctgctgtaataaggattgtggcttttactctgagaagcgaaatatactgattgtaaacttgtaaaaagacttaggtattcctccacattgtccactaaatgatattttcatgaaaataatagaggcttatggaaacaaaaattcaaacagtgtggaagagtataaaatgaaacttttagaacaagtaccttgccccacacactcacacactttcagtcccattccctagaagtatcttttcacttgtgactgtttctgtaatcctcagagctacctccgtaacactgagctctaaattcttcttttaaaaaagttttctttgaaaattgaacgtttgtctgatatatagatgaaggttaacttagtttctgcaattccacttctcttttgtcctcttcctccgtttctactcgcatctagtaaaacctttagtgaccaccagagggagcaaagttcaacataaataagatgcgtttttattctc

SEQ ID NO: 57313 - DNA, 1009 bp, Homo sapiens
catatgtagtggttatagtttttgtaaacacgttgtaatcaactattctgctttgataataagactctttttactgattgcatgaagtctacagagtaataacatctttgtttttgcctcttgttttggaatggagggaagagaaaggagagaagagaattattaacatttttttattttctgctaagtttttgctagctggggagaaaattagtatattgtaaacaatataccttacctgtgtattacagaaatcatgctccccattccctcccaatttctgtgctaacactgctggaaggtatttaatagataataaggaaccttacattaataaagggaaaaataaagataatgaacccatttatatgttcagaagacaagatacctaagaggctttaagcattgcaataggttattctcagtagctggcaattcagctcctggatagagaaagacagacttatctgtaacctccaggaattcacatctgttttgtgtgcaggaacaaagaatataaaatcaatatgaacacacataacttagctagattttatgaattaaactattttagttctccatttaatttttatataagtttagtgataggaggtttgggcaatagcagtgagtgtatttattcatatagccattgtaataattgaagaagacagggaaagagatgcaggtaggttaaacggaatcttgaatattgtgaaataaattcacttgcaacctagagtatttcattattgctagaaatgaaaggcctataattattaatgctttattgtcactcaatttcttacagtattttgtggccatgttttgtaagaatgagtgaaataagggactaacatttcagcctgcagagttgatttattgtttctaataacatttagttttaaaaccttggctagaatccaagtgatggtttttattgaaagaagggtattggtctttcatctttctagtagtaattttcagcaccactgccagttcttcacag

SEQ ID NO: 57314 - DNA, 1065 bp, Homo sapiens
tgaaaagagttctggagaatggttgcacaacaatgtgaatgtacttaacactattgaactgtacatttaaatatagttaaaatggtgaattttatgttacatgtaccttactacaattttaaaaagatacttgtatccagttcctgatagtttcttatgcagtctactagtttttttctctaggacttttgttctgttttcttcagtgttttttcttagtcaagagagtttataatctctcaggtgatttttcatccttttccagctgttccttaattttaaagtatacaagttagccctcatcttaaaaattggacaatactggattgatgtgaagttataatgtttggattttagtttataaatgttaattgaagtatttatcaatttagggagctatgagtggtcattgaatattgaaaaagaactgtttagcttcagatacattcagtataaagcttactcatgatttcatatattgtttttctttctttctaataggctttcaaggatatgctgtattcagctcaggaccaggcaccttctgtggaaggtaagatgaattaacccttaagtttagtcacagaaaacctctttttaaggaaagatattttgtactgcagagtataaaactaatatgataacctgtcctattatataggtctttttttcccttttaataatatatattatgattattttatattttattctaaatttttctcttgtctagctcacctttaccctatgacggatcttttactatgtctttgtgtcaccttaggactgtgaatcgtatatattggtttagtcagaagtttttctgtgtaatgcttccttgccttccctcccctcccctccttcctccgtccataaattacacaacatagcttttcctttctatttatgtcatgcctttagagtgggaccagtaaaacaatggagaatgtttacaatggatgtgtgtgtgtgtgcgtgtgtgtgtgtgtgtgtgtaagcatgtttatgtatacatgtgtacatgttctcgtgtcagtaaataggagctaattcaacaactattct

SEQ ID NO: 57315 - DNA, 1046 bp, Homo sapiens
attgggggtgggggatctacctgtattgattaaaatttcattttcttattgaaggttgaaaggtgaaagattgtttgtcaccttcgaaacagagtgccaattcgtgtttcctgatgagaaattgaccagctatgtgtttactgtaagaggtgcaatcagtgaaattggaaaaggaaattgaatttatattggtgtattatcccatgcagttaattttgcaaataccctaatgcacatgaattttatttgaggttgagatgcctatatttactctgaaacaaagtgttggaaatgtagtgtgattaaatacatttcaaattttctcttgttccacaattgctgtgcagttccaaaatatgttcttattaggttcctcacaaaggaatcttttggccattacaacaagaaaatgagatagttaattttaaaggatacatcaaaataagataatttacattgtaagatttattattttcacgttcctgttttttctgtatgggatcctctaacatgttagcaaaacaatatgtcgtctttctataagactataatttccacttaaggaaaactatgatatgattcactcttgacatggcaaaaaaaagttaggttaataaatttacagcaaagaagaatttttaacaatacaaaagtaacacaatatattaggtagatatcctcagaagcagtttattcgcaatggccatgaaagaatcttcctaaaagtagtagtaagagaatgactaatggagaaaaagggatttgaactggatcttgaagcatggttaacatttagatagccttaggagagggccttctaagcacagagaagcaacaagacgaaaccaaaagaatgcacatttctaagacattcagggaagatttagtagaacacttaaaatgaagcatggagggttatcactggagaatagttagctgtatggataaagccagcttcccaaggagcttaaataatttaaaaagttggactttatttggtagactagtgtattctaagatttggagttactagtttaatgcagact

SEQ ID NO: 57316 - DNA, 1050 bp, Homo sapiens
cattgggataataaatagcttggattgtattgtatctagtgccagtgagattgatttttttctcaattacatgtcactgttataagtgaaaagacttttttgtgtgtgttctaccaagaatattttaaacacatttagttaaacctcacctgataaaaccttaagatagactcagatcagaaaatcttgtgtagggactacttaagcctagttatattcagaatcattttgcagaaattagcagttttagttagaaatttgcaattaggaaaagacttagagattacctattcaaatgcccttatttttcaaagtgaaaacaggcctagagtgttacttgctcaagctaatataggtagttggcaacagaaccatatctagtctgcactaaaacctactgattttacctccagaatatcttttgaattttttcacttctctgtctccagtgccctcaccctagttgaggctattgtgatctctcccgtggtatctactgtactacgtctcactggtctcccgacaaccttatttagaaagcatatttgatcatactattctctctgcttaaaatccttcaaaaatgtctcattggtctcaggaagaaggctagtcctttattctaccctttgtatatttgtgagattatttgattaaagtttttttcctcagatagactgtagactgtaatgtcaaagggcagaatttatgtttattttgcttatcgctgtatccctacccctgccacattgcctggtacataggagggacttggtacttgttgaatgaatgactcctgatttagctctatttctactacaccagtgattttagagtaacattttttatctttgaaatctttgccatatgctttatataattcatctacccatctgttgatgtaatagcatctggaaaaaaagaatttcaagttagttattctcagtttataaatcacactcttaaaaaaacacacacctttttttggtacaagcatgaaacagtagtgctaaatattctttctatatttgatggagcatggtcatatat

SEQ ID NO: 57317 - DNA, 1054 bp, Homo sapiens
tatttttatttttggtagagatggggtttcaccatgttggccagggtggtctcgaactcctgacctcaggtgattcacccaccttggtctcccaaagtgcttggattacagacatgtagatactttattttgagttatagtaaaaaaaaatgtacattatgacccagcacacatatacagataaatgtttgttttatatatgtttgtatgcatctatatgtgtgtgactacacaatatatttaaataatttaagatattttttcatgaaacagtacatctttagtacttgtagtatattgttttctatatttttctattctatttgattttttaaatgctaattatgatccactaaattggttttatgacctcatattgggttgcaaccttcagtttgaaacatgatttctttaagttaggtcgcttctcaaaaataattttaggctagctactattaaaaattttggtgctgtaatttgatgacttcctgttttgtgtgtgtattggcagggccagtgaggcacgtctcttgatgtcctcactggtacaaattggtagtctctagagtgactcctgccagatcaggaagtggtaggtaatacgaagaaatgattcacagaaatagaatttgtttctggtcctcaacagtatcttttttccctcatttagccaccttctccccagaagattgtagactgcagttgtcagacactagggcacaagaaaaactataaacaatatggggtgagttgagcttaataactcacctccacccacttatatctcacacattaaatagctaaaaatgctccatttttaagtgagatatttttgactaaaacctttcaatgtccctaaacaaattgctatattttattttgtctgtttctagtcatatcaaaaaggccaaacaatcaaaatatagcatgaatgctgctaaaatttggaatttttttcttgccgatgctatttactgtttaaccttcctaggcttccacacacttgcttataaaacaaacagattgattcccaaccctctagggttccacatgt

SEQ ID NO: 57318 - DNA, 1054 bp, Homo sapiens
ctagggataaccatgatcaattaaccacagccaaaatctctgtgtgcaaaaacatctgtcctgttgccttttatggtaaatgcacccaccttgttttgatagttaagtgctgccatctggcctttctgttccaaggatcattgaatgtgcattgcaatcagggaacccatctcaatagatacatctctcatggccattcctggccttcactggggagtaaacatagagctttttaaggatgcaggtgctctcctcactaacgtaattctggatgccttaatgaagggagtattttctgggccccctcagggggatgtgattggtgttggagaggcgtaagagtggtccctaggagctaaaagcaggtcccagatgggttgacccacataaatggatgaaatttatttggaaagaggaatggaaacatgatttttgttttgaatacagtcttagatcataggaaatacaagaagatataaatagattataaaagttaagaaaatgaaggtcatgtaaaggattaagaatagagatgaatcttggaaacatcctatagaaggaaattctctaggagaaagagagagtgaatcattaagcagtgccagacaggacaaaaatactaaagattgattgaagacaacagcaagacagtatagcagtagataaagcaaggaataggagaattatgagaaagcataagttgtaaataattctttgttattattatataatttttatcattatttattgagtgctatgtcccttggcatttttttttttttgagacagtgtctcactctgtcacccaggctggagtgcagtggcacaatctcggctcactgcagcctctgctcactgcaacctctgcctcccgaattcaagcaattctcttgcctcagcctcccaagtagctgggattacaggaatgcaccaccacgcccggctaattttgtatttttagtagagacagggtttcaccatgttggccaggctggtctcgaaatcctgacctcaggtgatccacctgcctcagcctcccaaagtgctgggatta

SEQ ID NO: 57319 - DNA, 1461 bp, Homo sapiens
catgtacttttgttgtgatacctaagaatctattgccaaattcaaggtcatgaagatttatcattatgttttctttggagttttatggtttgaattcctatattgaagtcatcaatgagttttgaattaatctttgtgtatgctgtgagacaagggaccaacttcacttttttgcatgtgaatatccagttgtcacaggactaagctgttgaagagaatattcttttccactgaatggtgttggcactcatgttgaaaatcaatcagccatcgatgtataggtttatctctggattctcagtgctattccattcatctatatgtctgttttcataccagtgccacaatgttttgattactatagctttgtagtaagttttaaaatgacaaagtatgagtccctaactttgttcttttttcattattgttttagctatttgggacctcttggaattccatatgaatttaaggattgactttttcagttctgaaaaaaagccattggaattttgatagggattgcattaaatctgtagattgctttgggtagtattgccgtcttaacaatattaaatctttaaatccatgaacacaggattcttttctactttaatttctttcagcagtgttttgagtttgtagtatacaggtctttcacttacttggtaaaagttatttctagatgttttattcttttgaatgctattgtagttagaattattttcttaatttcattttcagattgctcattgccgatgtatgcaaacacaagtgaattttgtgtgttgatcttgtactctacaactgtgatgaatttactaattctagtagttttattgtggattctttgggatttgtgttatttttgtttcctgactgttgtaatgcatctgtggtctttgcttaggaatcaggatgtaaaactatatatcattttccatttataacttcctaactaatcttgcctttgtacttgttcccttgtagtctgttcacttaacagctagagtagccctttaaaataattcatgaggtcatgccgtgtatgtacaaaaccttctacaggcttgtacatcagagtaaaagcttaagtcttgacaaagtactgaagagctctgtctgatctactgctgaccagttctttaccactatacctttgtttgttccaatcatagtaacttggctttcttcctagagcaatctatcttaaggccctttgtactttccctctctacaaggagccgtcttcccccaaacatcccaatgctttgttctctatttccttaaggtcatctccttaagtgtcatctcctgagagtcttccctgaccgccctacctaaaataacacctaacatcattctttatctccttactgtagttttccttcaaaccccttatctgactttatgcagaacagaaatttcctgaagataggtattttgtccgttgttcatcactga

SEQ ID NO: 57320 - DNA, 1029 bp, Homo sapiens
atgcctgtaatcccaacactttgggaggccaaggtgggtggatcacgaggtcaggagatgaagacaatcctggccaacatggtgaaaccctgtctgtactaaaaatacaacaattagctgggcgtggtggtgcgtgcctgtaatcccagttactcgggagactgaggcaggagaatcgcttgaaccagggagtcggaggttgcagtgagccgagatcacgccattgcactccagcctggcaacagggtgagactgtctcaaaaaaataaataggtagatagatagatagatagatgatagataatctaggtttaggttttatttatgaaaaatttctatgccagggctatatcattgagaatgaagacaaaagattattaattcaagggaagttatgaattttataactgaccaatatcttaatattctttcagctgtatttaaacttgaaacagatagaagtatatggcccttgataagaatctatcggggtggctttcttctgattgaattcctttttctactgggcatcaacacgtatggttggagacaggctggagtaaaccatgtactcatctttgaacttaatccgagaagcaatttgtctcatcaacatctctttgaggtaatcaaagcaagacataacacctcatgaatatagtttgcattagctatatagctatctggtttagtgggtacttaaatccatcctctacttgaagaggattattagcttaataactaatcatgtttcttacttttgttttattaaagatattttaagtaatggtaaaagtaaaaataacaatttttctctatctttctgtcttccccatcctttactagattgctggattcctcgggatattgtggtgcctgagccttctggcatgcttctttgctccaattagtgtcatccccacatatgtgtatccacttgccctttatggatttatggttttcttccttatcaaccccaccaaaactttctactataaatcccggttttggctgcttaaactgctggta

SEQ ID NO: 57321 - DNA, 2073 bp, Homo sapiens
tggctcacgcctgtcgtcccagcactttgggaggccgaggtgggtggatcacctgaagtccggagttcaagaccagcctggctaacatggcaaaaccccatctctaccaaaaatataaaaattagccgagtgaggtggcacgtgcctgtaatcccagctactcaggaggctgaggcaggagaatcgcttgaacccaggaagtggaagttgcagtgagccaagatggtgctgctgcactccagcctggacgacagagtgagactccttctcaaaaaaaaaaaaaaaaaaaaaaaagggggtctcctttgttgcccaggcttgtctcaaacctcctggcttcaagtgttcctcccgccttggcctcccaaagtgctgggattacaggcatgagccactgtgcctggccataaaattatttttaaatgagactttggaagattcagaaaactcaggttttactatgattacgtaattacagtaacaggataatatagttgtgtacattgtgtgctaagtgggcatttccccagtgtatcctttgtttaaatagcaagctgtgattcatgcatgactagttactcctattagcagaatgattgcccattgagtagatatttatttgtgcatctgctgtgtttttgctaataaatgaggacttgttgatggaataggttgacaatggtataagcagtaatagaataataaaatgtactatcagatacactgaaatatagaaggaataatttccttctatatttgtggtttgttgtttttgtagtaactgttataaacagaacagtgttatcatttgtagataattttagtattaattgacctgctgacttattttaatttaaatctcactgggaaaacttacccttagactgattcctagtgaattaacaagaatgtgttcactctagttatgtttttctgataccgctttttaaaagcttcatcctaaagtaaaagtacatttctttctttttttctttaattttttttttttttgagacagggtctggctctattgcccaggctgaagtgcagtggcgtgatctcagctcactgcaacctccacctcccaggttcaagtgatcctcccacctcaacctctccagtagttaggaccacaggtgtgtgccaacgtgcctggccaattttttgtatttttggtagagatggggttttgccatgttgcccagctggtctcgaattcctgggctcaagtcatctgcctgccttgcctcccaaagtgctgggattacaagtgtgagccaccacacccatccttttctttaatttttagtgagaaaagcacataggtcataatggtaggcactgggtgccatttatatccatatttatattggaatctatggaattgatatatgctatgctcctaaaaacaaagctaaaaaaatttataagaaattgatttattttgatatgaatattgtatgtcaaattagtatagattatttacatccattaggttatactttctctccttaaatctatatttacctcaatcagaaatctaattaggtagcataaacagtgcctcagattttctaaacaaaaatataaattttaactcactatattaaaagtaagctaattaaaaattttaaattatagtcctttgttacataatttagacatcagtttttaccaacagtctctttagttctatagtaaaaattttacacatttctattataagaatagagaggtgttgtcatttagtaactactttatgtattttaattttaaaaataacccacaagttggagctgctattaatccctattttataaatgaagaaacctacattcagagaagttaattaacttgcctaaggtcacatagccagtgaagtgatgaagatgagttatgaacccaggcagtcgtttataatctgtactcttaaacactaacatttaacacttagccctattagtcacttatgttagatgtttaactttgatctagtggatcaaactagtagaatataaaaatcaaatttgaggccaggcacagtagctcatgcctgtaatcctagcactttga

SEQ ID NO: 57322 - DNA, 1041 bp, Homo sapiens
cgctttccttcaccaagtagtaagaattgtttccagcccatttaactgcaaattgagttctctgattcctctagtttctcatctccatggcaacgtattattacttgagactgctcttctgttgagaagagaaaaggcttttaagttctgagccacatgcagccactccttttgaatttttaacctttttccaagaactgtcagtcaacaatctcacttccttttagtaaaatgcgttccatctttgtctttttaagtcaacatcaaccaacaccttagatgctgcactttttcatctgtaggttgtaaagagatgttactaattgaaattaatagttatttttaaatactttgcaaaattttttttcagtgatttttttttcttaattgagagactatattttaggagctttggccagtgctacaaaattgctgtcaatctaaagtgtgtctaacggtcataaaagatcagaacattgcttcaataaaccttgagatttgatgcagcagatgatatttataatataattccactttttgcagtagattctgtggttggagtaggattgataaatgtagccaataattttaccaccatgtaggcattcttgttaaatgatataatttaagtatgtcagtgaaggaaacacatccccaaagttcccataattttaactcatactgtggaatgctgttgttaagtccaggcatatatcataattcaggaggttgttactagagaatttataaattgggcaactgatttaatacatggtatttatgactccatttactaagttataaagaaccctttacttttcttccatcccaggtaaaaatgagtactgttttttggtcgaatattttagaacataatatacctttaactgcagttgacgcctgaacagcttggagattaggggcaccaacctctcacacagttgaaaatccacagataacttttaactcccaaaagcactactaatagttaccattgcctggaagccgtactgataaagtaaatggtctattaacacatat

SEQ ID NO: 57323 - DNA, 1407 bp, Homo sapiens
actggtaatcctgaatgtgaatgtaaattctaatcccagctctttcactaactagctatataattgtctgcaaccagactatagtggattcttgtttatgaggtaagtatgttaaactagattatctcttgatcttttcccagtctaaaattctgtgatggagagggaagtgtagattaggtcactaacattttctactctatcagcatgtcactagaaccttaaaattgtatttggaaaagtgtatggatgtgtaatattcaattggtaagtagggaaggccattttcaggtgtgaggaatggtgaattcaaagaatgatatgtagagtaacttcagatgaacaaataaaggggaaaaggggagagttgttgacagtgatcttttttacctaaactatagcaatacccccaatgtgagaaattagaatatatgaccaagatattagacatatttttataaatctaatttgaaaagaaaattaataatcagagagtagataggagctcagttaaaaatggcccttttgtgctcaccaaatatgtgtgttttatttctgtttacattgttcttgccctctgagagctataaaacatttgtttctttttttttttttttgagacagagtcttgctctgtcacccaggctagagtgcagtggcacgatctcggctcactgccagctccacctcccaggttcacaccattctcctacctcagcctcccaagtagctaggactacaggcgcccgccaccacgtccggttaattttttgtagttttagtagagacggggtttcaccgtgttagccaggatggtctcagtctcctgacctcatgatccgcctgcctcggcctcccaaaacatttgtttcttattatgataattgcttagataaattgtttgtatctttatataaatgttgatccattcccgcttttacatagttctaacatagtgatttctaggtaataaaattagtgaatataatttttcacttagtttctttgctgttacatattttcatgactctaaaaaacaaaataaatactttcctacattataatttgcaaacttataagaaagatgttctgctggatcaccacattcctttaattttaaaaaatactggccagacgtggtggctcacacctgtaatcccagcactttgggaggccaggacagaagaattgcttgagttccagaccagcctaggcatcatagtgtgagacactgactctactaaaataaaatgaaataaaaataactggatatggtggcacacgcctgtagccccagctactcgggatgctgaggcaggaggatcacttgagccctggagttcaagactgcagtgggctatgttcatgccactgtactccagcctgggcgatggagcaagaccctgt

SEQ ID NO: 57324 - DNA, 1036 bp, Homo sapiens
aaccagtcttaatgatggcatactctattcccttgtcctgctttattttcttcacagtagttatcattagccgattgattgtttacttgctcattgtctgtctccaccactagaaattacaccccataagggcaaaaaggctttgagtcattctgtgcctttactgccttatggcagacattcagtaaatatttgtcaaataagttgaaagaatgagcactctaaaactgcattgcataagtccctccctttttcatagtctagtcttgtttcccttacccccccaccaccacctccccgcaacaccatctttccctattttaatattcaagcccttaattctttgtttttgtttccatgagtggaaacttgatacactgggaggtttacaggtagcagaagtatgttacaatttcataagtactttgatctaccccattttgctaaggcgatttgtgtggaacttcttccgcctggagaatgaacatctgaataactgtggtgaattccgtgctgtgcgggacatctctgtggcccccctgaacgcagatgatcagactctcctagaacagatgatggaccaggatgatggggtacgaaaccgccagaagaatcggtcatggaagtacaaccagagcatatccctgcgccggcctcgcctcgcttctcagtatgtatggcttctacttctgtgaggcatatttcctttgagttttagcattgggtagcatgtaagctaaaaagctatcaggttgaaccaaatgaaattgccaatactcagccatttttcacctacaaaaaaacagtaataagcagcaattccatatgatacaacctatgactgtctaaatgagcacatagagtaaatgtcatcagtgcataacctagtaatttggcactaaagatccactgtctggaggaaaaggttgttggagagtgatttattaatacttgactcttctgtgtgttgtgtatgcaaataatttttatgttataaactttaggaatcctgccatctatgccttgaccaaatgac

SEQ ID NO: 57325 - DNA, 2519 bp, Homo sapiens
aacagaaaaaagtaaagtagtattgagtcatgcaggtatcagattaacagacattcattgaagataagtgaaataactttggagatagcagagaagagcaagaagatgttggacgttggcagtaagccgcagcaaggcagttaggaaagtacgtgagcctgatgacgcgaaggtgatgcctccatctgtccgcttagtggttattaaattgctgggaaagacctgcctttattttcctatcatcttttccccattactttgcattattcaggaaataattatttattcccaaatgcagttttctaagcagtgaccacaaaaatttcttattctaaggaaaataattaagaaaataaccctatctgtggcattgttttaaaatgtgggatacaaatctggtaagcagatttcaggtcattattgttttcttttaatggtttacatgaaattttcctctcaaaaaacaagtacctcttactgtataacatttgagtttttaaaattgagatagcttctgagagaaaaaaagaaagttgaatttgtagctctctcaactacaaaatcaccacacttttctcaaatctaataggaattcagtgtcattacagatacggtctctagtgaccaggtgaagacaattgaagctttggtagaacttctgcaaaagttaggtaaagaagaataaatccaatttatcagctttgttcatattctttttctgagtgatctaaatttttcttgcttgtgatcattagctaagacaaggagtgttaaaggttttctaaatgcaaacacatacgtttctgcatttcagaagtcagtcttgatagtaaatcctacaaactctcaactttctgcattgtattttaagtctatacaatgttagagcacatggtaatgtgggacagagttgattatatgatagcatgagaaatttgcactggttggtgttacaaaccaatgatctaaccagcatactctccaaatatgaaaaagtaaaaacatctcattaggtttggaagagcctaaggtagtccatacaggaagtttgcctgagaacagagaggagcctgttgattggcatggctcatgatgcctttcttgtatgaattatcaaaactgatactgagttgcccctagaaaacagccttccagaatatgtttgcttatttatggtggaagaggaagtgagaacaagatgagagtttcccttaaagtgaggagaatcattatacaactttgcaactgaagtatgtttccttgtagcaaacctttggtttattttatcgtcaaatcaaagccaccctcagttttttgtatggtgccatcaacctaaggaggacaatcaaataacctattgtttgccttggattcagtatatctactaagtacacagtctcgtataccttcaaaccagttacttgactaaacttccaccatattaccttagttcttcctatgccctttcctctgtgccaccacaaatcagagggaaagactgcagtacttctagaaagttgtggacttctaagaaagagccaggcttccatctcactatcccttgatcattatctctgaagtccctacctgcacttccctgattgccctgtagcaacaccagcatggtgggaattggagggaaagattgtggaaaatccctaaagggtcattgttcatgacgttattttgaattgtaaaattgtgagccactcacatttcaattacaaaaagaacagaactcttaatcacgttgtgaagattaatttcttgccattttctggattagcacagaagcttgtatcaatgaagagtatttaggaggggaatagggggaaaattgtatttttctgttcaaactctctccttctatttgtgtttccttcacccctctccctccaccacactgtgttggtcaaatgatactattctatgaaaccctgagctatagttgtcaaaagtaactatggattgtgattagtcctctgtgggtgcttccttccctcttttttctccctcactctctttctcagtctccactctggtaaatggaaaaggtgatgtcgaagaattgatgcttgcttggactcatgttgtatctgtgactatgctattagctgtctcctttttccttcctatatgggtagaattcttatgacttatgaagttcccttcttgataagtaggttaaatgcacaatgtggtactgttttatagtttctagatggttgtataaagcaaaaagttaatgtggttatgtgtttttaaagaaaataagtgattggtcactaaactctgtccttttttcattattacaatttctctctgttttccaacagtttgctgactcctttgtcactggtgaatggtttgtgtgactgtttttctctcttggtttcttgaattcctgaacatagttccccttaggactaattttcatatggggttagggcaaacagactacagtggtgaaatttttaaactatcctactaagttaaaagaagtttaaatggcttttatc

SEQ ID NO: 57326 - DNA, 1047 bp, Homo sapiens
gcgcagtggctcatgcctgtaatcccagaactttgggaggccgaggcgcctggatcacctgaggtcaggagttcgagaccagtctggcccacatggtgaaacccatgtctactaaaaatacaaaattagctgggcgtggtggcgcatgcctataatcccagctacttgggaggctgaggcaggagaattgcttgaacccgggaggtagaggttgcagtgagccgagattgcgccattgcactccagcctgggcaacaagagcaaaacttcatctcaaaggaaaaaaaaaaagaaataaataaattagaattttgaaggccatctttgcagaggagagccagagggaaactgtctgtgcctgctggttctcagcagtccctttgatgtggctgcgttgaaacggttcctttcctccggctgtggagtatgtctgggcacgtggagcatgcctgtctgtctctgcatcccgtccctccctcaggcctgtgcccgatgattatgttcagatgaatcctggctgcaggcctctgactggggtgtgctctgggtctcaattcaacccaggcaatggcagggagaagtcctggacatcattctgcactctgaccagttctcagttccaccccatccatgagtctttcagggcaacgtgacttgcaaaagcccacgcccaaggtctgtggtccagaatgcatctcaagggcccataaaagacattccccagaggatcagggaaggaagacacgtatgtgagggtggggaaggaggggaggggaaggaaggagagagaaagggagagacagatacagaaagacgaacacagaagcctgctgcggccgggctctgccgatggggggttgagtcctgtgctttgatctcctagctcaatgctgtttagcctggaaaaaagtctgcctgctaccacatttgcagaccacagcatgagttctcatgtctgttccatcattgtttcagcaaatatatactaagcacctactatgtgttatagatacgggggatacagcagtaaatggaacagaccaaatc

SEQ ID NO: 57327 - DNA, 1018 bp, Homo sapiens
gacagaagtcaggcgttttaaagcctgcctctgaagtgtgggtttgaaagagcactgatcttcaccgaagtacctgaaagtctgtggctctgaatttagtaaatccaatctttgtacacattccccctccctggtctgaggtgtagaatcccttttgttgcttcttggccaagccgagccttttctgtggggctgtcttccctgacagagtacatctgccatcctgactgtacaaggcgttttccctcagccctgtcttttacctcctctagatggacctttcactgcttgccctccctgtctacgggttggtggcacggggagggggcaggtaagaaggggcccctggggcaaacccagagaagtgtctgatgtgctgtgggagttgcaggtggggactaatgataaaccctgaaagaatgctgccagagctaggccagacactgacgtcacgcctgccattttggggagactcgggtaggtttcgcaactgaaattcgtgacacaaatatgacagcctgctgtcataggcatttattgtctgctggaaatggcctttgttgaggatgtgtgatctctatgttgtatccaattagaagcagaaggcaaagcctgctgttctcacaggctcatatagagtcggatgtgaaagccagcaagttaataccagcatcctgccggttcagtgcggggcgcaagccagccctcctcacagccccttggagcctggaagaagcgaccctctgctgttggaggatggcctgggacacggaggccccagcactcgccaggcttcatgtgcgtggggacccctgtgtgccatccagcgcccatgatggcagcaggaccagggagtgcctgggcacaacggggagctggcaccaactcaggcgagggtgccgggggccctgggtcactagagacccctgcccatcagagctccctgacgggtgacagggaggggctcccactgcctacaagggagcaaaaagggactctgggggagggtgggcggcag

SEQ ID NO: 57328 - DNA, 1059 bp, Homo sapiens
taaaaaaaaatatgcttatacttaaaatagtgaggtcttattcttgtggggctcacattggtctgctgtatgtaaacaggatgccattctcacctgtttatttggcaattaattaagggctcacggggaaactgtgctctctggtgttgaatccagaacagtaagagagttttgagtagaggagaatgatccctcagccctgaacagcattgctatgaatctcatgacggaagcccatgcttggtaacccagggtggaggtgaaactccaaaacagctgacttctgtagttatcatctttaagggcagactcagagggacttgggatcatttagctcagacccttattaaccatgaaaacaattacagctcaccccaacatacatggtagccatttggtgcaatgcattttggacttggccattaggaactgcaccttctctgggacgaccctaaggtacttacctgggggcagactgatgctaacttgtcatgcgtcctcctcaccactggcgacttgaagtgttttgccttttgcaaacactgaagctctgaaagttatagtggcaccttggtcaggttgttgcaatctagataaatttgggagttctttattatattaaagtctctttattaatacagattgaggggaaggggaagaggaagaaagaagcagcttggtttttctctgccataaacaaacatgttggtgctgttttccttcagacatgccctttgtgcagagctgcccttccctggggctgtgtgggcgttaactgtgcttagacagcgattgttccagctgcctgccctactgcttgggtttcacatgaacatttcatgcagtgcacctggtttgccaactgcagccagactttgtgcgaaattgtattttaccactttttaaaaggttatgagctgtcaaacctggaggccacttggttattcaggggtatgtttggactaagaccacccgggtttgttctttgctgaccaaggccctgttccctggcgttcgtggcaacccagcactccgctccagccaagctttctgtcagcc

SEQ ID NO: 57329 - DNA, 1040 bp, Homo sapiens
gtctcgatctcctgacctcgtgatctgcccgcctcggcctcccaaagtgctgggattacaggtgtgagacaccgcgcctggccagtctagggtcttatgtgaccagctgcagagtaagtacctctaagctatccatggtccctgccaggtctatagactctacagagagcaccgctctcatgggttcatgtgtacctgtctggtggccttgttccgtgtgtttagcctctgcccaaggcatggatgagttacatgcagttagtggtgagatcctcatgctgaagccagcctctgtgccccaagaagtcatgggctatgatccaagaatctgggaagtagaggtcttaccctcaggcttgggtggctctttgttgcattttgtgttattctgctatatgatcattctagtaattcagtccttttcaagttgaattcttttcaggttgttttattttccttttccggagacttttgtacatactgttgtcctgagtaacagtatctctaagctgagttactctgatcggagctactgaaaggtacctgctttcagcaaattctggtttggttttattttttaatcaaaaaaaaaaaaaggagagaaagaaaagaaagaccaccccctattagaagcaaaggccctgggaggagtaaggcctgtcactggggcaggggcactgtcctcaggggcggactttgctcagggatggcgcacagtgactgcgggggcttaagtccggtaaccctttggttttatttctttttattcttgatgggcaaaaagcctcctttaaaaaacattattcttaagaaacctgggagagaaaaaaatgccagtgagaggaagacaaagaaaaattagaggcagtacattccatatttcagaactttagctttccagacagtccaattttgttttgtttacaaattcatcttgcagtacaaggtgaagccaaatggtacaaagtccacagaattgaaaagccattcatatttatcattcaattttttgatcttcaaatgttatgaattctccaaaa

SEQ ID NO: 57330 - DNA, 1140 bp, Homo sapiens
tccagttcggaggagaactagctgctgccttgccttccgggacctcgtttgctgaggagggacttacagactccactggtgttttgctgttgctcattccatgcatctttggcagctcttttcttctgctcagacccttccccgtgctcagacagtgcaccgctgtcccatctaaagaaacctgtcaggaatacgagcttctgggtatgtttcgtttcccattgctgtagcatttcttatcccctgagagctgatgattattgaggacagaaggctcagaaacagtttgtgacagaaaatgcagtgtttcatttttcagggataaatgctaagataaaattgcttttccaggtcatttttttttgtggtaagaataactaatggaaaataatgaaacaccctggggtttgggggtgctaacaacttgtggctttaactgacaggagcaattaaaaagagcaagagggttctgcattggcatagcttagggaagggttaatgatgtcgccacaggtcagctcctgatccttgccgacttgatgttgctgtaccagggcttcctccccagaggtgcagcttgcgttttgagggtgattgctacatatgttgttgctaaacagctcagtaacacacttgaatgaatttggataccagattgtcctcattacagttcttttactcttagggcactctacactgggggttggggttgggagtggttagtacatttattacatttattaagaaacgtaatgacataaaaggttagctctgggccagacttctcttactctgtgggtaatggcaaggatgtgtaggtaaacttggttcttttttttccctaagatgacagcttgattttatcatctgcagtcaaataactgagccaatccaaatttaaatgatagatgctttaattgagtttaagtagctgaaactgctgagacactaaactttaaccttctgatgactttttaaaatgcctcaaatgtgcacatgtatataggatatttttataacttccctgatgaataatctgatattaaagtagtatttggacccagagccagaactcggtggtggaggctgctggtctctcctcaccaccttcttttgcacttggaaagaacagcaacatct

SEQ ID NO: 57331 - DNA, 1150 bp, Homo sapiens
atttggtggcagttctcttgtccagttctaagactttgatatccataatatttaaaataattttaagtacatgttttgccttgtggagagtttagcagtttattttcatagattgagatctttttgcaacgtgattctcaataactatagtgtgctaaaatcagtgggctttcaaagaaactttagtgaatcaatatgtctttatatttctatttaaatggaactcttattcctagtggttgtactgcattttcatacgctagtgaattctgttatcagtcgggccctttgtggaagatgccaaaactcatcagtggaaggactgctcattttttctacatgtctccaaattaaggaagcatcctgatgttgacagcatcctctgtgccctaggtttgggtattgcacagtgtgtgtatgacagggttgtgttgtttaattctcacaacagccctgcggggcagctgttgtagagttgggaccacaggattgtgagctgcagcagggctcccccagggcctgtctgggcccttctgtctcacagggcctccctgctctcagccatttggatggactctagtcaagttgtttcctgtgcctgctgttccaaattgttggtagggcagaaagtttcagaaaaaaaattccactttcatttacagaggagctgtacaaggtactttaacacagttactagttaagtaatcttacttgactaggtgtggtgtgaaattaatcatgctgtctcactggagcttgctttttcagctgtatatttcctgaagtgaccagcagtagctttcatctcctttccctcctcccgttgtgctcattgagaaaagaatgtgattattgtttaattaaatgacttgacttttatgggagattaaagcaggcaggctttgatctgtaacaccattgccaacaccttttttgaggatatgctaactaccagcagaaagctaagatccgcagattttaattaaagacttgagacacaaagcatgtaattattacgagacattttcaggggactggcaaagttgtgactgcatgcgaagtgcaggccaagaacagagcagcattagagcatcaggcacctaggcaggtgtaagatcatggccccgtcatttgcacgttctgccccttt

SEQ ID NO: 57332 - DNA, 1033 bp, Homo sapiens
atttctctcacgaattggagagcactcagtcccggctggacaatgtgatgaagaaacttgcaaaagtatctcatatgaccagtggtatgtatggcgtttaaagcttaagcatttgtacttaattctagaactctgtcttgggggtgttgtctcatagttatgcccatccagatccctttcttattttttacagatccctttctcttttttttgagacagagtctcactctttcacccaggctggagtgcagtggtgccatctcagctaactgcaacctccactgcctcctgggttcaagcgattctcatgccttgacctcctgagtagctgggattacaggtgcgtgccaccacacccagctaatttttgtatttttagtagagacatggtttcaccatgttggctaggctagtctcgaactcctgacctcaggtgatccgcccgtgtcagcttcccaaaatgctgagattataggcgtgagccaccgtgcctagctgatccctttcttatggcacattttttttttttgtgatgccttagaatcagagaatggaagacttgtatgtgcagtctttatcttctccttgtagctttaacttgggaaaagttaaggctttgtgatcccccaccgtgtttggtttttttcccagtagagtcactttcgttgtgtttttttttttttttttttttttttttgagatggagcctcactctgttgcccaggctggagtgcagtggcgtaatctcggctcactgcaagctctacctcccaggttcacgccattctcctgcctcagcctcccaagtagctgggactacaggcgcccgccaccatgcccagctaattttttgtatttttagtagagatggagtttcaccgtgttagccaggatggtctcgatctcctgacctcgtgatctgcccgcctcggcctcccaaagtgctgggattacaggcgtgagccaccgcgcccagcccagtagaataactttctttgcagttacaaaatccttctttattttactggttttt

SEQ ID NO: 57333 - DNA, 1047 bp, Homo sapiens
ctgatgttaggaatagtctatacctttcatgaatccaactcagaaataaaataagtgacctgttgtaccactatttggaagtattctttggtgtttaatggtaaatatactttatactaaaagcacatggttttttacatatattgtaaaaaagatgcaagcccttgaacacgtgcttttgtgtttgtaccccagggatgttctttattagtgatgtgactttgagaaagtatcatcgtctttttggacctaggtctcctcaaccttaaaatggaaatagtaccagcttcacagggtccttgtgaaaattcagtgataatgtgtgtatgtgtttagcactgtttctgacctgtggtaggtacctggtaaatgttaattcctttctctttcctcctattcaaattagtatccaggttacttctttttaagggaccatctttctttttattttattttctttatttttgagactgaaaataaagccaagaaatgcggtcttctttttaaaaagtaataataaattgtgtgttttgctaatgtatgaaatgttaactgtgattttgtttaaggatatttttcatttgttttcgtatcttctttctcattaggacatgaaagatcagatgtcaacttcatctgtgcaggcattagctgaaagaaaaaatagacaggtgagaaaacatcagaatataattatcaatgacagaaagcatacagttagatatttggaatttaaaaatgctgaccatccatggatcatgtaatcaagaggaagacttctgcttgcaggccctggtgtgaccatgggaggttttgtgacagtccaggcagcctgtcccagcaccctgtcaacatttccctcccctcctcttaccctctggtcttcttctctgggctccatagcaccttttgcctacccttactatagcacttatcacagagtacttttacttttttaatgtgtttattctgtacctattgaacacattttgtgtgccaggctctttgaagggctataattactgtctttctctctgctgggctcca

SEQ ID NO: 57334 - DNA, 1044 bp, Homo sapiens
tttaatattgctccaaaattttgattgactttatctttcaaacagtgtattctacttatgctttctcttttgtaggcaggggagtcagtgatactctatgcattttgtggttttttttttctttatttgcttcaacctgaagaagtaaatcgcctgtttcttcttgattaatgtccattggttatgcctttagtaagctttccttgtttagagttttgtgtatgtttttccaagcatcttttaagtctgtacaaatccagttttgctggcagtttttagtgaagaaccaaaatactcacatttttgtgtaaatagctttcatatttttgaggtaatcatttttactcttgtggagtcacctatacatcaaagattccacatgtgaaatttttgtgttttagaaatatatcctagaagtgactttggttttactttaggatcaagaggttttgcagtatatggcagaataatggtgaatataaggggtaagggaacctgagttctaggctaagctgtgaccttaataaatcttaaccatggtaagtcattcaacctccctggatctcagttttatctatgaaataatcctcactaacattctctgactttaaaagttagaactattaccctctccatgaaaaaaccgaacctgctccaatgtaagaattgtttacagtcaattgtaagtcaagatggaaatggctttggttaatcaaaaagggtgaagtatccagtgtgagcacagatgaccttgaaatgtaagaattatgagtgggaagcactggggtttatgatgtctcattcattcagcttggaagacagtgtgaaatgggaacagaagcataaataaccaggacatttgttgttcctttggcagatgaaccatattttattgggacttgttgcttgactgctggttctaaacgtcatgtgttagaaagaagatgagtaattatgtttttggcatgatagattgttataaaatgtttaaaactatttagtaacatagtttaagatcccgaattccaatatgaaggtgttgtg

SEQ ID NO: 57335 - DNA, 1085 bp, Homo sapiens
tctcttatttatgtttaaggagcacaaactagattatcttgaaagttctttccagatctgaaaattcagtgattggatttaagtagaggttgtgcaaggtaaggaggaggaggagtcaaaaatgactcttgtctagacaagtgttgaaacttggaaaatggtggcactattggctaaaatgaggaagctagaaagggaagcagatttttctattttgtttgttttgaatacattatgttttgtagggaggatatgattaatttggttttaggcaaatggaatgatcctataggcagctaaaaatataggaattaagcctggctgagtggttagggttggaagtatagtgggggagtcatcagcttaagaggggtgctttgaacttgtgaatgctgatgagcacatagaggccacaaagagtactgagaaacattgggatccagtggaggaagaggaaggagaaaactggtagaaaactagaacagcacaatgtcacagagacagagaaagtgagagtttcaagcaaatagatataatgggccatagtgtcaagtgcaccaaaaatgaggacaagttaaattcactcgtgactttgacctgcagtgtcattggtggagttgtggaagcagcagtaagttagggtcaaaaattgtatataattgtaggtaactgagtaaaaatgatgtttcattttcacaagagtaattacaaaatatgtcacagtgtggttgaatttggaaatggcaataaagtcaagtaaagggtgtgcatgtgtttcctttcaaatacaaacgatgtgaatgtagaagtcaagcaataaaaagagttcctctctttctggagagatgagtggtgaaaccaggtttgtggggtatggggcaggaaccagttggagaagagtgaggagtgggagtctgatgtgttgcagaggctcactcaacctgaatttttcatgtttcattactagaatggaaactttcagccttgactagcctcttttactgtattgatgaaatggggatccctctgtaaagacttgcagagtaggtgctgtcccagataaaagagttgtggcagattgtatt

SEQ ID NO: 57336 - DNA, 1019 bp, Homo sapiens
ctttgtagttcgcgttgacgggggtgagctccattgtccattgagtttggagcgcttgtccgcagactggcgagaccacaacaagcccagaggcgtctgagcacgtttgctgggagggaggcgggggcgggggccgttctgggaggctggggagcagggcaccggaagacaattcaatgggggagtttttactgagtaatgtgaggagaggaaagcagtcgttcatactcagtgatgatttggaaggaaaacaaaatgaaacaagccaaaccaaactttcctcagctttctattagcaaccggaattttctcacagtgctaaaggaaatgagtgttgcttgttaactccttgatttcatccaggttgtttgacaggtttctcctatttcttctgcctttcagaatagaaaggactgccttctgttcccttacaagctatcctagctcatctttgattgctcgattgtttctttggagatagagtcttcaactgcactttgtaatatccacttcgtagccattaaacacatgcaagaagatcaattctgatgtaacttttagtttcttattagaaacttgtcagttttctgttttaaatgtcaaacatgaaaaatctgaaaactgcaaagttcccaggtcagtactgatcaccacagaatgtcccttgctttttactagttgctgctagcttcctatttctgtagtggtgcaagctggccgttgtatagtcaagtgttgtagaaaatttaaatggtattttaggtgaaatactttatcgattatgcagtaaaatacatttatactacttcttaatatttccctggaaagttttttttcttcaccttactctaatttagatgggaaaatgctgagttgtaaatttactggtaatatgtgtatccctacctagaaaatgtgatatttattagaaggattgatttaggggttaatttttaaaatagatgttttttccttgattgaaagttcttaatgcttaggttggcaaaggttatctctgg

SEQ ID NO: 57337 - DNA, 1037 bp, Homo sapiens
cccggctcgaccccgctcaagaagccccgccggaacttagagcagccgccgagtggaggagaggacgacgacgcggaggagatggagaccgggaacgtggctaacctcatcagcatcttcggttccagtttctcgggactcctacggaaaagccccgggggcggcagagaggaagaggagggagaggagagcggtccggaagccgccgagcccgggcagatctgctgcgataagccggtgctgagagacatgaacccctggagcacagccatcgtggccttctgagcccttggcccccctgcggggaggaggtggagcagcgggcgtccccgaagtgagggccaggcccttcccggctgcgaggacgcccagagaccgcgggcgctgagcgcgttgggcagactggttgcctctgggcatcgcaaactgcccccgggcgcatctggcttatctggagacctgggagcttgaggctcattggaagaggacgatcgttaacttttgtgtttgtgtatgtctgtgtatgtaagtttgtcttgtggcattaagactattttgctcttctggaatgcaccactccttccccagggtttaagagattgggggcagacagggactttcctctgccggctgcgtggagaaggaagcggctaaaaggtttgggccggggagttccccattcgttctccggggagggagggactttacacctacccctcaccggaaagctagacccgcttcagggccaggagtggcgtttccgcacaggatttcctaagacgagagggatttagccaagagcacagacttggattccttctgtccctccccacctttctctcccaatgaagaaacgtttatatcctgtgattactctaggaaaggggcgtattaacggtcctttgcttccccgcaggggagaaaaagcttgacgaacttcacagaagagttcaagcttggaaataatggagtttatagagaaaagatatatttttaaaagctctaggtcagaagtactacacagtgcttttaaaaag

SEQ ID NO: 57338 - DNA, 1075 bp, Homo sapiens
tgactccacgaccaggcacattgggcctatgcccccgtggcccatttcagcatggagagaagcagaaacagagctgggccccgggttttcccaggagcctggagcagggccctcccctccctgtctccttgctcagcagtgtgcttggtgccagctggtgcccagcacaggactattgcatgaatgaaggaatgattgggtgcattccagaatgccatgcttctcaggaaggaggagaagggagtgctctcccttgttcttgggtgtctttcctaaggtcaggagaatttctaccatcatccaattcctagcgctctctccatgctcccctccttctcttctcccttccttggccccttttctagtctcttacctgggagatgaacatattattttacttttgctggctttgggatcccctagagaatgatccattcaacacttattcaccaaacacttatcgggtgccttctctgtgcttgccaagtgtgaggctctataggtagaaaaagaatgaggaaatgcacctgacccccaggagctcatgcacagggggcagcctgacaaggcaatgggttacaatggcatttgactggaggtgagtgcagtgagggacaccaggaagacttggatggatgggactcagggaaggcatcctggagaagatgagagctgagccgaggcctgagcacttgcatgaccctgggagtgagtgcccccttacactttgtgtccttagtcccagctctggtcctgaggatgggttggagttggtgggggaaaggggaagacagtgatggggaacagctgggaagtgccttccaggtaagggaagcagcttgtggcagaggcctgaagtgagccccatggttccttcatgtccacccctctggagggggcgccgtgtgtctgggacagctgctagttagtgcctgtacctcatcagtcacacccaagagccagaccattgtccccaccccccttgttaccagtactctttttggggagagaaggtagctcaaggtggcaagggactggctgttgtgggctctgacagcttctcagcctgtctacc

SEQ ID NO: 57339 - DNA, 1014 bp, Homo sapiens
gtgacttgactttgttgcacagcccttggggactcccaaggcggaccacatccattgtcttttttggtcttgtccagggcaagctgctgtgagtctcttggggaggcagactttttagaaggagtgggtggttcaaatcagagaatgttctaggggagactggagggagtctttagtttcaaactggaatctgaatccaggctgtcacctgctttgtagtgtttgctgatttctgtgacccatctgttggtaggtttcaagccaccagtgagataccacagagcaaacagctgggaagagaggcccagaagtgactctcaccaggctgtgtggtgctcccgcactccgccggcagtgtctctccctagttgtatgacctgaggcaagtgatttcaccaatgtaacctcactttcttcacctgtaaaatgggccaacaccacctctcccaggctgttcgtgtgaggattaaatgacttagtgttgtctcccacttaactacaattaattacatttaatccttagaatggccttacgcattctaattatttgattttatgtcagttttttccaatgaactgcgaactccttgaaggcagggactatgtcacatttatctttgtatccccagtgtctagtacagagcttggcacatagtaggtactcaataagtgtgtccctttcaaacccaaagctatagtcctgtgcgagtgaaacatgtggtccacccttcagcctgggccttctctgtgagcctggggagggtggacctgtggacccttgcacggatccttcccaaggagcctgcatggctggttgagatttcagcttttcaaagtccttcctgggaaccatgtgccgtctgagggctggctgttggaggatcaccctgagcacatcccctgggcacctggagccccctgccctggctgtatatctgtagaggacagtttaggggtggggtctgtatcacagacatgagcaggtccctggctcctcccagcttctcaaaattt

SEQ ID NO: 57340 - DNA, 1032 bp, Homo sapiens
cagtaagagaatgcacttttccagagcttcctttgcaagagaggatccatctcttcaaacaatctaccaccaggctcattcctaggtgggcctaagatccagaaactaccaatctattaacatttttatataaatactgctatggcatagcacttagccaaggaagccttcaataaatgtttgttgtttacattatcagagaaaggtcactactatgtcactggctaaagaaagtaggtagaaggctggggtgtgaggcctattaatcatagtattaatcataggtattaaaggtttgtgtatgagctgcctcactcctgcagtaaattccaaattacttagttcagaaatatcctcctcttcctgatgccaaatgcagggcctttggggtggtcatctgaaatgctatgtcctggaagctgctgagtttccaggttcttcccttctcttggaagaggatggttgggaatatacttagattatctgtgtcattaagtgattcactcctccaggaattgacaccattctttacaaaatcagcctgagataagctatgacatccccaaaattccttccaaatttggaattttatgctgtgaaccatcacacccaatattgaagttaagcagtttttggttaaatgtgctaccttagagggtaaaagagctcctccaacttatgactggttatttgtcatcaaggttcacagctgaattcagtgttggagaagttggaaaaagatgaacaagctgttttgttttgttttgagacagagtattgctctgtcgcccaggctgcagtgcagtgtcgtgatctcggctcactgtaatctctgcctcctgggttcaagggattctcctgccttagctttccaagtagctgggattacaggtatgcaccatcacactcagctaatttttgcatttttagtagagacggggttttaccatgttggccaggctggtcttgatctcctgacctcaggtgatctgctcacctcagcctcccaaaatgctgggattacaggtgtga

SEQ ID NO: 57341 - DNA, 1009 bp, Homo sapiens
ccagggagctctcctcgtaaaactattccccgtgaaggcggcagggcagaggtccagggcgggctttgctgggagcctcgggaccccgggttgggggccgtggggcggcacctggcgagctggcgggtgggcggcgagccgaggcttcccggcctggcggcaactcgcccctctgccctcagccctcccggctccgctcccttcccccacgccgccctgcccctcccccacgcccctttctctttctttctttctttcccagttcgcttgcccccaccccagcggcgcccgccgggctcctcgcccaatggccgcggggcccgggaccgcatcagctgatcggcccgggctcctggccgctgggagccaatcagggcaccgggggcggccccgggccgcggataaagggtgcggggctgctggcggctctgcagagtcgagagtgggagaagagcggagcgtgtgagcagtactgcggcctcctctcctctcctaacctcgctctcgcggcctagctttacccgcccgcctgctcggcgaccaggtaagcccccggacggcccggtgtcacgcaagcgaggcgcgccgcccctgctaccccgcgaggcgcgccgcccagcctcttttttcggctgcctgcccctccagtcccagccctacgctgcggcctctccggcccatgcctgagatccggcatgagtgctcctcccgcgtgcttccgccgctggtggcttggacccgtcggggctggcgctggtggggcgcgcccttggccaggctctgggaagggcggggtgagttgttttgatcttcttttcactacttgcggccgaagcgccgcccctggaggccgttgggccggcctgcgccctggggctcgcagtggtttgtttgcgctgtggatggagtggcggtgcggtcccctgtggagcgcaaacaaggcgcttggttggcgcgggcgcctggctgccttcctcgtggtggggccttcggagcaatcgtcctggtt

SEQ ID NO: 57342 - DNA, 1410 bp, Homo sapiens
actcctgggaggagtgaggtcaattcccagcttgaaagaacctaagcttggccaaaaagatgaggactctgaaatagctgttgctcctgaggggacatggagattggccgctgtagaccaaagcccccaggctgattctgaccctgtcagggtaggtctttcctggagagttttacagggtgctgcactttcaacccagtgggtgagactctccacccatatgtctggcctcctggtttggtggcatcagatttcagctccctccttgactggtggctagtgcaaagagttccttaggcgaccttcttcttggcctttcctcctggccacggcctaatccctggggtcatcactttgcctctcctggcctggactgacttttttatttgctgcgtgacatagcctcagacccaaagtcccagtttccagccaggctgtcagttctccctgtgtttaaagcattctccctttcctcaatttatctatattctgtccatacatttgaggcccagctcaaatctctcttcctccaagcagtctgccctaacaactgtgacttatatgtatcttttactcttcataaaactaagtggtatgggcgatatactgccttgaagaggtctgtatgcacacatctgtgccttccctccctaacaagcctacaaattccttgagattcctcccatcatcttgtttgctaatagcgtgcaccactccttccagggttacccaaataattagtaagcatctttggcttgatttatggcttttgtgcaggaccttggacggctggtcctctatgtggtaaagaagggaagcatctcatttgaggatctgaaagctcaaagtaatgaagaggtggttcaactttctccagatgaggaaactaaggacctcattcatcgtctcttccatcctggggaacatgtgagggactgtctgagtgacctgctgggtcatcccttcttttggacttgggagaggtaagtaaaactttgtgcagatgccacaggcctccaggatggaaagggtaaggtggtgcagacagaagtctgggctgcaaatcaggagacccaggcttttttcttagcttgggatttactggctgtgtgtccttggagagatgacttaacctctctggagtctgcttttcatttctgaagaataaggaggggaaaaaaagagatgcttgcctctcctatcatgcagaatttttgaagacatggttgtattacttttattaaaaaccaaaatctagccaggcgcggtggctcacgcctgtaatcccagcactttgggaggccgaggcgggtggatcatgaggtcaggagttccagaccagcctggtcagcatggtgaaaccccgtctctactaaaaatacaaaagttagccgagtgtggtggcaggtg

SEQ ID NO: 57343 - DNA, 1066 bp, Homo sapiens
cacgtgcatccagggctaggacagaatccaagaccacttgaagttttctagtatgcaccttgcctagaaactctttcatattggctatcaactgtaccaaactctggagttatgtgtagatgtaatctctatttatgaggaccttatttccttgggaaggtgtacaaaacaaatctttgagagtcaggggaattgaaataatttttggacagagacgagacaggcttagagatattgactgaggactaaagagtccctggctttgatttctggttgctgaattgtgctctagaaagcactactgcttaccctaagtccaactaagagtttgaggtgtcagcttcagcaatcaccaagcaagcctttctgtgaattttatgcagttttccatcagagttctggctagaatttgtactatgctttggtttgttgattttttttcttactctttttttttctttttgtcttttagtagaaacttctcagaagatgtgctggggtggagagagtcgttcgacctgctgctgagcagtaaaagtgagtaggagccttttgtgtctgtctctgggtggcacatgtgtactcatgtgctttggagccagccccaggactgctgagagcctgggcagaataatagtagtagtaataataataataatgatcccctagtgtgccagcctctattcaacatataaaggcaggtcattgttcaagaaaattatgttctaaaaatagagccattaattgcaattgctttcctttcttcttgtattccctgctgtccctccagctgacctatttcctcttctttcccgcaaccccagatggagtggctgccttccacgctttcctgaagacagagttcagtgaggagaacctggagttctggctggcctgtgaggagttcaagaagatccgatcagctaccaagctggcctccagggcacaccagatctttgaggagttcatttgcagtgaggcccctaaagaggttagagcccccatatgcccagtgaatcctcacgaccctgcctgctccttcccctctgagaatcagggctagagg

SEQ ID NO: 57344 - DNA, 4724 bp, Homo sapiens
gcaggtctggcgcgatgcccgcccggctcagcccatctccctagcaacgaaacccttccgcgccgcgaggttgctgagccccgccccctccattggcgcgccctcgccatcccccgccctggcacgcgctctgcgcatgcgtacgctcgctggccccgccccctagcgccgcggtcggagccatttcgccgattcctccatgcgagttgctgtgcgtttctctgttgtctcggtagaaggccagagtcacacacggtcctaagagctgggcaccaggaagcgaaggctggtaagggagagacgttccggctaccatgcggggcggcggggtcgcgggcgggcgccgtggaccatggctccgcagccggctttgttgcgaagcgcgggcggcggcggcggctgggggtgggggaagggacgagccgcccgcgggtccccggattgcgggttgcgtgcgcgcctcgccgcgatgcgcttgcgccgtccgggcagcctgtggccccctcccctctcctccgcccagcgtttcccgctgctgcctctagcaggcaaagcgcgcttcctcctctggcctgcgtacgccggggcaccgcggcggctgagggaagggggtgcttcgcctgtggtggttgccgccggggcgccactggcctagggctcttcattcattcaagccacgaataactggcgccgtcgtgcaggccttgtgggtagaggaaaaaaaattgaagaatgtaaagggagagcgcctttggctagtatagcgaggtaaggcgtctcgaaggagggaggctttgagctgataacctcggccaacgcgaaggaaaagcagagcctgcagaagcggaagggattagttatcgcttaagggcagaaactgggcgggagctgaaagcaggccatgtgactggagtgtggcgagaaggccttcaaaggagaatgggttttagggtggcaagagtggaaacaaaaaccgtgtaggacaatatttcactagcccgggtgtgcagtagtggtggcaggagagatggggagaaacgaatggataggggacgtattttgaagcagaaatgcgtagtggtggaaggtagtagatctggagtcaggctacgttttctggaattcttgcgcctttttttttttttttttttttgcaagagtctcgctctgtcgccagactggagtgcagtggcgcgatggcggctcacagcaacgtcggtctcccgggttcaagtgattctcctgcctcagcctccggagtagctgggactacaggcgcgcgccaccacgcccagctaatttttgtatttttagtagagacggggtttcatcatgttggccaggatggtctcgatctctcgacctcgtgatccgcctgccttggcctaccaaagtgctgggattacaggcgtgagcctccgcgcccgcccgaattcttgctcttataattaggagctctgtcttcctgaagcaagatattctttgtctcagtttccccttctctaaagggatagtgatcttacctgtacaaggttactaaggattaagtaaaatagttccatttagatgatctattatggatattgtttgacacacattaagggttctacaagggatagctatggagaatcttaagggagtggacgactctcaacttgtgccaggagtaacttggtggatgtcgtaccgtttatggaaaccgaaatgtaggggtagggtgttggaacagatttgaggggaaatttaaaattctgttttgactgagatgccaagttagcatgcaaatgggtgagttagtgccacagttggatgaacttaattttggactttaaagagaaacgacgggcgggcgcggtggctgacgcctgtaatccagcacttcgggaggttgaggcgggccgatcaagaggtcaggagatcaagaccatcctggccaacacggtgaaaccccgtgtctactaaaaatacaaaaaattagctgggcgtggtggcgggcgcctgttgtcccagctactcgggaggctgaggcaggagaatcgcttgaacctgggaggcggaggttgcagtgagccaagatctcgcccctgcactccagcctgagcgacagaacgagactccgtctcaaaaaaaaaaagagagaaaagactaaagtttaaatatatgtatttgggcatcgatagcatgtagttggtattgaacattatggggttgtaagagactagggagacaggagtttgatagtatagtccttcgtatttcatattactcattcaccatgagggcttgttgtttaattattcacgaggtggaatttccagataaacattttcagctttccacggcttttttgttaataggacattcccttcgccaaatggatgaccagagttagactgtggccactcagacgtaacaaatttatgctaggggtgcagtttgatgacgttagacttaggtgctaacaaaatgcatcaaacgtgaaacgtgaagcagacggtttaatgctggtaatgggatttcttctcacagcaaactaaattcatagcatattttattttctctggttataaatgtggtctcatatcttgcttacagtttagactcagcatttagactgataggctccatatcttgtggtattttatagacttgttgcacttcaagaaaactttaatatcctcaaattttaataaaaaggcctaaaggagagatttggtatagaacatttaagttaataggttaccgtcttcagtactgagtgcttaatgtatttgaactttattatattattaatacatggcctacaactttggggacaatatgctagtggtcataatcagaatgagaataaaacattgaatttatatgcaaatgataactttcttaatatatagtagtttggatttgaatttaggcctccacggtgggtgacttggaagttacttttttaaatcttagtttcttacttcctgaaaagacaatgatagtacccaccatatctgtgtgccattgttgtgaggatgaactgagttaaatatataaggtgcccgttgtagaatatagggccttatataaaatactttgtaagaaaagataaaaatcactcttagtccccaaagataaccattttagggggtatttctttccagtcttgatcatgtatatgtacttttcatgaagttcaaatcataccgttttgtatcctttttcttacaacatataaacgttccaattatgtcgttaaaatttatggggagtcttaatagcaacatgatagaatatcctatgtttaacccagattcagtaatctagataattggttcctcccagtttttgctattataaatgctgtttttaactgacttttgttttcttagatctgaagaagacacttgaatcatgggtgacgttaaaaattttctgtatgcctggtgtggcaaaaggaagatgaccccatcctatgaaattagagcagtggggaacaaaaacaggcagaaattcatgtgtgaggtactgaagaatacagtttgcatttatgtgatttatgaggttcattttggggttaaaagaaaaatgttttctgtttggagatgttaatgtgttgcacattaggaaacgacagttctttattgtgacttgactgctattgtaaatcattttcaagtcagcattacttttaaaacaatctgacaggtaaattattctaattagagcctatatcttcctcagcttcctcagtaccagtagtggggatgggaaaagttggatcaactgtttgcagttttataagcacgtttagaaagcagagcaattcttgattgcttcaaatcaaagtgcttaaatacaaatggagagcttgttcatggatattacagaatcagattttaatgtgaaccttctgttatatgagaaaaaaaaatctgagccacttaaattatttttggatacaacacaatttaagctttttcagtagctcatgcattctcttatttttatatttatatttatagagtatatttcctaaagttagctgtttgttgtctcttaatggactactgaattacgactttttaaaatctcagaattacccaggtcagtctcttagtacttttttttttttttaaaggttcaggtggaaggttataattacactggcatgggaaattccaccaataaaaaagatgcacaaagcaatgctgccagagactttgttaactatttggttcgaataaatgaaataaagagtgaagaagttccagcttttggggtaagtacctatggcgaagcacttgagatgtatgttgtaaagttgtacaaactcaatatgcgtaagagactcaagatagtaatttttcactgttttcagatatatcgtgtttcgtaatgaaatttggcatcttgttttgtctcagcactggacaaaatttctgaagatgtggattgcatccttattatatacctgtcttaggggcttgagaaattccattaatctttgtgtcttatggctttatttcatgtatttatacaccagaaatttcagagtctgttatgttccattcattaccaatgataatactttaaataaaatagaaaaatcagtaatattttagacatgtttgctcccattgacactccccctgccccgtaagcgatgaggtcttgctctgttacccaagctagaatgcagtgacacaaccatagctcactgcagcctcaaactcttg

SEQ ID NO: 57345 - DNA, 1030 bp, Homo sapiens
aatacgtagtactaatgatcttataagagaaaaatatctattccgtgatcatcttaataaaggcttttgaaaaagtatttgataaaattaaacactaatgaccaataaaatacttaagaaatggagtagaaagatacttttttgactgctttaaaaggtgttaaggtagtaaacactactaaaaatgagccccagagcagtgttactcaaaatgttacagtttgtgaggaggtaagtacagaaatgagtaaacatttagaaatacagtattgtgacaggttgttcccagtggattaggggaaacaaccagttcttcattgcagacattttgagatgcactgctctagagacttaacctctaaacaaagatggtaatattacaaagaaaggaggtatgacacatgggtccttttaagtattaaaagaatttactagtccccgtgaaggcaaaagcactgacagctgccttgactttttcttttgcaggtagcatctccgcccccacttactgatactcctgacactacagcaaatgctgaaggagatttaccaacaaccatgggaggacctcttcctccacatctggctctcaaagcaggtaagggacttgaatccatgcacgtggtggagaataagatatacacaatcttgatcaccatctctgtttctcgttttgggtagaaagaactgcagtaaactcttgatgttaagagacaacccaaggccttcataaatttgcacatattaccagatcatttatttttttcttagaacatgtggtacagcatagttctttgctgtcattggcttttactacatttttctctgaataaataggttttccacaggctagaatatttggtgaaagaatcttatgaattgccttttcttgttccttattcttactaaatatattgttgacttgtttgtttaccctgtggatccaggccattgcagaatgacttacagtaggtccttgaataactttgtttccttcaatgttattatcttacaacattgcttatagtct

SEQ ID NO: 57346 - DNA, 4071 bp, Homo sapiens
acagcttttattgggatgtctaccatatggtagattaggatttgggtcatattgcttaagtctcatatttactgtttattgaatagcagtagtatctacttcatatgattgctttttgaggcagagtcttgctctgtcacccagactggagtgcagtggtgcaatcttggctcactgcaacctccacctcccaggttcaagtgattctctcacctcagcctctctagtagctgggattacaggcatatgccaccatgcccggctaatttttgtatttttagtagagacggggtttcactatgttgaccaggctggtctcaaactcctgaccacacgtgatacccacctcagcgtccggaagtgctgggattacagatgtgagcctccatgcccggccataaattaggataattctttaatgtatttaggatttttctacagttatgactcattaagagaattttttttcttttaacagaaaataattctgaggtaggggcctctggctatggtgttcctgggcccacctgggaccgaggagccaacttgaaggattactactcaagaaaggaagaacaagaagtgcaagcggtaaggccagcaccgtaggttacatctctgagaatgtgatttgggacttagttaacagcaaagcttaggattaggatattcacaagttaataattgggtgcatcttttaagaggttatttgagactacttattagcacaagtcatcataaagctaaactacccatttactcttgttattcacattgcctatggaggaaaaaaacagtatttttttcttggtagtaataaaaagatctcctcttcagctttataggaaatgtaattatctcaggggaccttattttatgagcacttagagtaaaaaaaagtctttagtatagcttatttttccacttcatgtattcagtgttaaaacaagcacaaagaagttgtcattttttttttttggaagaatttaaatgcaatgtattaactaatagcttgtttatataatagggcctttagatgcaataaaaagtaattctggttcagtttttgactaggattataaactatcaaaaacagcttttgcattataaaggatagtacaaagacagtattaaaaatttctgtgccttgtttgtatacctaaacttaacacagccaaatttaattatcattgattctacagactctagaatcagaagaagtggatttaaatgctgggcttcatggaaactggaccttggaaaatgctaaagctcgtctaaaccaatattttcagaaagaaaagatccaaggagaatataagtacacccaagtgggtcctgatcacaacaggtttgcttgtttcattcttttccttctgtagtaagttaaggtggttttggatattcactgttgaatataatctatttttgtacgttgtctggttaattgtgtggattagaattgaattgttaaaagataacgttaatttgcacaagaataattattgatttgtgcagtttccatggttttcacatgagtgaattttagctgtgtaagaagttcagcgtaaatctttttgacatgctagacatttaagatgctcatttgaatctgaaaggcaaaagtcatgaccacaattgctggtttgtccctagttgatgtaaaagccagccaaaggtggtgattttttttttcaccttggtattgttagaggcagttactatttctttaatgggtcaggttagatacttaagctttgagtcccagaattagattgtattgcatctacatccacatttcacttaagccttgaaaactgccagctttcctaggagtcctagtgaaatttaagggcttatcgtaaggtcgaaaaggaacagccttggtctttgtatgtgggggtgtacttttttcctgttaaatgtataaaacaatataaagggaggtcattttaacagtatgtttctcagcctgcttgctgttcttcctgagagcattccagggtgtagtaattattactcccaggaaggctcatatggattagacttttctggggagcgatgtatttttattagaacggaggggaggttgtaatggaaacctttttgaatgattccgtttgctgtccgtacttatgaaataaattatccaaatacattaaaaatatttttctcgaaaatcaaagtgttctccattggatgcatctagcgaccctgaaataattaatattaatacaaaattttgtcactgatcaaaatgatatttagagcatggttcccccttcctcccactgttttgttcaatcctgaattctcagatatttctggtgtcagcctttttaaaaccgtcaggttgcaaaggagtgatacatttgttgatgatttgttttctttcatattttgtctttctgaacgcattgggcttggtagcacttggtgactttaagaacaatgagataccgaagtgtgcctgaagctcatcgttgcagacattttttgttatcagtatcttatcatagatttctgatacaaagcagtgaagaattcaggaaaagacaatgtgggaggcacagacagttgggggagccaggacagcattgctctttgtatgtccttttatttaaaggcataacagacagcaacaccagaggtctgtgttcatacacacatgtgctgctgcttaggctgaactaagcaatcacatgggaaactattgtaaactgatttctggtgtcgctgttccccctaggtggaggagaatgagattgagtgctgactttaagcctggctgagaaacatactggcatcgatgtcattaatgaaagggtggatgttgttcccctgaaagccagtggcctttgacccctgaagccgctgtgcctgaaggtcagttcacacgaggtataggaaggagtctaacatttatttttttcttaagcctcacctagccttttattcacaccaccaagtctaggttagaatgtatctgagcagtgaaaggaccagaatgcatagttatcaaagggcagtttttcccttgctaaaacctaaattcattttttagactctgctagcagttttagatataatgttacaacatgtgttttgttctccaggacctgatttaaataaatgtgataaaaataggctaagttttttgtcatccagggctgcttccaactgcaggcagatgtgagaactctgcctcaggagccactgatatgcacaaagtgtatgtgcatgtgtgagtttgcgtatattagcttaatagatcgcagtcattaatgggtggcctatgcaaaggaatcttaaaataattataaccgtaatgtaaaacatttggggcctactttatttcttggctccaagctaagtggaaaattccttttcattgaatgtgttctagctcttgagactccagcctttggaataagagtaagtaaatataaaatctaataccctaacgttttcctttcatgaacaattggctcatcaactttgattatagttgtcttatgccatgttgtatattatttgaagtttatatacttcatttgttctagggttgggcagaaataaatgttggtaattttttttttctgtgatttgcctaagcagttggaaagcctgcctgacttgggagacctggatttgctggtttctaacagtgaaatttctaaccttgcttgtatatgttgttacaggagctttattgcagaaatgaccatttatatcaagcagctgggcagaagtaagtgttactgtttccccaatattccaagtctctgtatagagaaggaatcttcacattttaagtcttgagtcacgtatacagaagctgtattatttgaaagagcacataatgtaagatagcatctagggtatattttagaatattagtaattatataaattagaggcaaagtctcccagtttgcatgtgaaaacagaccatgttagtgtaatctttcaaaggtaagacacagtgggatgattaggagtctgccagtgtcaattaattttaaaccttttttgttttttgagacggagtcttgctctgtcgcccaggctg

SEQ ID NO: 57347 - DNA, 3049 bp, Homo sapiens
actgctttcacacattaaaggcagagttgagtagttgtgacaagatactatatggcctgcaaagcctaaaatatttattaattgaccgtttatagaaaaagtttcccaaatcctggtctaggtaaccactctggacccaattacttttactggtttattttttactctttgtcttttcaaactatgttttcttccccattttaatgtctgatattaacagtgacaactttgttgaaataggttatttgctttcataatattgatttgtatgagtcctagtatcagccagtaatcaaaactgttggttatttagttgataagctgtttggcaatttcttttgtttagcagatattaatagaataaaaaggaactagaagccatggcataccctgtattttagggcttcttgtgtacgtaagcccatagtttcttgtgataagatgtttctttactcagatgatttctttctgtctgataatcctgaccttacattatagggatttttgcacgagaacatggatcaaataagaaattggcagcacagtcctgtgccctgtcacttgtcagacaactgtaccatcttggagtggttgaagcttactccggacttacaaagaagaaggaaggagagacagtgagtctttagatttaatagacttgtgagatagtgtgagattcaatttagctcttgtttagtgtttggctgaagaagtttaattttaagaatcttacctcaggaaatgaaaatggccctgctaatcatctctgtgtctggcatgatgttcataataggcagtgagtaaataatcattgaagtaattctctcacaaaagggaactgactattggtttaggaatattgtagacctagtgttgactgtatagtcttagccccattatagtagatttgagtagtgttgttaatgtgtgatcctttttccataggtggagccttacaaagtaaacctctctcaagatttagagcatcagctgcaaaacatcattcaagagctaaatcttgagattttgcccccggtaagcataaagctgtttagttcacatttacgtagaactctccgtagacaagcaaatcatattttttgtttgtttttcttattttttaatagcctgaagatccttctgtgccagttgcactcaacattggcaaattggctcagttcgaaccatctcagcgacaaaaccaagtgggtgtggttccttggtcacctccacaatccaactggaatccttggactagtagcaacattgatgaggggcctctggcttttgtgagtgcaatattgtttttgagatcagagtcttgtgttttactcttgagactatatttgattagtatgtctaggtaaaaaatggatttattttgaagctgaattatgtgcttttgtttgactatgttggctttttgttttacaggctactccagagcaaataagcatggacctcaagaatgaattgatgtaccagttggaacaggatcatgatttgcaagcagtaagtctgaattatttagacaagtagtgctcagagcttcagaatgttctaggtatgggtaaaaagtcaatgagcagtacattttgcccttttaaggagggcatatcaaaagatatgtaccaaactgctaatcctagttacccctgaagttagttgctatgagttgagggcctgtgagagaatttcacttcttaatgtaatttaataaaagtggagagatttaaggcagtgactccttttgttgttggtttttttgtttgttttagtgttttccaaataaaaaattaaaatgttaaaaagaatgcgtgtgcgactttcagggacaatgagaatttagtttttggacaacatcaaaagatacattcttcagaagtgtagtgaaaagaagtagttctattagagatataaatatacacattcttttttgaaaaaaacattttcatcactaagccaatggaaatgagtaagtttttatagagatggaagtttggtttttttgtttgtttttttcttgagacaaagtctcgcttagttgcccaggctggagtacagtggctcagtctcggctcactgcaccctccgcctccttggttcaagcaattctcctgcctcagcgtcccaagtaggtgggattacaggcacaccccaccacacctggctaatttttgtatttttagtagagatggggtttcaccatgttggctaggctggtctcgaactcctcacctcatgatcctcagcctcccaaagtgctgggattacaggcgtgagccaccgcgcccagtctatagagatggaagttttttaaaggatcaagacagttgcttctaatgtgttggtagacatttgactgaagtgtgacttttctaatgcagatcttgcaggagagagagttactgcctgtgaagaaatttgaaagtgagattctggaagcaatcagccaaaattcagttgtcattattagaggggctactggatgtgggaaaaccacacaggttccccagttcattctagatgactttatccagaatgaccgagcagcagagtgtaacatcgtagtaactcaggtaagtggtaaaccaaccatgaaatacctagagagcagactatttctgattctttctttgattaactaatttttgtaattatttaagattgagagagcattgtgcccttgaaattaaatttaaaaaaagaaaacataaaaacaacgtagtctttttctaatctctagtatgctacactaataagctaaactggactatgtgagggattctttttatctgggctaaagagtctctgggcctagaatcagactgtcgagattaagaattctttgtcctaaagttcatccaaatcttggtcatctctatctaaccaccttgatattgagtaaaaaccagtcagacaggtaatggttaactttcactgtatgccatgttctattctaagcagtagctttttagaaaaaactcaatcgaagttcataatgaccctaagatgtaagtactatttcacatagtatttctctttcagt

SEQ ID NO: 57348 - DNA, 1028 bp, Homo sapiens
tgtggctacagcgttcgatttgagtctatacttcctcgtcctcatgccagtataatgttttgtactgtaggtcagtaatgtattttgatttttcatttggggtttatattgtggttgtgaagaaaacttgatagcagaacagaatgactggaaagaaataatgagccagtctcagatttcttgtttaaataaaacttttggcagttttttccttcatggaaagtatgatatacccattagatcttgtagcttagagaaaatgaaatcataaaatcagtgaaaaaaactatatttcatagtacactatcactttttaatagtttaaatgtacatgtgattattttctaaaatgatgctggggtctcttagttgaaatatagataattgtccatagatttactactttgaacttttctatagtttattgattgtttttcttttcaaggtgtgctcctgagaaaattagaagcaggcattcgaggaatcagtcatgtaattgtagatgaaatacatgaaagagatattaatgtaagtaacttgagaggtacagtaaggtacttaattctgctatttctaagagaaatcagtagaatgtctttgttttccctttcccccgtttttatcattatcaaaaccatgaacttcagtcactaagatgttgaaaatctttttttagtgagattattcaatcttttttttctttattgttaaactttacagaaagccttttggaggtgaagacctatgttgtaaagtataactgcagtaatcagtattagctggcataattcagcaattgaactaatggtttatgactaaatagctgatggaatttttatgattcgtttttctttgatttggaagtttatgatagattttataatcgttttttgttttgtttttttgagacagagtcttgctctgtcacccaggctggagtgcagtggcgcgatctcagctcacagcaacctccgcctcccgctttcaagcaattctcctgcctcagcctcctgagtagctgggactgc

SEQ ID NO: 57349 - DNA, 1132 bp, Homo sapiens
gaggccaggagtttgagaccagcctggccaacatggctcggctcactgcagcctctccttcctgggttcaagtgattatcctgcctcagtctcctgagtacctgggattacaggcatgtgccaccacactgggctaattttgtatttttagtcgagacaggatttctccatgttggtcaggctggtctcgaactcccgacctcagattatctgcccgccttgacctccaaaaatactgggattacaggtgtgagccactgggcctggccaatagcactcatttctaatcacaactattaggctacaactgttctcaaaaattgttattgttatcttaaaaattgataaaagatccattgtggtcctttatcttggcacttctgtgagtcatctaagaaactgaatttaattgatgtcttatggctgtataactcttttaggcatagcttgttatataaacttaatgtaatttcaaaaattttgtgtttgttttttaatagactgacttccttttggtagtactgcgtgatgttgttcaggcttatcctgaagttcgcattgttcttatgtctgctactattgataccagcatgttttgtgaatatttcttcaattgccccatcattgaagtttatgggaggacttacccagttcaaggtaatattgtgggggtggtataggaacatcttttgtgcaatagggtttgtattttcttaatcctggagattggagttacaatttaaagaatacttaaaatacaggacaaattatagtatcaaatgtatcatagcatttttgaggagtttctcttctgttattttatacagtagtgagtacagtctgagaagtgagaccaggtttcatttactacttgagtagtttgcatatgcagtaagtttccaggcctttacttataaagccaaacttttaaaaattataaagtatagtcaaagggaaatcactgtggtgtataggtaattatgggaattactgttaaaagtttaagcagccaggatcaaattaagaatcctttttagagcctgagcaactagattttgaattaagattaaaggaagtgtatcaaggttatgtatttctgataagtgagagttctttagtatctttttgtttt

SEQ ID NO: 57350 - DNA, 1192 bp, Homo sapiens
aaatttggcaggcactaccacaggtgatcaagttttaacatcatgaggagtaagtcatattgataggatatgcccttaatatgatgtgatgagactggcactttgggagtttttggatatagagggtgttttgattataaagacattctggggccatctgagaatcttgggcataattgatcaacagatcttccagtccttgcattgagatccttcttcagattgaccagaagccattttgtgtgtgcatactgatagaggaaggatggactgtggtatattgtattgaagttacttctttccatgtataactcccacacaatggaagtgtatagataaatgtttgattgaatgttatacacagaggataccccaactggctctgggaacatgtataaaagacacctcaccctccttcaaggtctaagagagggaaacactgagtttgattaggaaaataaggttattgctactggaactttttggcatttgtgaagaatcagactagaggggtattaaagtagttttgaactatgaattagcaaatgaatttaggtctgctccattgtgaaagttgatagtacttaacctgactggattgtccctggcagaatattttctggaagactgcattcagatgacccactttgttcctccaccaaaagacaaaaagaagaaggataaggatgatgatggtggtgaggatgatgatgtaagtgaatttcatgaagaatttccattatgggcaaattgtcaatgcagagaaaaaaatgagttaatgtaacatgcaatgtattagcattacagcaaactttcttaaaaactgactgtaatgtctgcctttggattaattgatgtattttactgcaaaaaaattccaggttcagtgacaagctgttttctatcacaagttaaattatctctggcgtaaagatcaaaggaaaaagaagaaagaatgcgatgtttaaaggccaggcatggttagggacaatgctgttgtataaggttttgctactcaaagtttttcagtaggctgcagcatctgggaaactggtagaaagacagaatgctgtgccccaccctagatctactgagtcagaatctacagtttaacaagatcctcaggtgatctgtatatacaataaagtttaagaaacagcagctatagctttagctacaggagaccggtgat

SEQ ID NO: 57351 - DNA, 1124 bp, Homo sapiens
tcagaaggctccatgagagttttgagtcaaatttaagtttgtgtttgaattttagtcctatcctgtgagaaatactaattagtggaaaagttcagtatattgatgtaagctctacatttttggaaattaaatttcttctgtattctatagtgtgtgactagtcaactagaataaataatgacattacaagtaattagagtcactagaagaaatctagaagacttacctcatgagtaactgagacaatccaaaaatatgtctccctgttttttacaggcaaattgcaacttgatctgtggtgatgaatatggtccagaaacaaggttgagcatgtctcaattgaacgaaaaggaaactccttttgaactcatcgaggctctacttaagtacattgaaacccttaatgttcctggagctgtgttggtttttttgcctggctggaatctgatttatactatgcagaagcatttggaaatgaatccacattttggtatgagtctttgaattctcacatatttgagagtgaaaatgaatgtttttgctagtgccttagccagtatgtgaaaacaaaattttgtattgtttctactttcgaataaaaatatgtataatggagagctgtttgaaaccagctcctgtttttagtccctgattgttctttattgttatataggaagccatcggtatcagattctacccctgcattctcagattcctcgagaggaacagcgcaaagtgtttgatccagtaccagttggagtaaccaaggtaaatattaaacattagagtgatgggattggaagtgacgtagatactaaacaaatgttacaggctttcaaagagctacccaaaaaattgtaacccatctaaattgaggaagaaaaaaggagtcttctctttctgagcttagtagattgttgttcattaatcagttattgggtgatctttttaggacttctgtaattttcttgtcatttgttacatacataagcaaatcagtccttttaagtaactaataagaatattttctggagtgtaatttttctttcttcacaggttattttgtccacaaatattgctgaaacaagcattaccataaacgatgttgtttatgtcattgactc

SEQ ID NO: 57352 - DNA, 4735 bp, Homo sapiens
ggttatatctggccaacttgtaccccatgacttctctttataattccttagtctgtcctgacaatgaaaacaatttgctgccaacatccattttaggaaatgatgaatagcattctgtgccaatcccagtcatttagtggcagctgtctctgtatgtaacattgaaggaatctgaggttacttgggggttcaaatggaccacacaggcatcactagatacagatatcctaaaagttacactaaactttggaatagagatgacttaaataattactttcttttgtgtatgtgccatattccatttaaatgctttgcatttgttaatttatttaatgtttaccaaaaaaactataaggtagataatggcatgcaaagtttggccaaggcagttcagctgataagtggcaagtggatgttacattgccttttagtaggttgacaactaggagtttgcagtcagattgctgattcttacttgtgccattcatgaatagacatcacaagtaggtatggctttaactacatagtggaaagcattcactacttagtggatatataatagttattgataatacacatgagtcttagaattaaccactttttcctatgtaggcagaaagtgaaactcttcactgctcacaacaatatgaccaactatgctaccgtatgggcatcaaaaacaaaccttgagcaacggaaagggcgagctggccgagtacggcctggattctgctttcacctgtgcagccgagctcgttttgagaggtaagacccattcttgacctttagtaagggatttttgttctgttctctgtagggacagatgtgtgcagttatgtaaacctgccaatataagctgatctaagtcttgccagccatgttggaatcaggtgtaaatgtttcgtaagaatcttcatcacaaatcatttagagaataagccagatttagaaatatagagacctagattttaatattatttgtgcctaatacattgtataacactaagtggttactccttaggcctgcatttccctcattctataaaatattaagttacttaacctctcttgtttcctcagttgtaaaaagaatataaataatgcctaacccatagggttggtataagtattaaatgatttaataatgtaaaatactttgaacagtgtatggcacatcatgatctcccaataagtgtttgctgttgttaatttatacaggtcagatatctcttttaaaactgaaatgcttgggaccagaagtggttttggattttttttcttggtaatatttgcattgtatttaccagtcgggcatccctaatctgaaaatatgaaatccaaaacgctctaatgagcatttcctttaagtgtcatgtcagaagtcaaaaagttttggattttaaagatacatctataagagcctttctagtggcactaaaattacatgaactaggaaggtgggaggttgtagagaaatgttagtatgagttatcatcctacaaaaagtcttgttgtcgtttttaacccatgtttgtcaacaggcaaggcctgaagagaccatgggtggagctaataacattcgcgattttggataattttttcatttttcttctcagcctaaaaggctatcaagctgtgaggataagtcagaaaccactatgcaaccagattaaattttgtcaacagtgtgtatagtgaacgataaaaggtccgatggtaattgtaaaataaaaggatgaggaaaaggcagctctgtatccctgattaccttgctgcaaaaagtttattaacatctgtgtatacacaaggaggatggttattttatgcttattttctcttagacttgaaacccacatgacaccagagatgttccgaacaccattgcatgaaattgctcttagcataaaacttctgcgtctaggaggaattggccaatttctggccaaagcaattgaacctccccctttggatgctgtgattgaagcagaacacactcttagaggtacttacaaatacaaacctacttgacgcagatattaatcataccatctgtcttgttctggcagataacacttacaaatgaatcaagatgatgaagatgtagtcaacagggctgtgataataatagtaaggcctccagtcttaccttagatagttagtatagtcactgttctaatgagcaatgagaaggaagaaagggacaatgtgagtctttaaaaaagaaaagaaaacttaaaaaggcatctcttaactatgtactaaagatcagaacataacttactcatgatacccacagtatttcatatgaatctcttacaactttttttgtttttttgagacggaatctcgctccattgcccaggctggagtgcagtggcgtgatctcagctcactgcaacccccacctcccaggttcaagccattcttctgcctcagcctcccgagtagctgagactacaggcatacaccaccacacccggctaatttttatattttactaagacagggtttcaccatgttggccaggctcttctgaaactcccgacctcaagtgatccactcacctcagcctcccaaagtgctgggattacaggcaggagccactgtgtccagcctggaacatttattttttcttgctaaacttgttagaggtacagtgaaaattaagggcattggagctagatctgaatttgaattttgaatctagcatttatctactatgtaacttcagaattttctctagattttattttttttaaaacattaacagctgggtatcagacttcttatggcatgtagaaacttacgctgctattatagttaatactgtatttatagacttcatatgaattgtatttgtttttataacctacaggatttagttgtagtacctttatgttgggtgctccagattttgattttgttctatttttgagtacagagaattgttggccgtagacatggtattagcgattggcttgacaaaagaggaactctaaactgtcttaaccttaatttagagtaatgttttgtctgcctaaaattagtgttcatttgtttctgctcacaaagaactatctccccacagagcttgatgcattagatgccaatgatgagttgactcctttgggacgaatcctggctaaactccccattgagcctcgttttggcaaaatgatgataatggggtgtattttctagtaagtgctttgttttatttctcttcgttaagtggcagaataatttcagaatcttctcctccctgtaaaagcagtattggctcagatagacaaaaaaaaaatcctaaatgttcttcagggaagtaacatacctagatattgagagcagtgtaacactaaaaaaatgaacagttccagtaggtggatatctgggcccaatatggggaaaagggcactgatttctcaaaagttaaaagcaagcaggccaggcaatgtggctcacaccttgaatcctagcactttgggaggccagggtgggagggtcccttgttattaatagttggtcttgaaagagcggtgtcaggaaaagaggtttattttatcagaaaatgttgaagattaagagatttggtatgatggggaagagagaatataaaaggaaaaatatacttggtcataatttatgataaatatgtggccattagagcatcagagcatttttttctttctgattctgaagagagcagctataaagttctttgttaagccagtttcattgcaaataaaagtagaatcatagccataaagactgcaacccacagtcgacagtcctacctgagctgctggcaacaacattgtgatctagtctggatttaactgtctttgtgtatttcagcgtgggagatgctatctgtaccattgctgctgctacctgctttccagagcctttcatcaatgaaggaaagcggctgggctatatccatcgaaattttgctggaaacagattttctgatcacgtagcccttttatcagtattccaagcctgggatgatgctaggtatgagtaagatttgggtgagctgtctgtagtttctcatttgtatttagttctctggtcttagagaatgatttctcatgccaatttattttagaatgggtggagaagaagcagagatacgtttttgtgagcacaaaagacttaatatggctacactaagaatgacttgggaagccaaagttcagctcaaagagattttgattaattctgggtttccagaaggtaagacttcttccattcttaagatatctttaaagtgacatttatatagtacatgcaaattgacagcaaagtgtattttagtttcaaattttagaccctatgatttttatatattcccgactatttcttagttctcgtgaacactggtctagttcccagaatgagtactttgctgataaccttatagtggtttgcaaagtaatttattagcatttagacttgaagtaaattctaccacattaaattttaaatgactttaatttatactttcggtgtacagatgattaaaggactttatgacatctaacatagaaaaaaaccaacccatgtttcttgatgagctgtagtacttttcttttccaactaggttaaaatatagaattacttcctaaaacattgagaactggaatgcataaccagaaataagactgttgagagacagaaggtagttgggcaagatggtaaatttttaaaggctgtaattggaataactaaa

SEQ ID NO: 57353 - DNA, 1426 bp, Homo sapiens
agaccatcctggctaacacggtgaaacccgtctctactaaaactacaaaaaattagccgggcgtggtggcgggtgcctgtagtcccagctacttgggaggctgaggcaggagaatggcatgaacccgggaggcagagcttgcagtgagcagagatggcgccactgcactccagcctgggcgacagagcgagactcgtctcaaaaaaaaaaaaaaaaagtaatcaccccaagcttatttatggttgagtctataagagaatagagacgttttcgttttcttattgtggaaactcagtaacattactccttgaacttaatctgggtgtaaggattctgagaagagaaagttttacagacaggttatgtgaaaagagtgaggaagagtcagttctctgaattatcttaaatagtttgcatgtaatgtgaagatcagccagttatctgatttttgttttcactgtgctcctcttaacagattgtttgttgacacaagtgtttactaacactggaccagataataatttggatgttgttatctccctcctggcctttggtgtgtaccccaatgtatgctatcataaggaaaagaggaagattctcaccactgaagggcgtaatgcacttatccacaaatcatctgttaattgtccttttagtagccaagacatgaagtacccatctcccttctttgtatttggtgaaaaggtaagaaaagactagaaaagtttacattgaaagttgaaattgtctttacaatcattaggaacatgaattttgattttcaaagcacagtatatagcggtatttggaagttggaatgtcaaccattttgtattgtctctttctccatttgcagattcgaactcgagccatctctgctaaaggcatgactttagtcacccccctgcagttgcttctctttgcctccaagaaagtccaatctgatgggcagattgtgcttgtagatgactggtatggattttcagatgtgaactccaaactgaattcttagaattacaatatgatggaattcagctgctaatctaacttaattatatactaattatatctaacttaattatatactatatacttaatcttaaattgataccagtagaagcaaatgcattaggaatttgagccatgtctaccactaggcacaccaccactatggaatcagaatctaagtgaagcttgagtaccctttcacatactctgtatattgattcaaaactagtggtaagcactgggcaaaaatggaatagagcttaatggacagccagtaggctcagccatcatattcttgaaaacctagaaaatgccagtattctgggtctcttaaattcattattttaaagtctggatgatctggctgggtgcggcacatcacttgggctcaggaagttcaagatcagcctggacaaca

SEQ ID NO: 57354 - DNA, 1504 bp, Homo sapiens
gcaggagaatcacttgaacctgggagttggaggttgcaatgagctatcacgccactgcactccagcgagggcaacagagcaagactctgtctcaaaaaaaaagaaagtctgaatgatccatattgctggactttgttttttgtttattatatattgcatatatttttattatattttatttggcttgatagactttttggcttaagactcctgctcatagctagcagtgaattttaagaagctagtgctgattataactactcttcatatctgtgtttgcctaagtttggggccattataagtagtttttttttttaatattaatgcttaagaagttaaatttattctataatgtgccatgtgtgaagttgagagataatggtctttttctacatatactccctctcttatttttaatgtatttcgccactttaggattaaactgcaaatatctcatgaagctgctgcctgtatcactggtctccgggcagccatggaggctttggttgttgaagtaaccaaacaacctgctatcatcagccagttggaccccgtaaatgaacgtatgctgaacatgatccgtcagatctctagaccctcagctgctggtatcaaccttatgattggcagtacacggtgagtaccaatatacttcttactgaaccaagtagaggggagagatcttatgtaggcctagaattcctgaagttagtgatagaagccctattacttaagtaaaattctagatatagatagagctatatagatagagagtttgatgttctgagttctaacatactcagaacaaagaatgtcatttacttttttgttagtagttggtctgctgcatcagtgcatgttggtagtgttagaaggaacttacaaatgcacatacatagttcagagtgggtcacatgacagggaagtgacacagcccagatagccctttttccatggtactgttttggcatctctaaagaaaaatattgatgagatgttaaattgtttctgtatcaaatgtatatgtgtttttgtttatcttaaacaactagagcatggatatcttaaagaaatgagaaatttatcttaattcttaaaatttttatttgcttcaggttttaaaattttttctttgcccactaatttttatttacatatacttgatacttaccaaaaaggcaagaagagtgatacaatgtatagccatatagtctttatttaggttcactaattttcagcattttgtatttgcttaatatttgtgatgaagtagcaggcattaccacattttacatcaatacacttcatgtcttttaagaacatggccacaataccacaatcacaccccaaaaccttaagtgttttagtaatactataatatactaaggtactaaaattcttccagttatccaaaaatgacctctaattcctcatcaaaaatgatgtattggcatttgatctatctgtaagatgggtagattgttatcctcatcctctttaatat

SEQ ID NO: 57355 - DNA, 1328 bp, Homo sapiens
ccctctcctaatgcttgccttcttggaacacttatgttattgaactgagtaagaggactgtcttaaagttctaatgacatactgccaaaattcaaaacctttgagattgaaccagaacttcagaaaaacagatggatacaattgatgactgttttagaatagcagatcaattttatttcaatttctatttgtgcatttggcttcattccctttattaaattttcaaatataactaaatgtgtacatttggtaagtcgttgggaaataataagaatgctttgctaaagtgatggttttgtgcttttcctaggtatggagatggtccacgtcctcccaagatggcccgatacgacaatggaagcggatatagaaggggaggttctagttacagtggtggaggctatggcggtggctatagcagtggaggctatggtagcggaggctatggtggcagcgccaactcctttcgggcaggatatggtgcaggtgttggtggaggctatagaggagtttcccgaggtggctttagaggcaactctggaggagactacagagggcctagtggaggctacagaggatctgggggattccagcgaggaggtggtaggggggcctatggaactggctactttggacagggaagaggaggtggcggctattaaaacttggttatgtcagttcctgtgtgtagacagtaaggaaaaaaaggcatgctatgtgttacgtgttttttccagtatgtttatttgccaccaaaaagtaaatgcattttcacccattctgtggttcattgtagtttaaggaaaccaagcatatagatgcattagtgattttgtttatattatgtaaaatataacgatctcttaaaaataccacagtttgtattttttctttaaggagtaaagatttgcctttaaataacttggtattttcctggctttcgtttaatacaatagaaaataaagtattacaccgaatacttgccgtgtagtttgtttgttgacctcgtatgttagaaaattttacaatgccagctacatctgttgattttaaatgtcagagaagttgtaccctgtttcaaaagtatactaagtgatactacttgtaatagaataaatcatcttggaattgaattgttaccttttgaagtaaatactggcaagtgcacaagccacataaacctgaataaaacttttgacctagggttgaacatttggcttcctcccatattctgtctttgaataagaccaaggccagcattttcttttctaagttagtttccacgatgacaattaaaagcaataaaatcaatccatagaactcttgaa

SEQ ID NO: 57356 - DNA, 1037 bp, Homo sapiens
taagcttccagtgggcatctagcacacagtaagcactgaataaagtagcaaaataataaaaatgacaatgataataacaaaaaaacaaaaacaaacaaaagcatgttaaaaaaaaaaagccctgctatctgtattacaccattggtagaagaatggctactcaaacaccaaaaaaaaaaaaaaaaaaaggagaaaggacataaagagtaaaattcttttttttttcaaaattgagattttattggttaaggatcagttcagacatttcaatttgtacacaattcttgacatatgtaacaaaaatctaaaaagccatttattgtaattcttttttaaagttattccagtgactttccagcttaaaatttggaagcaaattttctttaagaggctataaagtaccagtatcttcacatgttggtcagctgttacatacagcccaccagttcacaactgaatagcacctacactacatattcaaatttgtaacctttcacagcacaataacaaagttattaggaaaacaggactaccacaaccaaagatgttacagagtgcacacaattctgacagggagagccatgatcaaagagtggttttctttaggaaacaattcttctaaaaaacatgggaatggaagtaatttaaaatgttcaagacattaaatgcagtactgactccatactgccatttaatatgctttgtattataggatataaaaactaaccccccacctatggaatgttaagctgatacctgagacagtcaaagcctcccataattcaatatcccacactattttctggttgtaccaaaaaataaacaaccagcaaatgatttcacctcttaaaaaaaagcatttacacttaaaaaatgggatgaggtgggattccctccttcttaaaaatgtttctagagctactaaaaaacttgcatttacaaaatagttgataaaaatattcctctggattgtacaagaagggagacagggaccactgataagacatggtatatggtattaatcagacttggcttct

SEQ ID NO: 57357 - DNA, 1052 bp, Homo sapiens
ccgcgcggggagcgggtctgcgaggccgcccttccctcccggcatgcaccacccagccgccctcccctcccctcctctcctctcccctcccctcctctcccctcctctcccctcccctcccccaaccccctcccccggctccccgcccacctcgcgcgcccctccccccgggtcgcgcgccgcgggcccgagcgcgagacgccgctgctcccgcccccgccgcctcctggagtcgccggggcggacgcgcagtccatggggcgcggtgggccggggagttgccccaggggccgcgggagttgctgagaggagacagggttgggctttctcctcgcccagaccccaccccaccctgccgaccccaccccctgctccttcctccccgggggcgcgcactcgggcacgcgctcggaagtcgggggtcggcgcggagtgcaggctgctcccggggtaggtgagggaagcgcggaggcggcgcgcgggggcagtggtcggcgagcagcgcggtcctcgctaggggcgcccacccgtcagtctctccggcgcgagccgccgccaccgcccgcgccggagtcaggcccctgggcccccaggctcaagcagcgaagcggcctccgggggacgccgctaggcgagaggaacgcgccggtgcccttgccttcgccgtgacccagcgtgcgggcggcgggatgagagggagccatcgggccgcgccggccctgcggccccgggggcggctctggcccgtgctggccgtgctggcggcggccgccgcggcgggctgtgcccaggcagccatggacgagtgcacggacgagggcgggcggccgcagcgctgcatgcccgagttcgtcaacgccgccttcaacgtgactgtggtggccaccaacacgtgtgggactccgcccgaggaatactgtgtgcagaccggggtgaccggggtcaccaagtcctgtcacctgtgcgacgccgggcagccccacctgcagcacggggcagccttcctgaccgactacaacaaccaggccgacaccacctggtggcaaagccag

SEQ ID NO: 57358 - DNA, 1009 bp, Homo sapiens
agaaacacgtgtaagtgatgtttcagaaatcaggaaagggatgtgtagaaaacttcatggcagggcagtggattgaggatggacatatgtatctggaagcaccaaaaataatgttcggtctagctaaggttttcttcatcattgagatacgtaaataggcagaaagtttcattattgtgtttaacagaggaatctatgtgtgagaaacacgtttgacttaacacttcactccccattgccttggaaggcttgattattaccagtagctggtactaatgaacttccagagagaacagactgcctcaagccattcttctgtcaagggagggtaattttgtaaggctaatatcacttaggggtgttggaaaggaacatgttgtaggcaaatggttcttttgatcatgattttgctgctctccggtacactaaactttatgtaagtatcaggattccagagaaagaattggacttaacaaaaagtactttgaaaagtgggattaaattattgtgtgtggaataagtgttagaaaagcagaattatttaacatcttatttgcagttgagtcattaaacaaatgaaacattttgaaaataatttcataaaatgatactatgaggtatctgtttttcagggattgaagaagtaaagtgcactgagttcagttttttaaaggtgcctttctgaagacatagctagtgaccgaggatttcctaagatctgtgagattgctctttattttctcctgttatattttttaagttggccaaaattatttttgaaatgtgtatctaagtatttctgtttaacttttgacttgttaaagtttctgtgttcaagtttgaatactcttgaagtcttatttttttcattttcagattttaaaattttcaaagaaaaggcgttgcctgatgtctgaaatctcagatgcctgaaattcaattgacaattactgaacaacagtctcttatttacataaaggtggggttgtcaatcttggctctcagaatt

SEQ ID NO: 57359 - DNA, 1006 bp, Homo sapiens
gagtaaagactactctggtgaacagataggatccactgctgtgtggtcggtcggttctgggtagctataacttcacccgtttctttcccaccaatcgttactataatctgtccaagactctactcttaccttctatatccagacactatgtgtcttgaatgcttatctttctctccgtcctctttgtctctgccttactgtaagttccttactgtaagttcccattgcatttcacctggattgttgccacagcctccaaataaactggtgggctttctgcctccagttttgccctttatatttgggcagccatcctttggactgagtgatgattctaaaatgcaaatctgatcatacaattttgcagctaaaaattctgcagtggttcctcaaggttttatgataaagtccaaactccttggcgtggtgtacagggtacttaggatctggacctttttgttgcttcacgtgttcacagggctgttctttggtttggaacacttctcccaggtgttaggactccttccccagtttctctctctctcccctttctgccccactccctggcttggattaagtctcccactgacgccaccctgtaggtatttatcacagtccctatcacataggattatctgtttctttacttgtctgtttctacctttaaaccatgaagtttttgaaggacgagtcaggggtttagtaatcttttagttcagttaaagatgactaatattggttaattgcttgttatgtattagcaacaatgcaaattcctggatgtgtagtgattcatgggacattgccctgacctcattcttagatgaggtgtagatgcagagacccatgtctctcgatttgggggtaggcaaatgatggccttcttagccaagtccagtccagtcctgcctatttttgtatgggctgtgaactaagaatggtttgtacatttttaattggttagaaaaaatcagaagaataatattttgtgacatgtgaaaatttc

SEQ ID NO: 57360 - DNA, 1053 bp, Homo sapiens
ctgggtggagctcaagaataaattttacatatgtaaaatttcagagctatgcatttaatatttgtatacttcattatatgtaaattattccttgaataaaaaaatgaattaagaaactttcagccaattgtagtacactataatatagttgattttgtttgtttttcatatgatttttggcttaggagagaacacaatgtgaggcttcatcatctaaaatatatttctcttagtgtctttctcctctgtaccagaagttgctggcattaatagacattaacagatatttgttgagtgatcaaatcagtgaactggctggttttaattgagttatgagcccattttcattgaagtacctgcagagccctctcatacaatcaagcttggtagacgcctcaggcagtggagcatgggaaacctggggaagagctgtcctctgttctcacctcactttaagcaggtagtggttttggttgatgcttcatcgtttgatgtggtaaaatggtaagtctgtgggttttgctgcaggtttagagaattctttaagaatgtctttgtgtggcatatgctttggtcacaatatctggtgcttaggtaacttgctatttaatttccatggtgaaatgtaaatgttccacatatcacttaaataatgggaagaccccatcttcattcatttaaacatggtctaggtaatggctttctcttattgagccttttagaaataaaaagtctgaagtttgaatcatgtggctttcttggagaaacttttatttttttttgagacagagtctcactctgttgcccaggctagagtgcagtggcgtgatcttggctcactgcaacctccacctcccaggttcaagcgattctcctgtctcagcctcccgagtagctgggattacaggcacacacaccaccatgccctgctaggttttttgtattttttttagtagagatcgggtttcaccatgttggccaggctggtctcgaactcctgacctcaggtgatgcaccctccttggcctcccaaagtgctgggattacagtcgt

SEQ ID NO: 57361 - DNA, 1265 bp, Homo sapiens
tttattatcaggattgctttagaggctcttgctgggttgtttattattgttttcagcatttttgccatacgccctgaaatagcatcaactcctgggtagacttcaggatcattcagttttgtaggcattctaatcaggtttgggttttaaacatatgtccactttagagcttttatgtcctggcacagacgtcaatggtgaatccagaccatttcaagatggacactgattctggaattaacatacttcccagatgtttgtagtacagatttgttttctgtgctgtctttcatgtgttctgctgtgtctgtctctatctgtgctttcctctgtttttacttttagaacccctggggaaaggtaggtatctgctttttggattgggaaatagaataggtattaaatttttggtaaaaacctttgagtgggtattgacatttctgtgagaggagaggctgctttgttccctcgagggagactgttggtgagggtggtgttggaggtgagactctgaatgtaactagattcggacttcttcacatctctagtggttttcaattatgaaatgggcaactgatgctctgagtcagcagccttttaaccatgcctgactgaagagaacttgtgtttgaaattcacagcattgcctggatccctgctgtctttttgtgcctcccgctaacacacagctgtttttgttcatacatcattttgtgttcaactgcctggttacttcctcaggtcccttttatggtgaataatggacacatgggagtttgaacacccaagtgtgtggttattcaaacaggaagtctcaaggaagcacagtaactttgtcagaggaacaaaagatgggacaggaaaggctattgatgattctaggcttcaaacatctgctgggaaatctgacaatttctgaaatacagatattccatagcttacaaacaagttggtttgtttatttggaacttgttccattttttaaaaatcagggtattaaatcttcgtaaaatagaagtggagggaaaaaaaaggatataatgtggcatcattagtgttaaaaagaggagagaggctctgcctgtggcttgactgggtttcaggagaaaggctggagcagctcatcttgactgaaggtaaccctgaggctgtaacccggggtgagcacataggtgggacttgacagaggctgctagagctgacagaattggattaaaagatgattttatgcagagcttttgatgattgagcactggaggaatatg

SEQ ID NO: 57362 - DNA, 1030 bp, Homo sapiens
cttatgaccttgggattccttgtttatgtgataaatgacttaccagaaatagtcaaataaatcctgattttagatttaaaaatgaaaattaaatctggaagtcaaagaagggggagctctggtttcatagcaatttatattaagcaagtggggtgatgcaaatgctacagaaaagagtactgtgtcaggcttaattaatggaagtgatagtattcaaaggagtacaagttctgtgcatcttattcccctgcctttaatttcagtcatggtaaactgttcatagtaaacatgctcccaccgtgtgggtactactacatttttttcttgactctttacttttctgttttttcctttggctacttcctaatcatctttaaaactcctgacaaatttcaactcctccaagaagattttgctaatttctaattcctctgttccctccagagcacttgcctttatgtcatttgatgtttatacgtccactcacttctaaaatccagtaagcatattgcatacctaggatgtgaggggtgctatattgtattgttttctctctttcccccattagctgagttcatcaaagacaagacgaatccatagatttcttaattcattcatttacaaagatttattaagcacctgttacacaaaaggtactgcatagtaccggagacagggcagagaagacctagagcttaagttctgggtaaaaaagcatgcagtacaaaggacctgacctagggaggatttcattggcttcccctccaccaccccactgacttttatgcccctagtgtacggcataataccttttatatggtagtaggggttcaaaaaagtttgctgaatgagtgaatttctatttctttgaggctatggacacagaatgcagatgagtgcaagaaacagcaattttgtttaggttttcccatgatggaatttgccttgtagatagggtttttaaaattgatcaggcagaataggatggctagtacatggtatagtttcctcaccagcattgttagatgaa

SEQ ID NO: 57363 - DNA, 1097 bp, Homo sapiens
aaaatagctctaaaatatcaaattaggtagtatacagatattattcacctttttggtaaaattagctaccaaattagttgctgttcatactgtttgatgcaataagtggtaatctggaaaatggaaacatttctattcataaaattcactggagatttgattaatacatgtatttccctaaaaaacaaagcaaactgaaccagtggtaactcaaggaagcattgatagagggacttgggttttgttttgttcttcataactaaatcactcaattacagagtgtgataaatttctcaagcttctgagatattttaggtcagtctttatatttttatatcaattctgtggatcatgcattttaagctcttttgtctctttctcttcaaaactgtctaacgccctctgaaaccttatttatcatctgagaaaggattgcatttaaaagacttggaacaaagagtgttgaatgtatgggaccttgttaaaatgttgtcttgtaaaatgtgatagatatgagtcttttaagttttggggatagatagacccatgtgtaatttgtctgtaaacactacagaagtagttctcaaatgagtgtggtactgtccccgtaggggtatttagtggacaggaggggattgtggggaattggaggggatgggagacagtcccatacaacaaagaattgcccaaatcctgcctaacttttggatttctcacgggacatttgtgctattaaaaaacctgattataaatacctgagcctagaacataactttgtctttacacataaacagtttttttcataactttattatatgtaatttcccatgaatacaaccaccatgtatataaatatttttttagcttaccgagagttagttcaccaattcggaaggccccatctctgccaacgctgcctctcatgatattcaagttgcccatacaacacatatgtaaatcagtctgcttttctagcaatcagagtgaatctgtgtaccaatttgtatattcttagcctctttttttctaaaatatcaaatgtaaataaaagtgttgatagtagctgaaattttgaaatttgctttcaaccatctttt

SEQ ID NO: 57364 - DNA, 1295 bp, Homo sapiens
tcttatacacggttcccatttttctgtaatgtcttcttatgtctcaatatgtaaatattttgtctttacttatactaatgtttcttgttacccaaattatctcctaagactgtttatgtagacttgaaatatttcttctgtctgtgggtgtgggtgtgagtaccttcccaaaaacatccaggaatttttgcccacctacttggtttccctggagcatgaaagaaggtgattaatggggtagaaaaaaattcacaaaaagccaccaacaaaaagctacctacatgtttacatgtattttaaaggaaaagcctgtcagctgcaatcaaagcagcaagggctcttcaaggaaggtaatatctatatgttgttctgttttataacatgtaaaattttctccccttgggaaaaaacgtctcacagaagattttcttgcaagatgactatgatatgacaggctctgtttttgttatgcataggcagttgcttctattgtgttccctgcagcctagtgcgtgtgtattttcttagactcatctggtagtgaagtggcctctagctcaggtcttcacaggcagaacatccatgctttgaggaggctgtattagcaaaataagaaacctactcagagataagggagaagcttcattgttgatgctgttattaactcaggctcagcttcctggtttgagagatgttctgaatacatattgatggatgggttattaatacattacatcatggtggaacttggcatcccagactggataagcccacttgccctgttatataccagcatttgtggtttgtattaataactctgtaatcccagctacatggaaggctgaggcaggagaattgcttgaacccaggaggtggaggttgcagtaagccaagatcatgccattctactccagtatgggcaacaggagcaaaactctggcccaataataaaaataactaacccagattgtgtgacaggagataatggaaatgatctgagtggccacctaatttcagtgaaggaactagccaaggtaagtgacttgctcagtgtaagtccacaactaatttgtggccactcaggacattgaactgggtctcggagcaaattataagataggtaaaacagaggggacacaaacgtggaatagtgagagggtgaggagagtgcagttcaggctgggatcgtgtgtggcatattcgtaggaaaccacagaatctgaagttagttaggtttggatttcatttaccacttacaaactacgtgcatcagagtaagaaatttaatttctctg

SEQ ID NO: 57365 - DNA, 1030 bp, Homo sapiens
tgagtctaaatgaacacttttctgcagtccttagtgtagtaagatgggagcttgttcagcaagataggcaagttcatgcatatgagttttatttcagagctaattgacataatttatcaaccaaagtgatttatttttaaaacacctcattagaaatactcagatctgcacattgccacaaagcaaatgaaaataagttagaagttggagttgtaatgtattgggtatacataccctggtagtgagaacttccaaggtaccttagtgaaaatgacagcctaaatggcgttgtctgttactatttggaagatgctgacatctgatgtttctaactgaccactagaacatgtgtcagcagttgcttttgtaggggccatgctattctcctgctctctcctatcattgctttaaacagtacactgtaatgtcttataaatcttccatgtattttttctgcagaaacaaaaacaaacacaggaagacagagacacatctgtctcatcaattccatttgaatcattataaagagtttagtcaaattcatacatcggatgaacttatcaaatacagagggtgcttttgcttgaaatcttccccaggtggttttgtgaggataatgctcttaattttattaattttatttttgtaataccttgctcatccatcgtaattgatacggatccctccattgcctttggataatgtttacctcgcacgtagttcattctgtgttatgataatttactttgaatgacaaattacttaaatttttattgacaggctttaagtataaaaaagacctgaaatttgaaatctgtattaggtattgtgaagcaaagtgggtaaactttattattgtagaattgactcttaaactatgaccaagtacaggcaccagccaggcagatgtgtttaggctttctctggcattggagcatggtacagggcagtaatgatgtaagtgcttctatatatatgtatatatagtcatgcattacttaacaatggagtacgttctgagaaatgctcg

SEQ ID NO: 57366 - DNA, 1476 bp, Homo sapiens
ataggagcatgaaccctgttgtgaaatgtgcatgtgagggatctaggttgcgtgctctttatgagaatctaatgcctgatgatctgtcactgtctcccattgcccccagatggggccgtctagttgcaggaaaacaagctcagggctcccactgattctactttatggttagttgcataattatttcattatatattacaaatgtaataataatagaaataaagtgcacaataaatgtaatgtgcttgaatcatcctgaaaccggttcctggtgccaaaaaggttggggactgctggattaaaggacagagtcagctggacatcattgtaacatcattgcttggtgttttagtagcattaagacttaagttttgctttttaaatttacttctatatgttgctggagaggatttacttctgtctctggtgatattcagctaggttttttagaatggtctgtctgtgggacaagaaaaaaatctcagctaacaaaataggtagggatttctggatgtaaacctaggagaagttaggaaccacagaagtaagccttaaatgccttttccaatctgaaagaaatagctataaaaacaaaggttttggcaggcttatggggagacagagtcagagttcagggcctttcaaagatatgtggtctgataacctcccaaacctttgagcttgttctctaaaaagcttttatcatctgtgtaaagggaaaacagaaatacaccattctgtgagtagagttggagccagctttgcatcacctaggtaacccagtgggcactcaagccttgaacttgtgttaaggtcaagccagtttggtgttactcccaggtgtctggtataagcaagtgaacattgttttggagcaagatactaggcctcaaagtactcatatatatgtgtatgtctgttttaaaatacagtgtccagcacatagtcaaagatggttaggcacattaaaaaatagggctataaatgaaagaaaacctagcaaaataatagacaagagaagcagatacccaaatttcaggtatagaaattacagctgtgtttagtatgcttaacagaaaaaaggacaagtttgaagatcaggccactggaaacaacaaaaaagtggcatagattacatagattagaaaacaaccttgtaattctggaactaaaaaaatccattgctgggtttaatttgcaggatttacacatgttgacctataatttttcttactcctttttcccttatctgatttggtatcaaagttatactagcttcataaagtgaaatggaaaatattctttatttttctgttctaaaaaaatgaaattatgcaattattcaaatggaatacatagtaacattagtcatatgtatcttttacagactgacaggttagtgccaccaagtattcacaagtttctgttcatagagtatttttatacaaaaaaacagtgaatttaatagcacttttt

SEQ ID NO: 57367 - DNA, 1945 bp, Homo sapiens
atcctcatagcttagctcccacatatcagtgagaacataggatgtttggttttccattcctgagttacttcacttagaataagagtcttcagtctcattcaggtcactgcaaatgccgttaattcattcctttttatggctgaatagtatttttatggccattgtgtatatatatatatatatatacagtagcacagtttttttattcactcattgattgatggacatttgggttggttccacgattttgcgattgtgaattgtgctgttataaaactgatgactagctcttaccagttttctctctcatgtgtttggggcaataagttgtctcttaaatttattcaaccctgacattatatttttcttatcccttaaaagttgtgttttgctttttgtttgcttgtgtgtgtttgtgtgtttgcattttagtgtacttataaaagcttttggttcagaaagattactcccaacaagaattttattatatttgatattcttgactagttatgtatcctgttgttttctgcatctggagataagatgttaactggaaagatatttatcacattggaatgttagttgcttttttaaatgtgcttaaggcccaaagctcagttaataagataggatcctcatatcccaaaatcttgagccaagggagggaactaaacctttaacagatgagctggtcaggcgcggtggctcatgcctgtaatcccagcactttgggaggccgaggcggtggatcacgaggtcaggaaatcgagaccatcctggctaacacggtgaaacctcgtctctactaaaaatacaaaaaaattagccgggtgtggtggtgggcgcctgtagtcccagctactcaggaggctgaggtaggagaatggcatgaacctgggaggtggagcttgcagtgagccaagatcatgccactgcactccatcctgggtgacagagtgagactccgtctcaaaaaaaaaaaaaatagatggagtaattttaactcattcttatgttgttgtttaaaggcaacactgtgagatgaaggggatcgtgacatgtaattcatgtaagaaattgtaataatagaagctttaataacatataaagaatattgagtctgggcacggtggctcacctctgtaatcccagcaatttgggaggccgaggcaggcggatcacctgaggtcagaagttcgagaccagcctgaccaacatggagaaatcccatctctactaaaaatacaaaaaaattagctgggcgtggtggtgcatgcctgtaatccaggcaggagaatcgcttgaacccaggaggcagagtttgtggtgagccaagattgcacctttgcactccagcctgggcaacaagagcaaaactctgtcttaaaaaacaaaagaatattggaaataaggaggagtgaagagtgaaaattttaatctctgtcctgctctctgggagagagagtgctctaattttagacaactagacattatttttagacagaaccattgctacagaagggcagtttgccataatttgatagaactgttgcctaagaatgttcaactttcatttgttccaattctctgcttatcaagcaactttctgatctctaatctggttttttttttttttttttttttttttttttttttttttttgagatggagtctcactctgtcacccaggctggagtgcagtggtgtgatctcagctcactgcaacctccacttgccaggttcaagcgattctcctgcctcagcctcccaagtagctgggactgcaggcacatgccactacacccagctaatttttgtattttttggtagagacggggtttcactatgttggctaggctggtcttgatctcctgacctcaagtgatctgcctgccttggcctcccaaagtgctgggaggcaattcaccttcctcagcctcccaag

SEQ ID NO: 57368 - DNA, 1571 bp, Homo sapiens
caagcgattctcctgcctcagcctcccaagtagctgggattacaggcatgcctcaccatgcccagctaattttgtatttttagtagagatggggtttctctatgttggtcaggctggtctggaactcctgacctcaggtgatccgcctcccaaagtgctgggattacaggcatgagccaccacacccaaccagaaaggtctattttctttgatcttattaaaggctgccatatacaaaggttttcttttaatgttgatctgtttttaaaatatggaagaaagccttgaaaggcatcatcataagctctacgtcaatatccagaaaatatcgtcttgttttagaattctagcctgttttgtttggtagatgagtcagtctactgtaaataaatatttattgagcacttgttttgtgccaagcacagtgccctagggattgtagtgtttttcaaattgtgggtcacagctccctaatgtcataaaatcaatttagtgagctataaccggcatattcaatcaaatggaatgaaaaatagaatatcagattgcatcatggatagtattgtattattttatcaaacttgagtttcaattgtgtatgtatgtgtgcaaggttgcaatataaagtgtcttttttacttgtgtcatggttagaaaagcttgaaaagcactattatagagcatacccaaaagtatatattccttgcttttgaataagttaaactcttgttggagcaagaaacacaaaagaataaatactcaagtagtgaattacaataagtgctatgtgttcggaaaagtaagatgataatacaagttgaaagtggcatggatggatatggtggaacttgaaccaaatctggaaagatggatagggcttggaaggggtgaagactagagaatggcttaaaggtgagacgtggcatatggataatagggatggcaagactggaacagaggtttcagtttacattagagaactgtaggatatagtttggagatagaaaatgaagcacaattgtccagacttatggatgccttgtgataacatgcctgaggagtgtgtattagatcaggtaagctgcacagattcttaagctggggagtgataatgatatagggtgggtttatagaatactttccatcttcttcctaactcctctttagtcatggggagctcctaagggaatttcttctaggtaggtgttggataccaagtctctggcatcagatcaaagagagccagaaaggactttggctgttctccagaatgtaaatagaaaggtagaacaagtcccattgtgggtgcatgtgaaatactcccatggaggagaactgcagtgctgtctgtttgaaatacggcaaagaatggattgaagaacatttcttctgatatcactgtttaatgtttgctctcaatgtaaagggaaaagcagattaaagggcccatgtttttgaagtactgggaacctgactgacctacctgaaatatgctatgtaaataatttgtcatgtgatctccttaccctcaagacaccttcactgaatatgctatatacataatttataaa

SEQ ID NO: 57369 - DNA, 1044 bp, Homo sapiens
agaacttttttgtctataaaaccaattcctctgctcagctcattggaacacttattctattttatagagtaagatgttgctcaattctggaatcacaaataaaagccaattaagacctttaaatttgttgtaattttatttcttaacagtcattagaaaaaaaaaagcagatgcatctaggattgcaagattatttacatgtagtccagggggattacatacattttagctattttgtagaaggtataatttaatcaggaacacaagttcaagcacagcccatgagagatgaagggatatgaagaacactaactttggtttctaaaggaaagtgtgtagagtgtacattcttactcgtctgcaaagagggtggatgaatgaaaaatgaagaagggggtgtattcgtttatacttatgaaggcatctgctcacaatcagtcacttgtagagagagtgccagctggcagggtacttgcgtgatgtaaattgtccatccgctcagaagagcagaagtacaaggaggccttgtgcaaaggactgaattcctacccagaggacaagggagggaggttcttgtagatatctaaatgagatctacttccattttccactttatttgcagttttcaacatgtcatttttcctgctgtcccagctacgattactgtttgacttgagtaatcagtttccccccttcactgcaactgctgcttattaagcctctgcctggtggggggagggtgggtataggaggggacactgctggaaaaatggtgtcactttttccaagagtgttgttttccttgtctttctgcttcactggttcatttttgtgagctgtataagagctaaaggttattattacagatttcattttttgaaatgcatcaaaatctccatcccctcccctacctgctaatctttttgcttgttaagaaagaaagtgcttctttctgtgaaatcatagataattctaggggtatcaaatgtaatggaattaaatcttataaaatttctgaatggacttccttctgcttttttttca

SEQ ID NO: 57370 - DNA, 1097 bp, Homo sapiens
ataaatatttctatgctagtctgtagccaacagaatgtaacaccctccctgaaaatgccaacattacccgacacagactgggattaaacaagtctaggcttctagacaaagaagaaacagtgttttcttatctttttgagtgtactgaagcagaagttaactctttgctttcagatgtgtcccttatcatcgagaattgctggtggtcctgtatcattttattataggaaggaaggatggacaccagagagggtggggaatttggtttacagggaatcttgaccagtgcctgcctataaagggtaccactgtgaaatccccagcagtaagtaggttttctaaaaatcaagtgtgtatttctacttgcctaggttttagggccttgtgaatgcaagtcgaatgatagaggaaattggcttggaggaaaatgttggggagtttgggtttagctgggtgcagtcacccctagacttggatgtggagtgagtacccctgttgactttaacatctgtgtgtgtcttaaagaagactgctacttttctggtttattgtctatgcctacagatgacacgtggaataaattgcacattaaaatgtctgacatgaaaatcagaagagcttaagttcattccacagaagccttttgttagaatcttcaaaggatgagaaccaggatgaagaagagtttacagtagggaagtatttctcaactgtaattgtacataaaaattgcctatggtgctttaaaaaaatacagagtctggggacacatgttctcgggatctcctaagggctgtcacagaccataaagtttaagaagaaaaaaaaaaaatacagagtttgggacctcacccaaaacctaccaaaatgaaacttgtggagatgaggctcaacaatttgcattttcaaaagctctgtgggtgattctaatagccagtctgggaccttattgtgggccagattatgagaactactataacaggaagacatagacctgggctggctctaatggaaaggggccttctagagcgcctgggggttttgaactgtttgggtacagataactctttttagtctggatacttacagtgatcctg

SEQ ID NO: 57371 - DNA, 1038 bp, Homo sapiens
tatcttctccaaaatcatactgtctatttcagaacttttgttttcctcttagctccatagtgataatcataccattatttttataatagcttttgatacagaattctgttagctttaaaaaattctaaaatgatatcttctattttacctacctgctttgttatatttcactgtggcaacatagaattgagactttccatattccatctctgttcatcttagttagcgtgtctttccgttattaacaatggcccaagtgtgataggaagtgcttattgcctgtactcagaaaacatgactgttgaagccctttgttcattcatttgaaagggatactttctcaaattgtaagttccattgcatttgttgtcataaatttagttaggaattactattttatacaaaactgtaaaggttatttgtctgcatttttaagttgtgctgatctaaatatactttctaagggattgtcctcttgcactgttggcatttgaccgattgacaagggggaggccatgaaaagggagtacagaaatttaggggaaaggaacaggataataagtttttaaaaacaaacaattttgaagataagttttagccaatagaaactagcccttcaacaggcaataatgaggactgagtttttcagcatctggagtgactgcactgtaccagaccatcttggtatattccttatgtgcttagttgttctgtagtgcttccgatcatctgcctgtgtctgcttgaggatcccacagtcagtattaagttggccttgggtcgtcttaatcagtgaggctctatttgtgcaatccatccgctgaggtggaacaataacagctggtttgcagctggatatgttgtcctgggaactcttgtttcagccagcagttatgctaacaaaattgaaaacattttcaaatagttgctttctgtgactactgtttgtgttaactgtttggagatcccatttagtagcctaaacacaccccatctctaattgactttgtgctacaactttattaaagttttatatgc

SEQ ID NO: 57372 - DNA, 1168 bp, Homo sapiens
ctctactaaaaatacaaaaaattagctgggcgtggtggcgggcgcctgtagtcccagctactcgggaggctgaggcaggagaatggcgtgaacccaagaggtggagcttgcagtgagctgagatcacgccactgcactccagccagggcgacagaacgagactccatctcaaaaaaaaagaaaaaaaaggacaggggcaggcaatgaccagcatctctgatccaaatgtggtgccccatgagctctaagctggtatcccttactggatttggggtccagatacaggatggagggaaggggcatgtgtatcgagtccctaatttatgctgcacattatattttatttaagcctctcagcagccttgcaaagaaattagttattatccttgtttttggagactccgagtagtaaagtaacaaattaaagaagggaagagtcaagaaggagaaaaatattagaaaattaaagaagtcattgagtattataatagatttagtgctaaagagggcgtaagttaaatgataataagttagtgatttagaacattttgtcacatttatatcattttcagtccctccacttctcttttatgtttctatttttgcttcctgacaggaatgggtaactgccactgacatcagagtaactcttaatcgcctgaacacttttggagatgaagtgtttaacgatcccaaagttctcaagtcctattattatgccatctctgattttgctgtaggtggcaggtaagtaaactattaaattagtcttgaaagtgtttggagcttttgcatagaggtgaatctagcaacttgtttacaactatgttaataccgttgttagatgttttctttaccaagaataggagcggcagtccttcctgtgtgataatgcttagctgaaaagacagacagcagcctaggatattttcactgtgagatcttcttgttgttctggaaactaagcatgtaggttttccaaaaccttgtcaaatccacacatttagtgaattcttattgacaatttaagtgcaagggcactgtgaagcacttgaggaagggtaagactcaccttatcctacggagaagtcctgaccttcttggatcttacacatgaacagggtaggcaatgtatgaatatgtgaaaactgaaatacttgtaatcacc

SEQ ID NO: 57373 - DNA, 1161 bp, Homo sapiens
ttattttgtggttttgcaatcctgagcacataaataaagcactccttgatcttcccaataaccttatgaaataggcattgtcatcatccctgttttacaggcgaggcacagaggttaagttacactggtaagtgacagggaagggtttcaaacccaggcagcctggcttcagagtccatgcttttctgaaccactatattctgctacctcttgacacacaggtttgacttcaggaattgatcctacaggtagcctcagaaattgttagggactttcttttcatacctggttaatccctacccctgttaagtaaagctaccttgtttaattttttttatccttaaaaattcagacatccattacttaatcttgctcagttccccagtttacacttttgaatggtaaaacttacttctttgtgtacatagtttttctgtgtgcatttctgggactttgcagctgttccattttttggagtatctcttctctccccagatgtaaatgtaatggacacgcaagcgagtgtatgaagaacgaatttgataagctggtgtgtaattgcaaacataacacatatggagtagactgtgaaaagtgtcttcctttcttcaatgaccggccgtggaggagggcaactgcggaaagtgccagtgaatgcctgcgtgagtgccccatgacgtcagtctgtcagttgtcttaaggacttccaagggtggaagaaggaatgggtgactttcttttattcctccttgaaaggaaagctctgaaaggccagctttttgtgtaatttgagtagtattcaagtcagaggaaagtcatagatgagggcaattcactgtaaaggcaaactgagggttttgtgtttccttcatgaacacatgtcccagagttggagcagcatctgcaaggtttagaaatttgtttggatccaaatactgggccagtgtagtctactccggaatatggtttctctagtcgtatttgttcccctttaaaatactattatttttatcaatgctcaggcatccaaggtaattaacatgtatcaaatataatgagttctaggctaagagggccattccaagattatttcttttttcttttctttttttttttttgagactgagtctcactctgtcagctaggctggagtgagtgatc

SEQ ID NO: 57374 - DNA, 2221 bp, Homo sapiens
ttttgttggtggtggttttttgtttgtttgtttttgagacagagttttagctcttgtcgcccaggctggtgcccagtggcgtgatctcagctcactgcaacctccgcctctcaggctcaagcgattctcttgcctcagcctaccaagtggctgggattacaggcatctgctaccacacccggctaattttttgtatttttagtagagatggggtttcaccgtgttggccaggctggtctcaaactcatgacctcaggtgatctgcctgcctcagccttccaaagtgctgggattataggcatgagccactgcacctgaccttcttgttgttgttaatgaacagtgcatctggtaatcattcttagtctaccaccatctgtctgtctcagagatgtgggaaattatgtttggttttaagtcttaaaatgctcttcttaaaggtacccagatctgatgtaactcgtgtgttttgactgacagcctgtgattgcaatggtcgatcccaggaatgctacttcgaccctgaactctatcgttccactggccatgggggccactgtaccaactgccaggataacacagatggcgcccactgtgagaggtgccgagagaacttcttccgccttggcaacaatgaagcctgctcttcatgccactgtagtcctgtgggtaagtgacaggaagatggattgaaagacaaaatgatagttccgtggacccccggaaaggaaagctttgtttccaaggcatttggacaactaaatgtggagatgtatacattattgtaacacagaaatcagtcaagatctgtctctaccccatgcctccaccttttttaaccaagttgaactttcagatgagtttctggtgtgtaagaggggggtggtggcctgagtaatggttctgcaaataattagcagcaggatcatagagacaatttgaactttgactgtaaaaggttaactgctttgtgagttcttccttgttgatgattttgtttagtctaatctccttagagtgctgaaatattcttagcatgtttgcgtgtgtacagagatgcacagcattcttagtctagcccattcttcaagagtttaacctttatatttgtcatttaggcctatatatacttaaattctagacatgggccttaaggggctgtgatcacccacagagaagtaactgatcttgtgtgcagtgtttcattgggtacaaagtgattttcaacattgatgagtaaattcatcttagcatgtgtctagaaacttaaaatgccatgacttaaagggtcatgattttgagaaagttctgatttaaaatttggtttttattacctttgtgaccatcaggagattgcatactggttctcaggcattgcttttaattaccagttatctttctttaacacattgattttacttacgtatctggccgaatttttgtttgacaataggcattttacattttaggctctctaagcacacagtgtgatagttacggcagatgcagctgtaagccaggagtgatgggggacaaatgtgaccgttgccagcctggattccattctctcactgaagcaggatgcaggtaaaatattttcaaagccagaagaagggggcagaatctatatatagtcaacacatattaatagatcttatggcttattggcagcagggtaaacatttttcctgtaataattgtcaacaagactgaggactagctgtaatggtgagccacaaggggtttggcttgtacagagagtaagcagagttttaatgggatgactatcttaaactgaaaccaaatataaaaatgactttaggctcacacctgtaatcccaacactttgggaggccaaggtggctggatcacgaggtcaggagatcaagaccatggtgaaaccccgtctatactaaaaatacaaaaaaaattagccaggcgtggtggcgggcagcagtagtcccagctactcgggaggctgaggcaggagaatggcgtgaacctgggaggtggagcttgcagtgagccgagatcgcgccactgcactccagcgtgggtgacagagcgagactctgtctcaaaaaaaaaaaaaatgactttagggtccattttgttctatgtgtatttcttttaaaaaagtctgttggctgggcgcctgtggctcacgcctgtaatcccagcactttgggaagccgaggcaggcggatcacaaggtcaagag

SEQ ID NO: 57375 - DNA, 1184 bp, Homo sapiens
agaagaccttgtgcttgagggagctggcttaagagtatctgtacccttgatcgctcagggcaattcctatccaagtgagaccactgtgaagtatgtcttcaggtaagatagccttctttgtaaagtgagacttgacgaacattgtgaaagtggtgtctttatttaagtttaactggcctctagatgtattttaaagaaaaacttctgggttattgtggtgattttgtaaaagggagccttcctttctttacctttatcttttccaattgtactaccaaaccaatagtcttattttttatttgatttgattgttagagcattgcattgttggggcataaatgaataagaaatatttccccaacatccagaattgtccttacagaggttaatgtggccctttctttctctccaggctccatgaagcaacagattacccttggaggcctgctcttaccccttttgaatttcagaagctcctaaacaacttgacctctatcaagatacgtgggacatacagtgagagaagtaagttatgatataatttaggagagttgtttaaaaagatgattggttagaaagattcatgataatgcaaaagtttctctttcctaataatataacactgagaagtgtataacaactcacattatacatgaattatatataaagacaatgcattttttaacggctttcaaggacctggaaaaaatttggtaaaattagtaaatagtattatttactaattgattactcaattgatcagtaggtcaattgaggttacattgtatataaatagattttctaaaaaacctaattataggctaggcgcagttgcttacacctgtaatcctagcactttgggaggctgaggcgagcagatcacttgaggccaggagtttgagaccagcctggccaacatggtggaaccccgtctctattaaaaatacaaaaattagccaggtggggtggcaaaagcctgtaatcccagctacttgggtggctgagggatgagattcgcttaaacccgggaggcagtggttgcagtgagctgagctcatgccactgcattccagcctgggcgacagaatgagaatctgtctcagaaaaaaaaaaaaaatctgattataattctactggctcaagttgcctcatcttcatttctttttatttactgttgtgtaatt

SEQ ID NO: 57376 - DNA, 1482 bp, Homo sapiens
tgaaaccctgtctcttctaaaaaaaaaaaatacaaaaattagccgggcatggtggcatgcgcctgtaatcccagctgcttgggaggctgagacaggagaattgcttgaacccaggaggcggagattgcagtgagtcgagattgcaccactgcactccagcctgggagacggagtgagactccatctcaataaataaatatatatataaacaaacaaataaattaataaataaaataaaagtttgctataccaccactccagatacttagcactcagtaccacatgattgttctaaatgctgttttctaattctcttctccagggtgtagacgtggatatctcgtttagtgtatcagagcccagttaagcaaatggctaattttctctggaatttggggtctagttactttttagtgttactgactttacacaaggtttggaaaacaagccagttcagtgattttcttttcctcactatacacaggtgctggatatttggatgatgtcaccctggcaagtgctcgtcctgggcctggagtccctgcaacttgggtggagtcctgcacctgtcctgtgggatatggagggcagttttgtgagatgtgcctctcaggttacagaagagaaactcctaatcttggaccatacagtccatgtgtgctttgcgcctgcaatggacacagcgagacctgtgatcctgagacaggtgagatgatctttggcagctcttagacctaacttctctttagcaattgtgtagaaagtgctcattgtcttatatacttgtacatttgcctgttttctcacgcctgccttccaaataggtgtttgtaactgcagagacaatacggctggcccgcactgtgagaagtgcagtgatgggtactatggagattcaactgcaggcacctcctccgattgccaaccctgtccgtgtcctggaggttcaagttgtgctgttgttcccaagacaaaggaggtggtgtgcaccaactgtcctactggcaccactggtaagtctgctcgcttcatctgctttcagtgttcccttctataaaaagacctaggggaaaggggcttcggagttgttttggatctttgtgtttggttcagtttcagtggttatggttttcctaataggaagctgaggctcactctccttgtttccttccatctctcttttgggtatcccctgattgtctccatctgtcaaccaagggctttcatgtcaccttgatctaccgtctcccctttaggtgatcaaatctcatcttgaggcttcaaaagcctttctatatctatgatagctaagtttgtatttccagccctggcacctctcctgagctacctacttgccatttccacttggatggtgggctagaagccttccacttgcctttccacatccctgttcacctttctgcaccctgactgagacctgcatgcactacatcaaatgtcaggctccatttgcattcagac

SEQ ID NO: 57377 - DNA, 1080 bp, Homo sapiens
catgccctgattctgtaccaattgatactgattaacaaggattagcacatgcctcttacattttaagagaatggttctgctcaccctgttgtgtgggaaacttacagtgtcaagagtggcacttcacctcttttaatatcatctgccaaaacaacatatatgaatgtgccatcctttgagactggagaagtttataaaccttgggcttgactcatttaccgagcacttttaatacatgatttgggttgattgtcacaacaattaaagtgaagtaggcagaccaggtgcttcctgtctagtgaggaaatagagatgtgctcaaggtcactctggtggtctggccccgtgccagggctgcagcccaggtcctctgccctccactgcaccatgtcttctctcatgtgatgattacactagattacctgtagccagtggtaatctagcaccaaaaatgtctaaggcctttctttcataacatcagattgtctcatccccaggtaagagatgtgagctctgtgatgatggctactttggagaccccctgggtagaaacggccctgtgagactttgccgcctgtgccagtgcagtgacaacatcgatcccaatgcagttggaaattgcaatcgcttgacgggagaatgcctgaagtgcatctataacactgctggcttctattgtgaccggtgcaaagacggattttttggaaatcccctggctcccaatccagcagacaaatgcaaaggtaatcagcctttgatcagattctgtcacagctaaatgcccctttattgtgagaattcttgtgtgtctcttaaaatatgtatagttgtttagtccaatagaaatacattgtgaaccgcttttgtcttttaaaattttctagtcaccacattaaaaaagtataaagaaggacagtcatggtggctgacacctgtggtcctgtaaaaagaaacaggtgaaatgaatactaatgtattttatttaatatatccaacatatgatttcaataagtaatcaataaaaattgttaatgaaatatatgttttttctcacgctaagccttcaaaatccagtgtgta

SEQ ID NO: 57378 - DNA, 1034 bp, Homo sapiens
cagttcagagaacacagtgaataaacaaactataagataatgcaaaagaagcattagcatttgggttttctagttccttagagaaatattaaacagtggagaattgaaggtagagatgaatccttgaagtgcatgaaacgagcactgatagtttcataacttctctaattgctaagtaacctgaagtgtgtcccaaaggttgcacgttttactttaaagctcattttgacttttaaaaatgtcagttttctctgctaaacagacttagccatttaagatctcataaatagtcctgtttttcaaaaaaattatgacagtatagtcagcttatagtcagcttattgttatcagtctgaattaagagatatactcttccttcttttgctaattatgtattattttctccttattctgcagcctgtgactgtcatcctgagggatctctttcacttcagtgcaaagatgatggtcgctgtgaatgcagagaaggctttgtgggaaatcgctgtgaccagtgtgaagaaaactatttctacaatcggtcttggcctggctgccaggaatgtccagcttgttaccggctggtaaaggataaggtaagctgtcaatagtgcattcattcattcatccagcagacgttgagtggcaacttactgtgcactaatctctatagaaaaagtggtgaacaaggtagatgtggtccctgttcttaaagacttatgttccagttgggaggcaaataataaaaaataaataaataaacaaaacaaacactgagataagtgccaggaagaatacaaatggagaataactgggggaaactactttatgtaaggcctctctacagaattcatctaaggtgagatctgatggatacaaaggaatgagccgagtgaaaagtaatggtaggtttgttccaggcagaaggaacctggtatacagaggcctgaaagctggagagtggctggagcctgctgagtgcagagggtgtgttctgttttttaagacgggagaggttggtacggacaggttat

SEQ ID NO: 57379 - DNA, 1014 bp, Homo sapiens
gtcagagcttaagactcatcagcatacagtctttaaagtcaaaggaacagctctgaaggttttttttgaagctggaaaaataaactagccacgtcttctcttcagaagtagacatgcatggagtggatagaactacatattcatgcagcacaccaacatggcacatgtatacatatgtaacaaacctgcatgttgtgcacatgtatcctaaaacttaaagtataataataattaaaaaaaaaaaaaaagaactacatattcatggagtgcccatgattcctgcaggaagtgtgattgagttcttcaggaatacttgtgtgtcctacctttcccttttctttcttctttatgtttaggttgctgatcatagagtgaagctccaggaattagagagtctcatagcaaaccttggaactggggatgagatggtgacagatcaagccttcgaggatagactaaaggaagcagagagggaagttatggacctccttcgtgaggcccaggatgtcaaaggtacgcatgattgaacagtgcatgacttctgtgagatggaccaatctttagatgtggctcctaaagcaaggttagtatagttttataaaattctttctcagtttttaaactactcatagattataaatcatttcattttttaaacactaattcaaaaagcaacctgacaaatttactgctttaagctacagtaagcatagggtgattttccaacaaataaaaaactattcgatattcaaatttcaagcattttatgaatctgttctattacaaggtgtcttaaaatattaaaatagttttaaaaatcattaaaggcatgcgtcttcataagctttttttttttttttttttttttgagccacaatcactctgttgcccaggctggagtgcagtggcgcgatcttggctcactgcaacctccacctcctgggttcaagtgattctcctgcctcagcctcccaagtacctgggactacaggcacatgcccaccatgcccgggg

SEQ ID NO: 57380 - DNA, 1008 bp, Homo sapiens
gggtggcaaaagagtctatttagtttaaaatacaaaatgagtttaatttgtcatacttcaacttatgttttaaacctagttttttctgggttttgaaaaatgttcggcttttagggctggcagcatttttaacaacattgtagatttatgactaaattgcatgtgctggtattaaagtcagtcattctcaccttcattaaacattccttgggtgtcttctctttgccaaccactgcataagaccagcgatatagtggtgagtaagaaagagttcgtagtcaagtggacagatggacgcacggttggaggtgtgatgagtgcacagtgaaggacctactgggtgtggtaaaggctgtccagctatggcaggggctttgtggaaacctggcagaaagttgcgatgtttagaagagtagagatacatagggcctcagatttcatgtgagatgatatgatcctcttcagataatttacagactttcttctgcaaaccattttagatgttgaccagaatttgatggatcgcctacagagagtgaataacactctgtccagccaaattagccgtttacagaatatccggaataccattgaagagactggaaacttggctgaacaagcgcgtgcccatgtagagaacacagagcggttgattgaaatcgcatccagagaacttgagaaagcaaaagtcgctgctgccaatgtggtaagtgattgcaaacgtctgaggtggggatgggggaggcccctggggtttgtagcaagtctgttactggcagtggagtgcttcttcaactaaattgactccatgcatctttttatttgtccctaaatatggggcagaaaagccacattgctcatagttggcatgaaacagttattaaaaactggataaaaaccaagggacatctgggttatttctctagctttgttccttctatggaactaggcagtttaatcttcctttatcctttactgaaaatagaatctgcaatcaagggtgctgat

SEQ ID NO: 57381 - DNA, 2026 bp, Homo sapiens
caaatgaatgacgttttctaatatttgtagaattgttgcccatgttagtatatgtacatataataaagtaggccgggagcagtggctcatgcctgtaatcccagcactttgggaggccaaggcgggtggatcacctaaggtcaggagtttgagaccagcctggccaacatggcgaaacccatctctactaaagatgcattagctgggcatggtgtgtatgcgtgtaataccagctactcaggagactgaggtaggagaattgcttgaaccgggaggcggaggttgcaataagccaagatcacgccactgcacaccagcctgggtgacagagcgagactccatttcaaataataataataataataataataataaagtaagcattacctgaattttacttatgtccctatcagatggttgtttcatggcttattttttgttttatctgtatagtcataaacaggaagctgatgacattgttcgagtggcaaagacagccaatgatacgtcaactgaggcatacaacctgcttctgaggacactggcaggagaaaatcaaacagcatttgagattgaagagcttaataggaagtgagtataatttgaaagtggtttacaccccttcaggtgttctggtaagtaacactagttcaatgaaaaattaaatgctggtgcattcagggcatacattcatgcagtaagatttcctttgttaatcatgcttttgaaatggaaaagtaagtagagaagggcatgtgaagccacagagatttggtttgattcaattactgtaactacagagaatagtaacaagatgagccatgatacttaaaattgtgcacaaataaagaagaaaaaatataatagagtaagtagaggaaacataattgaactacaaatctttaaagggtgtctgaaataagaaagtatatggtaagccatacattatagaaaattttttcttttttttgttgtttttgtgagatgaagtctcactcttgtcccccaggctaaagtgcaatggcgcgatctcggctcactgcatcctctgcctcccgggttcaagcgattctcctgcctcggcctcctgagtagctgggattacaggtgcctgccaccacacccagctaatttttgtattttcagtagagacggggtttcactatgttggccaggctggttttgaactcctgacctgaagtgatctgctcacctcagcctcccaaagtgctgggattacaggcgtgagccactgtgcccggccaagccatacattataaatagaaatgataaaagaaaatgtaaatatgcaaaatgttggtattaaaatgcaagcattttaatgtagcatttcctttgaggttttgggcgtattatcacatgatcatgttaatctggttaacattaagatgctaaaagcagctaagattgtcattaaaccacattatttgtgtcttaggtatgaacaagcgaagaacatctcacaggatctggaaaaacaagctgcccgagtacatgaggaggccaaaagggccggtgacaaagctgtggagatctatgccagcgtggctcagctgagccctttggactctgagacactggaggtatgggggcagcctgtacgcacagccccaccccgtctctcccccaagtctatgtgagagccgactgctctgcacctccctctgtcctcccactgactcgctggtaaagttgagtcttatttcacatacgctaatagaacttaccaaggtagccagatgtggtggctcatgcctgtaatgccaaccctgggaggctgaggtgggaggattccttgaggccaggagttcaagaccagcctggtcaacatagtgagaccccatctcttaaaaaaacaaaaacaaaaacttaccaaggtaaagaatcctgtgattgtaaacattaaatagcaaagactactttaatgatatgaacaatcactcctaagtctttagtgcaaatccaaattataataatacatttgaattgcttaaagcagagtaca

SEQ ID NO: 57382 - DNA, 1485 bp, Homo sapiens
gcttgaggtttactaagtttcacttcttatatctgaggtgttgacttgatttttaccataaaggtttaggtctctttagatatgtacagattgtctgattctatatatttataattagaaaataggcagaattagtctatgatgataaaaatcagaacaatggcaggcacagtgttggaaaggtagagtagagatcgggtggaaagggagaaaagggagcttcttgggtgatggaaatctgtattttgattggggtgttggttatgcagaaatgcatttgtcaaaactcatcaaactatatgtggattctgtgaacttcagtgggtgtaaagtatatctcattttttaaaaaagtccataaaatcttgatctgtgcagttcttttaaaaatatcattgagtattaggtgttacagagttcctaagcctaccttttcattagtttaaatgttttatccaaagtgtagtgatcttacttgcttttcacagaatgaagcaaataacataaagatggaagctgagaatctggaacaactgattgaccagaaattaaaagattatgaggacctcagagaagatatgagagggaaggaacttgaagtcaagaaccttctggagaaaggcaagactgaacagcaggttggtttgatttgcaggtcgcttcatttcttgaggcaacatttgaacagtccaaatgggtctgtgatgatgccgtactttcagagacagcagaccccagtgctgagagagcagcctaacagattttatgctggcaagtctcagggtggcacctctggagagccttgtctgtccaggagacagaagggatttgctttgagggttcatcctctcatctgccatgtgtttgcagaccgcagaccaactcctagcccgagctgatgctgccaaggccctcgctgaagaagctgcaaagaagggacgggataccttacaagaagctaatgacattctcaacaacctgaaaggtagaaaaggctgagataacaggggcaaatgcttccgccactagagtgatttttttttttaatcatgacttttaccatatttattacttcatccccaactccctactttttttatgctaaagtatttcaaagggaaatcccagagctcctgtcattttatccctgcatacttcagtatggatttttttttaaagatgttttcttattaggcaaactcacataaccaagatgcctatttagagaacttatataggtaaatggagattatctttcattttctctgccagtggcatctgattctttgttgttgtttttttttcttcaccccagatagaagagaaatgtgaccaattcactgagcaactgtgaattcttgtctgataaaacagtcataggttctataaatagagaagctttacaggatgctttacagggtactagttgaaaatatgggccaggcacggtggcctgtaatcccaacacttcgggaggaaggatca

SEQ ID NO: 57383 - DNA, 1092 bp, Homo sapiens
ctctcaaaaaaaaaaaaaaaaaaagtagtagttcaaaatatggactctggtgtcagtgggccttggttcaaaaccctgcaccctgcaccacaggtcatgtaacttctttaatcctcaattttcttataaaaatgatacagcctattttatgtcaaagacacaaagctcttaactcagtacccgacacacagtaaacactaaataaattgcagcttttaataatggttgaggtagtggtaatgggatgctcagcgctctgcattttaaagcacattgttgaagtaagaattctatttccagaaacggaacatttctataacactaactgggagacctattctgtagagatgtgtaatttctaaaatttcagcccatgctctcttccattttttaccctgacttccattgttcataaaacaaaatccagttggaactccctgaaaggccccctttttacttgttgggagtttagctcaaatgtgtccttgaacttgtttcagattttgataggcgtgtgaacgataacaagacggccgcagaggaggcactaaggaagattcctgccatcaaccagaccatcactgaagccaatgaaaagaccagagaagcccagcaggccctgggcagtgctgcggcggatgccacagaggccaagaacaaggcccatgaggcggagaggatcgcgagcgctgtccaaaaggtgtgcgtttcctcttctccaagagtccctgcccatatctttctctggtcactttccagtttctttccagaccctcagagcccttgcagatttttttcctgaacttcagtaaaattgtcttaaaccatatttgtctttttttttttcttttgactaggcatgagagtaggtatccacattgaggaggggaactcagtaaaagggtgctttactctaaaatttctactatgtctcagtgtgaggtctggcttcagaggtctatagagcccattcccacaaaaaatcagactttttctaaataaacattcttctttgacctagacaggtggtatttatttcaatactatgtagtgtgccttatcaatataactttcaagtccccctttcaagta

SEQ ID NO: 57384 - DNA, 1773 bp, Homo sapiens
aagggttttggtttagttcaaagggtgaaagaagatcttttattattttggtaaataacttctaaggaaacaaaccaccctcacatgcactatctcatttgtatttctgtcaattctgaaaggccagcatttggccagtattatttgaatctgtattgtattttttaaccagaagaatgaaggtttatagcttcattcttttggaagaggaggctggagaccacaggttaaatgcaggtgcatcgctcttggccggccctggcagggtcctttctccctccttttacactcgcagacaagcttgtggatgctcaataaggacagctgccgtttggacagagattaatcatttatttgtgaaggttttttctgccttgctttcttgttcttttttaaatcttcacattgttttgatcccaaaatgtttgtgttgtccttactcaaaactaggaaaaacaattatgtggtaagaggctcagagccacttacttaaatctcaactagatttatttgtgagaacatctgttttctgatatttagacacttcctcttccattgctgtttcctatgactcatgcacagttatttgttcaggtttcatggaatttcccaagtgtatttacctttgtttggtttttaaaatgtaaattatattgccccaataaatgagtatgtgtgtcagggggactgtggctgggtcattgcatgtggagggggagtttacagaagagaactcctagaagagctttacttaactatgaaaattttcaaagaataggacatttctaataagtccctaagagtgtcctgaaggacatgttttggttctgaaacatagtttctataatcatccttaaaaaataacttgtttctgcttaataggctttactatgaatatacctccatatattattgagttagaatgtgagaaaaggagattaatttttgaagtacaaatatagtgagttagtgagtgtaggcatcctgactgcctagtcataactttgatgaagtagaaataccaacatcctcaatatgaagatatgcagcagccccaccaaaaaaaaaaaaaaaaaaaagcaatgagaggtttcaatttcctaagttagaaaagggaagaaaatctggaaattagatttgttgggtcattgggaaaaaagatttaaagaagatgaaaacatacagtcaagactctttgcctcatttttcccttacaggcttcacaggctgctcaagaagccgagatcaatgccagaaaagccaaaaactctgttactagcctcctcagcattattaatgacctcttggagcagctgggtacgtagccatagagtcatttttgtcagtctctgaatcttttgtactgttcttaggatctgatatagtacagttgactcaaaagcagatgatataggtttacatgaatcccttttaagtcattaattaaattattaatatttccttttgctgttgcttatttttgaaagccttataaaataaatgtttgtcttgcatgacagggtctttaagagcaacttgcttctttaccatacttattatttgtcagctttacagtgtgacctgaatcatgactttaggctgtgttaatgtgacaagtacttactaggtgccttctgtggaccttgccctaagtagaacactgtggtctgaggagtttctttttatattttgaagatatattgccagctagggtagcatttatggtccagtatcattgtacaactaaacagtgatttttcttaactcatcttg

SEQ ID NO: 57385 - DNA, 3897 bp, Homo sapiens
aatagtgtctaactcctgaaagcagaaagtgaccttcaaaactgacccatcttccctggaatctctctaagagctgagggattagggttcttagagatttgtgtatctttgatggcactaaaatgacatagagtttacatgtatacacctggaaaaggtattaaatgttatcagatggccctcaaaggtctagaacatggtagctgtgcattgaggaaacattctgcaaaaaccattgtctcagaaagaaacatccagctctatattaattgtatgctcagacccatccctgctgggttaggtcagcatttgtacttggtttgcatattttataccattgtgtgacatcaacaatctgcaagtcacatttgccgggctgcctgtgcagaatggcagctgctgggcctagagtctagtgcaggtacttgtgaagggatcattcttactgaatatgtctgttctcttctatgtactttctgaccctccagggcagctggatacagtggacctgaataagctaaacgagattgaaggcaccctaaacaaagccaaagatgaaatgaaggtcagcgatcttgataggaaagtgtctgacctggagaatgaagccaagaagcaggaggctgccatcatggactataaccgagatatcgaggagatcatgaaggacattcgcaatctggaggacatcaggaagaccttaccatctggctgcttcaacaccccgtccattgaaaagccctagtgtctttagggctggaaggcagcatccctctgacaggggggcagttgtgaggccacagagtgccttgacacaaagattacatttttcagacccccactcctctgctgctgtccatgactgtccttttgaaccaggaaaagtcacagagtttaaagagaagcaaattaaacatcctgaatcgggaacaaagggttttatctaataaagtgtctcttccattcacgttgctaccttacccacactttcccttctgatttgcgtgaggacgtggcatcctacgttactgtacagtggcataagcacatcgtgtgagcccatgtatgctggggtagagcaagtagccctcccctgtctcatcgataccagcagaacctcctcagtctcagtactcttgtttctatgaaggaaaagtttggctactaacagtagcattgtgatggccagtatatccagtccatggataaagaaaatgcatctgcatctcctacccctcttccttctaagcaaaaggaaataaacatcctgtgccaaaggtattggtcatttagaatgtcggtagccatccatcagtgcttttagttattatgagtgtaggacactgagccatccgtgggtcaggatgcaattatttataaaagtctccaggtgaacatggctgaagatttttctagtatattaataattgactaggaagatgaactttttttcagatctttgggcagctgataatttaaatctggatgggcagcttgcactcaccaatagaccaaaagacatcttttgatattcttataaatggaacttacacagaagaaatagggatatgataaccactaaaattttgttttcaaaatcaaactaattcttacagcttttttattagttagtcttggaactagtgttaagtatctggcagagaacagttaatccctaaggtcttgacaaaacagaagaaaaacaagcctcctcgtcctagtcttttctagcaaagggataaaacttagatggcagcttgtactgtcagaatcccgtgtatccatttgttcttctgttggagagatgagacatttgacccttagctccagttttcttctgatgtttccatcttccagaatccctcaaaaaacattgtttgccaaatcctggtggcaaatacttgcactcagtatttcacacagctgccaacgctatcgagttcctgcactttgtgatttaaatccactctaaaccttccctctaagtgtagagggaagacccttacgtggagtttcctagtgggcttctcaacttttgatcctcagctctgtggttttaagaccacagtgtgacagttccctgccacacacccccttcctcctaccaacccacctttgagattcatatatagcctttaacactatgcaactttgtactttgcgtagcaggggcggggtggggggaaagaaactattatctgacacactggtgctattaattatttcaaatttatatttttgtgtgaatgttttgtgttttgtttatcatgattatagaataaggaatttatgtaaatatacttagtcctatttctagaatgacactctgttcactttgctcaatttttcctcttcactggcacaatgtatctgaatacctccttccctcccttctagaattctttggattgtactccaaagaattgtgccttgtgtttgcagcatctccattctctaaaattaatataattgctttcctccacacccagccactgtaaagaggtaacttgggtcctcttccattgcagtcctgatgatcctaacctgcagcacggtggttttacaatgttccagagcaggaacgccaggttgacaagctatggtaggattaggaaagtttgctgaagaggatctttgacgccacagtgggactagccaggaatgagggagaaatgccctttctggcaattgttggagctggataggtaagttttataagggagtacattttgactgagcacttagggcatcaggaacagtgctacttactgatgggtagactgggagaggtggtgtaacttagttcttgatgatcccacttcctgtttccatctgcttgggatataccagagtttaccacaagtgttttgacgatatactcctgagctttcactctgctgcttctcccaggcctcttctactatggcaggagatgtggcgtgctgttgcaaagttttcacgtcattgtttcctggctagttcatttcattaagtggctacatcctaacatatgcatttggtcaaggttgcagaagaggactgaagattgactgccaagctagtttgggtgaagttcactccagcaagtctcaggccacaatggggtggtttggtttggtttccttttaactttctttttgttatttgcttttctcctccacctgtgtggtatattttttaagcagaattttattttttaaaataaaaggttctttacaagatgataccttaattacactcccgcaacacagccattattttattgtctagctccagttatctgtattttatgtaatgtaattgacaggatggctgctgcagaatgctggttgacacagggattattatactgctatttttccctgaatttttttcctttgaattccaactgtggaccttttatatgtgccttcactttagctgtttgccttaatctctacagccttgctctccggggtggttaataaaatgcaacacttggcatttttatgttttaagaaaaacagtattttatttataataaaatctgaatatttgtaaccctttatatttggtgtggcctgagtgtggtactggggacataagatgttttaaaaggtataatgaatgaaaagccatacataataccttctttgggtgacttattttcttgagaacaattcagtatacattttatatatatatatatatgtatgtatatatgtatatatgcctctctcaagttgggatactgcagtgtagtctggaagttggtgaactttttctataaagagctagatagtaaatgttttaggctttgcaggccatgcgcctatgggctgtagtttactggaaccccagtgtagcctcaatactcagtgacaactgacagtcaggcacagtggctcatgcctgtaa

SEQ ID NO: 57386 - DNA, 1019 bp, Homo sapiens
tgaagagtaaatgatgctgtcttgctaaaagggccactgaatttttattaaagatgattaagtgagaaagataatctacaataaatggacacatttccttagctaggaaatggcacctacaacacagtcttatttattccttgagcagcttttccttttgagattatactccatgctagcctgtctgagtcatcatgtattctattaattccttttttttttttttttgaatttcacatgttgggtcctcctaatctcaactggaattatttaacaagagttccttaagcttttctgcactcactcacctaaaaaggaagcgtggctagcatgcaccatttccatgtcactgatgcagtaaataaagtcggaagcagaaaggtgtaacaatgtattgactcttactgtatgccagatagattataatatatgaattatctaatttaattttcacaacggacataagagataaataccaccgttacttcttgtctatagttgatgaaacacagtcatggagaggctaagtgacttgcccaatttacacagctagtgagggtggattcagaatttaagccctgggttttctgaccccagagcctgtgtgctcagtcacagtgggagactgccatacctctctacatggcatgatatatgaacaccacctgtctttgttagggagttaagaaaaataaaatcccaagagagatctgacttgagatctttagactgtaccacttgcaacttctaacctgttctctcgattgcaggtactgggtacattgacaatgtgaccctgatttcagcccgccctgtctctggagccccagcaccctgggttgaacagtgtatatgtcctgttgggtacaaggggcaattctgccaggattgtgcttctggctacaagagagattcagcgagactggggccttttggcacctgtattccttgtaactgtcaagggggaggggcctgtgatccagacacaggtgagtgaaatgacacctggaccaggtggc

SEQ ID NO: 57387 - DNA, 1357 bp, Homo sapiens
gttggagtgaggacctgtaaggcaggcccattcagagctatggtgcttgctggtgcctgccaccttcaagttctggacctgggcatgacatcctttcttttaatgatgccatggcaacttagagattgcatttttattaaagcatttcctaccagcaaagcaaatgttgggaaagtatttactttttcggtttcaaagtgatagaaaagtgtggcttgggcattgaaagaggtaaaattctctagatttattagtcctaattcaatcctacttttcgaacaccaaaaatgatgcgcatcaatgtattttatcttattttctcaatctcctctctctttcctccacccataataagagaatgttcctactcacacttcagctgggtcacatccatccctccattcatccttccatccatctttccatccattacctccatccatccttccaacatatatttattgagtacctactgtgtgccaggggctggtgggacagtggtgacatagtctctgccctcatagagttgattgtctagtgaggaagacaagcatttttaaaaaataaatttaaacttacaaactttgtttgtcacaagtggtgtttattgcaataaccgcttggtttgcaacctctttgctcaacagaacatatgttgcaagaccctcccatgggggcacttgagttttggcaaggctgacagagctctgggttgtgcacatttctttgcattccagctgtcactctgtgcctttctacaactgattgcaacagactgttgagttatgataacaccagtgggaattgctggaggaaccagaggcacttccaccttggctgggaagactatggtgctgccttgcttctgtatttccttggattttcctgaaagtgtttttaaataaagaacaattgttagatgcctggggtcagtttctgatttactaaactctaagcctatgatggtaccaaagtaatggaaatgaaaatgccacagaaatggcaataggtcctagagttagcatcttcagttcccacttctgagcatcttacttcgcccattccaaccatacaggattgatgatgctgtcaatgagatttttatgaggtttaactgatgctgtcttctaagcataaagctttatttctagaaaaactctagctgggtgggggggatatagttaatattcttatctttttcatcagctataaaatgaaggtaaaattaatagtttgtggtgcatatgtcatgctttttaagaagttaaaatgtactaaattaagatcttgaattggtcatctacgcaagcggctgaggaaacaattctgcttctgtccattgacccccagattctga

SEQ ID NO: 57388 - DNA, 1052 bp, Homo sapiens
gaacttgctgttcaaattaagtagaaagtgagactcaataataactgaactacagcaaaaggcagagaattacagggagaaaaaacttgtacttaccagcccaattctactctcctcaaactgacacacacacacacacacacacacacacacacacacacacactcttttaggggactaagagagagaagcatgttattacattttactcatccaaacagtaatgcaaaaataaaacggtagaatatgaaaagctcaggatctctcccaaggctacctactgcaggagggccaacaggtgagatgggaagaatggaaacagggaccgattttgtagctcatacaattaggacaccttaggaatagcattgtagtaatggtgatgaatatgctctgccaaattcatccagtctgcaccatcttatagctgcccagcacactcgactgttcatgtggtctctttgtagtgtgagtttggagtgtcctattagcctgttctggttaggaatgagttaacggctctttccctcaaccttagtctagtcccagggctgaggattcagctggatccacatggtcttgagggttggcatgaggagggggaagcttttttgaatcgctttttgatcacataatctgccattttaagagtaagatttgctttatggaaatcaattcattaataaaaaatgatattcaagttgcaataccatttcacagtgaaatattttgagtacaattttgttgctagaatagtcatgggcaagagttttatgcaaaatgtttcaattatgttaataaataagacaatgctacaagagtcttgtgtcttggtcaagaactttctctgtgaattgcagcattaatcactttttcttcataattttacttgacaggagacaacagttgtaaaaatgtacttagaacaagcagtttcctgcctggttcagctgatgccacatgtgttatataaaagtatgtacagccacatccaaggatgataaagggaagaataattagcaaatttgtaaattgtgcctccgttttcttag

SEQ ID NO: 57389 - DNA, 1717 bp, Homo sapiens
gaatattagcagcttaggtaattgtccatgtgatttaaagcaacaattcccaaaggtgggtgcacatcagaaggattagggagctttgttaagagagaggctgcagcccctcgacacatgctatatcaaaatttctcaggtgaggtctggggaatatgtttgttgttgttgtttattttcttttatttttcacaaataatactttttatttgtcacccttaaaagtctgaatttttacagagtcttggtccagtggcttttatccaccagcttgttcaactttagcccctgtctctcccccagtggtttttccagagccactaccttcaccacatcctctccccatccctatcccacgatgttagtgaaaacatcgcggacaggacagattggcaagccttttctgttttccaatgctgtctgggatcaatttattgaccacttctttcaaatcatttgtctacaacaactcctctgccccctaccccgtcatgattaccatcatcttctcctagatttggcagacctgttggtgctgagcctaagaggtcttccatatccgattgttgcctctttttagtaaaaccaacgcagaatagatgaagcaaatagccattggtagtcttcacatcagcctgagcttcaatcatggtctgccattttttttgacaatagaacgcattttgtcatgggtaagatccaggccatggaagtgagtcaggcagtttttgccctggagatcttcagtaattagcttgaattttctaaatgcaacttcagccttctgcagattagcaagactcacttcaaatgcacaacccttaaggctatcacaaccccatgcaattttggtttcttgcatccttgggactggtgtttttccgttatttcttatatggaacatatagctggtgtttttacatcataccagtcttataaaacgaatcaagcactcacttcttggctccctttttgccaccttttgtaaagcgactattcttgccaaccaccttagtgctgcttagagaaccaaaagggtgaaagtgcaactctggtgagaatttaggcttaaggggtgggagcgcacaagggatgcaggtttaattagggtggccagacaggatctcaccaagaaggtgacatttaagtgaaagattttgagccaaggagcaacataatttggcttatattttaacataatcagtctggctattgggaatagactaaaaaaggcaagcaaataacagggagaccagagcaatccaaatgagagatgacagaggtgaactagtttcctagttctgcaaacttggtggcttaggataacacatatgtattctcttacagtcccagaagtcagaagtctgaaataggttttattgggcccaaaccaagttgttggcaaggccaacaactccagagaatctaggggaaaattggtttccttgacttttccagcttctagagctgcatttgtcgcattcattggttaatggtcccttcctccaacttcaagctccacagtggagcatcttcaaatctctttctactccatcttcccattatcttctctcttctgggtccaatctccctctgcctcttgtaagggtacttgttactgcatttagggcctgcccagataacccaggataatctcaagatccttagtttaatcatatctgcagagtctcttttgccatattcacaggttccagag

SEQ ID NO: 57390 - DNA, 1050 bp, Homo sapiens
ctttttaaggagggaagaggatataaaagattcggtggggggaacaagacctttggggagatggttctggttggttgaaataggtggatcctggtatttatttgggaaggtattaacttttgagcaagcagcaaaatcattaagtttaatgattacatgtattagctgctctcaagagtatttgcatttcaaatgagcaagagtcaatatttaacccaaaagagtaaaaacttggggatggaacatcagccaccagagatggccactgagggaattgttttatctttttttctttttgcgctcctcaaagcccagcattccacaggctggttctaattggctgtatcctacatttttccagccaaccagccgtgggctaactgcttcctacatccatcagctatgggaaaacaaccaaagaaaataaacagaggaagagcctcgggcattagccactccagaagaaatcccagggccccaggataaatggaacaaagacaaactttggctattcaggctcagatggtttttatcagacagtccagctccagccaggaagcctgatggactcttgcaccccagggattaggcccccacactgatacgactgataccaaacgataccaaattacagtctcaggggaaggaggctcagctcctgccaatgggggattctggctgttctcatgtgaaaggcactgttggtttggtttccaggctgttgacttgagtctggaatcccctgccttcccacacccccagttaagttggcagtgggagtggggatgatttcatctgggaagcccctcttaagaatggttctctctctttttttttttttcattaagagggccatcctggaaatgcatttccacctgctggactctgaccttactggtttcctcccagcctttcctccagagagtggcaggggctacagcaagggtggaggatcctttactgaaatggagggagcatgtttcagaagctgctcatatactgcatggcttttgtcacaagttctctctttgcatctttttaaactcatcc

SEQ ID NO: 57391 - DNA, 1037 bp, Homo sapiens
ccccatggcaggctcagtaagaaattgctaaaagctattcttatccagccgaagattatccaagtaggtctcctcccacacaggttttaacagatagtttccaacctctcctgaatgacttggaggaatgtacactttaatgggttaaaatggaccattttacctaattaagagtccagatcagggaatttaaaatatcctatttcctcaatgctaagatatatgactttcatgctgagcatttctgaaactgcaataaattttataatatttatcttcaatttagtgtttcttcacacacacatacacacacacacaattaaaatggatatttgtttgaattaaaggaatacaacaacatgattgttactctagtttatgctggtagggggatagaaatcatgaacccccataggcagaaatgggcttcagggaggctaggaaccctgatttggaaagctgtagggaacccttgcagtatgtctgtctctcatctttgcctctttctctgtagctgatacattgtttgctatttctaccgacttgctacctctgctcctctacctctgctacctctgctacctctgcacagcacaaaaacagacaaccacagccccacagaaggaccaaatctctctgtctccatgtttctctgtctctctctcctgcaatccaaataccgggggaaggatttctattggcttttatagtccaatcaactgatgttggaatgggaagtagggtcacattttacaaggtggctaccaactattactgtgagtccacaggtcaggctaggagactctgtagattgcggcagacattccacaagatcttcctcacaggaggcaaaggtttgttggtgcagaacatcattcccatggcactaggtgttgaggttgggaggacagtaggcagggctcctagagacaagtcacctaactagagccaggaggattgctagctcctgacaccaagcctgatggtcagatcagcagtgaccatgctgactcatggggctggctagggctttgtcc

SEQ ID NO: 57392 - DNA, 1024 bp, Homo sapiens
aggctgagaatttcccctggtaagtctgaatccctagagaaattgctagatccaaggaagctgtgccacttcctctggtccagagtagtttaaaagtgaattggggtggccctcctgggcttggctagcatgttgccagtcagactgaaaggcaggcaagcgtctttttggctttttggaatctcctccactgcccccatgtgcagggttggctggtgactgtctgattgcatctcactttcaacccatgtgttcctataaatctcaaacctcattttaagccttttctccattctgtttgccctcattatccccctctctttggttccagtctatgtgactgagtactctaatttattcagcatttagtgctttttaacctgagtattcacaatgattaatatcacattctgcctcttataatttaattctgaggcgcatccagggttatcatttccccaaaagacagttaggtaagacaaagttgtctattaaaaaatctcacattggtgagatcagagaacacacaaaggagcaggcttaactttaagactctgggccctgctgagtctagaaaattctagaaaaggcccactggctttgtgtttatgttaaaaataaacagttctctaacagaaagctggccctcctggctgggaggtatgcatagtgctttggcagagcttgcatctgaggacacaggtttgatatggagggctacaaaagtgtgcaacatggaggccaggcatggtggttcatgcctgtaatcccagcactttgggaggctgaggcgtgtggatcacgtgaggtcaggagttcgaggccagcctggccaacatggtgaaaccctgtctctgcaaaaatacaaaaattagccgggcgtggtggcgagcacctagaatcccagctatgaggctgaggcaggagaatcgcttgaactgggaaggcagaggttgtagtgagcccagattgcaccactgtactccagcctgggtgacagagtgagactccgtctcaaaaaata

SEQ ID NO: 57393 - DNA, 1097 bp, Homo sapiens
ctcagagttgccgtgagaaggggtctcacagccaggacctggaagtgttccccatgcccgtgattaggcagctgtcaggacagggagtggtgactgtgcattttaatagaagagctctccctgcccatgttgagcagcaaggttataaatggaacactgcttgctaaattgccccattttgcacagactcacttcatgagttgccggctctgatgtgtggctgaatttgatgattaagcaagaacaaaagaactatgaatctactggggaatacatccaattaagtggtatcaacgcaggatgactgagaagagaatggtgtgttaatgttttcaccggccttgccaacaaatatttatggagtgtcaatagggaggcaagaaggtgcttagaaggtgctgaagcaaagtgcttagagttgagatcaggaatggctagtggcatgttatgggacagaggagggaagacagacacacacggtcaatctggagacagaattagcacccttgtaagcggttgagctccttcagatcttcagacttctttatgtaattctccccaaacaccccaattctgttcagatcaatggcatttattgtgtggtgtgtagaggcctcaggagctcaaaagagatgagacagcgcagcccaggggcagggagtggtcaagagaaaagacttctctgtccttattccggcctccaggaaccctctgtagtccactgcagccatgatgttgcccttaattctgaacccagaggaccctgtcactctgcagggacttgctctgcaaagccctccgagctaatggctctaagacttgctgtctgttctagtgcttctcaagctctctgtggtgaaagaccaggtttttattttgatttcttttcagtttccaatccactgtgggatcaatacttttatataataaatattaattcctaaatttgtttagtaaataaattagaaattgaaataagaaacaaagagatacaaaacacaagaccacgtttaattatcacattcagcagacatacatagacctaccaaaatcactacagaagtttctagatgcttgctctccatttctttgcttat

SEQ ID NO: 57394 - DNA, 4740 bp, Homo sapiens
ccacgggccagagcagcagcgagagcagctttccccactccctccccctcgcctcattcacccccacccccctgccgagcgaggaggagccggaggagaggaagatggcggcggccgccagcacccgcggtgccgcggggccgctccgaggagcctgagagacccacggaggcttcgcgggaagacgcggcggcggcggcggaggatgagcctgcagagcgcgcagtacctccggtgagtgccgaggccgggctggtacgtagggggagcgggccgcaggttggggcatggagcaacagacaccgaggtaagtccggggtggcgggggagttgctgcgtcctctcctcgccgggcaggtcggcggagactgcaaggggatctgcgggagggggcggaacgggtatgggtgcctagcccctaccgcccgggctgagctctggcgaagccggctcgtcccggtgcgaggagggaggttggggaagcgtgagaatgtgcgcgcgcgcccttggtctcgggtttgctagcgaggggtggagagaaacgtccggggaggcggcggcgaccccgagtggaggtgggtgtggaggagtctgatccccgtggcaggggactcgtggtgtggcgtgggattggttggagcgatgcatgagtagaggacggggaggaagtctgcacacctggggtgttggggcgggggaaccgcggagggcagacagggggagagggagaccgcaggaaactggagcttgttcttcattctcgggttgggagtattgaggaataatgtcatctgtagttagttggcggtgtggggaggcgtgaaggggaatagatggggaagtgaggaaagagggaggcactgtggacaaggttgggtttttcagaagaaactgggttagaatcagtgtagtcggaagataccattctgagagtcgtgtgtattcattaagagtggtgtaaggaacttgtatgtcagaggtagagtgacacatgggaatagtgtgtgtgtgtgcgagatgtgtgtctggggtggggggcgcggcgattgatgcacatttcaggatgaagatgtagataggttgaacttagtacctgatggcgagaacatattgaatggaaggacaccagcttttgtgtcagctgaaaggttccatggaagctgagtaagagcttggaggcagaggtaaagtgggtcaaaaatcttgatagagaaaagtaaggttgttagatcctgaaattaactggggagtgactactgcttagaaaaggggaagactttaaaattggtcctttttgtctttcaggagcagaactaagaaagggaggccttatggaaagatgttttttaaaaaattgtttcataccttgcggaggagggagttggatgaggtggaagtctgaaatgagtggaaaagtcactttagctgtttagtgacatgaaagtattgacgtgtgtggatccctatatgtatattgcaagaggtgtgtagttacctgatacatagggtggccattataatttttaaagtagtaaagttttattaagcataatagggagagaagagaatgatgagatatttgaacaatgcttgaatgcttgattttaacacaacatatatgcccagtgaccacaggacagttggaatgatgtctgtaatttgaggtcctttttttcatcttagatatccctttgttgtttaatatttcaaataaatatagctatgacaaagatctgttgtaggtgctatagagagatggaaaccatcagggtgctgattagtcttaaggaatttgcagttgagtatctgttaggcaagtaaattaaacagcacagagtgtaagtaccatgaaagataccaaacgttgccgggcacgggggctcacgcctgtaatcccagcactttgggaggcctaggcgggaggatcacctgaggtcaggagttcaagaccagcctggccagcatggtgaaaccacgtctctactaaaaatacaaaaaattagctgggcatggtggtgggcgcctgtaatgccggctactcgggaggctgaggcaggagaatcgcttgaacccgggaggcagaggttgcagtgagccgagatggcgtcattgcactccagcctgggcaacaagagtgaaacttcgtctcaataaataagtaaatacataaataaaaataaaagatacgaagtgttttgagtccaaaggcaggagatcacctgagcaatgggaggaaatcaggaaagactttgtttatttgctcattcatgtactcatgattcattagttgttttgttgatcacctgtatgggaggcattgtaccaacatctgagaatagaaaaagaacaactccaccctccttttacagagcttacactttgttagacttcaagaaaatggcacttaggatattgttcatccttaatgttcattttgacagatgtggattgagaagcggggaattccaaatggaaggaaactgagcagagttatgtaggtagggaagctggggggaagggaggtattcagtccagttagacaacaaggtagtgtgatatagctgagaaaacttaagagttgtagagattatcaagtttgaccctttccttttacacatgaggaatgtaagcccaaagaaggtaaaattgttgaggctcatatagctggtatgtggaaactaactgaaatgtaggtcttctaacttcaagtcagctgtagtacactgcatgtcagtattcatctgttctttccacaaatataagttgagaacataatatattctagtgttgagggtacactggtgaataaaagggtgaacatgggaggatatattatagtagaagggcacagtcagtaaacatagcagttaaatatatatcaggtggtcacaagcactaggaagaggaataaagtaagacagggatgtactgttttatctggacaaagtggtcggggaaatcctatttgataaggtgaccatatttaagaggatcctgaatatcatgttccataatttatagttaaaatgggtagacaatggagaatctgagatgatttgctagaattaatatgttcacagctatgtgttaggaaaatgactctgtgtaatgtagtggtggataacagagaaaagtaaggttgttagagcctgacattaattggggagtgactactgcttagaaaaggggaagacttcaaaattggtcctttttgtaaggttcttttccttacaaaagattccctttgggactttggtcctgaataaggtactggcagtggatctagaaagttatgaaaaacaaattggcagagtggtggtacttttaatggggaagatcagtggactttgagaggcttcttgttaatgtgccttatattttatagcttgacatggtagggaagacttccttagatgtggaatcaatgatagtttgagatgaacttagttctttgaagaagggagaaaaaaaatgaatacaatgatatttttcagctaaaattgagcaggcaaaatgggggaggcataggtcctggggtcccttaaagattcctggagccagtcttgtctcaatcttaggcatttgtcctaagtaaattaaaacaagtgttagaagtctgagacctaggtggtggttgtgggaatcataaaggcttgtgccagtctgaatttccctcctcctcttttagataatcattccatttaaagtctgcagtggggacactagagaatgtctttagggaagcattatgttcacgttctttgaaaatagaactgttggtttttatagacacttcagggaggatgccgagtattgctgaatggatgtggttggggggtgtagcaattgttttcgtgaccttgacttgaagaattttcttgcctacctttgtcagtggtggaagatcatgactgggcaatttttaatctctatagctacagatcctgcctcatgtagatgaaaattagttttgtcttggctgaattttaatttgttagagtaaatgagctgggatgtctggcattgaaatggtggggtggtgggaaaccaaggagcaagatggctgtttcagaagggtcagaaatgaagataggaggcaagaagtcccagtaagaccaataaagagagaattcaacatcaagggaactgaattagtctcaagttataaaaatagagcagagatgaaaggaagaaaacctatcttctatgtgggaaagatgatgatattctgggcaggaaaggataatgaaattttttgtttgttgaaaggtaagtatctttttaatacactgacaagacttctaagagaatcagttaagttgaaaatactttgttatgttttataaaaataaaaatatgatcttaaatatgagggttctaggccgaataacattgggaatttattactcaaattgaaggagaattcagagtattttctcttttgatttatgacagaatgaaagattttaaaagactttgacacctctgttgagtaaaagaaagggtgtattgaatacaattcatttgatgggggtaggagaaggttaggataggccgcaggtgaggtataatattatgctttaaaataatggcattttgaaaaaaagaaaagtggaaattaacatatcaaagttggaaaagcaggagtgggggaagtattaaagtaccagacagagaagacatcaaagttgttttggaagatgagaaagtagaataatcatagctatagggaataccagt

SEQ ID NO: 57395 - DNA, 1070 bp, Homo sapiens
gttttctaagccagcagaaaaatggttgtcatttaaataggaagtaaaatatccaatatggtataaaataaaaatgtatcactataaatcttgaaacagagagatagtggagataaggctggataaagtagcaagctaagccttatcctagcctggggagaggaacagagaagatagtgggagcattgggaggaatatataaataggatggtctccaggttctagaagagtctagtaatgctagatcagatagtcactgtatcctgaagcttctagaagtcttagagcacatgctgattttagtccatgtggtccacgaagtcttcttcacctgccccatccccttcctttccaccaggtacatgctttacagaatgtaaagtagcttttgtcccggaatatcagccaaaggtggtgacattttttgaatgaatgactgtctctttaggcttataagtctttgttataacagtgttaatagcttattacctgcttggatattgtctgactaaattattttggcagttaatttctgcttcccttgtggtttcatttggattcaaaatgtatacttcctgtcctatcttaggtttcatttctttgctttctaacagctgtggtcttctgccttcatggtagaagaagcaattgctgagttttatgttgttgtttttaatggatgtgttacagtaagatctggacccactagtattgcaagtttcatgaggcagttttgaggtggagagtggttcacactttaaaagggctggtgtgttttatacttgagaaaaattgtttcctgcctccggctagcctttcaaatttttgtattagtgtcatgaatgagtgcctgaaagtttagatgggttagtttaattgatcttgtgtagagaataaattataaagcatacgtcttgtagatagtggattattcatctgtttgtaggtatattggcagatggccattatatattgccattaaagttttgcagtcaagccatattttagtttagttgctgtattgttatgaatagacttatcagctgtctgggaaattgtaactaagcatt

SEQ ID NO: 57396 - DNA, 1877 bp, Homo sapiens
tttaggaatctcaagtagactatgtggcagctttgggtttttttcttgtctgtttcatttacaacaggatttctcaaccttggcacttattgacgacttggtccagatagttctttgttgtggtgggttgtcttgagcattgtaagacgttcagcagcatccctggcctctatccattaaatgccagtatcttcccttgcaatcgtgacaataaaaaatgtccacacattgccagatgtcccctggattgtaaattcacccccagttgagaaccactgatttagaaaatatatgtagtaaagatatatatgcactgcatgggttcattttcttgttttctcctctaagccacagattggattttcttttcagttttcttttaggtagtaataggctagttaccataggcagacattatccataaacatttgtacatattttaatttcttaaatctgtgttcttttactggcaattattgaatacttattgtatagagcacaattaccggggttatgcctttggcaaattaaaagaaagacatttaagtagctataatagtaggtcaaaggtattatgtaagtataggcaagaagtttattccaacagaggtggagatggggtggagagggtgtctttgaggaggtgagatttggtttgtacattgaaagatggatgggattttaataagtggatattgggcaaattgccatttcaggcgggaagaacaactcatggctcctttattccaaataagttttttaaaaattgattcactcacttaatacattgcattaattagtatgctgaccacatctaagtttttcttagataaggtaggtttatggacagagaagtggtgatgtggaagtggtagttcaaagatttggtggctgctgtaggcctcaaaaagggaaaaggaatttggtcaggcaggatcctacagaatcccttcctttaactgtactctttaatgtttaccatccttcaggatcttttttcacttgtgtcgctctcttcttttaaattattccctttaccgatcttactttctgtgaaccaatctcaattttcctttaaaaggccttcctgatctgatttttcttttcaagttctgtccttctttacctttgttttatggccaagcgtttcaagtttgccctaacctatgtttttcctttagttaccatctacttttccttaatcccttgctatcagtccatttttttctgagtacattattgaaattaccatttccaaaggtgccaaagacctcacggtggccaaattcatttactgattgttttcctttccctcaaactcacacttttgttttccttcctctgtgtgtccccctctcttgtatctgtccttctatccattccaccaataaacattcagtttgggccatgctatatcccaggtccctggggataaaaagagactgtgccctcaagtagtttcactgggcatacaagtaagtactcaattaccaaatagttcatactggcagtggtatatacacagaggctttacagggtgttctgagctctgttgcgtttagcatcaagatttcatgattctaattacattgcccattcttttgaaaaattcttcctactgttaccttacctgcatttcttcctgcaagcatcaagaaggaagcattgatctggggctttaagcaccatctgctactttctgtgtgggctaacaacttaacatttctgtgtcttgatttctttatttgtaaaacggaacattgatctcctaaaattgctgtcagtgttaacaaaggtttacatgtgtttaacaaattctggttctttttcaggttctttaccacctgtccccctgccaattaatctttgcgttgctt

SEQ ID NO: 57397 - DNA, 3265 bp, Homo sapiens
cacataacttattatagcttatgtcataattattccattttattattagctattgttagtctctcactgtgcctaatttataagttaaactatcataggtaaatctgtataggaaaaaagtggtatatatagtgtttgttaccacctgaagtttcaggcatccacagagtcatctcccatggataatggaggactaatgtacatgtaattctgaaaacagctttgggctaataggacttcatttatagaatcctcaccttgagataaggaggtagaatggaggtagagttgtgggaaggagaagttctacagcattagggggaaatatcagaaatctttagttactaaggttaagtgaagtgtctttggatttaactttttcaagtcataaagaagaaaaactttgcagaccctttgatgattagtgttttgttctcacagttcttgatggcattttcctactgttgtgtcttgtcttaaatgacaagcatgattctgaaagtctgttataactgctatattgcattaatattctcatctgtttcccaaaactctttgggttcttttctcagatcgcagaagttgagttctttttctttccttctccttcccaaagacatataatagtatttcagtgctgtgttagttgggatacagtataatggatgtgtctgttttactaatactgcctcttagaaaggttacgaattatttacttttgtatcaggtgatcacctaaccagattatctttgagatactgtacagtaatgagataattagtagtgaggtaatcaaaggaaaatgcaactggaagatggtattcaaagagaaaaatgagttaaagactgcttacttgaaattttttttattactggtgaaaaaagtaaaaaagcatagtgttgagagaaccaccataggataaatttggacattaaagagtgtcttaggacatctgcagaattttgtgtgtgtgcatacatacaacttgtgtaatatattatgaggtgaaatttttgtacttttaacatctaattctatgaaatcatattcctcaatttctgtttaagtaaccaaaatgacagtattataccttgtctgaaataatcattagttttgttttttgatgaaaaaaggttagaccattttaagaaccacaactcaaataataaggcatactggccataaattctggtttatgaaaggaaaataatgtaacagattaattgctttctggttttctaatgtaatatattaatttggttgtttaaacgcatacacaggtctttttggctccctaagacagcggcacggcatagcaagttgaatgagccaaggagtttgaattaagactggcttaatttgtattttggttgtcctgagttcagatccctattatatactagcaatgtaaccttgaagctctctagttttttaccttggctacctgtaaaatgaccatggtagaattactaggagaattacatgagaagatagacacagtataatccctccatagccgtgggagattggttccaggacccccacaataccaaaatctgtaggtgctcctttatataaaatggcatagtacttgcacataacctgcatacattgtctactctaaatcatctctagatcacttacaatatgtaatacaatgtaaaagttgttacactatattgctttttaatttgtattttaaaaaattgttatttttttctgaaaaaaaatttttttttttttttttggtctacaattggttgaatccatggatgaggaactcaccgatagagggccagctcataccacaataaccctcatgctttctgcttttttgttacctgtgctgtttctttatacctgaaataacaattagtctttccactatttttggcagctgatttgaagctacaagtgatggcagttctcaagaatgtgtcaccaggaacaattctctctccctttaaatgctaacagggaattgttagcatttcctttgtatgagggttacttgcttttgtgttggatttgggagaggtgtgcagtatatcctgatgtggccatataggtatatcctttaatattaatctttgtgaaacttaggagactcctgagttaatatcctttatctaaaaattttttggtatgtgattttattattttataaataatgtttttagtaatcattttgacctgttgtttgaaaggcttattatactcttagaccatctgccatatagcttctgggttagcttccattcgcatgtaatctggcatacactgacataccttttcttttttcagttctgacattgaggcttgtatagactagcaataaggaataacttcacagagaggctgtttgtttgttcttttgacatgattgttagtagtaatagccagcacttttatgttgtgccagacagtattccaaatattgtgtgtttattaactctttgaatagtagatgtatactattattgctctgttacacagctaggcaaacaggcataggagacatacatgcagaaagtggcagagctgggttttgaacctagatatcaggctgattctatctgtatctgtatagttttataatcttatttgcttaggattgtatgattttatttttattttatttttgtttatataaaacataatgtaatatgtagaattataaacatatataatctgaacactcttctcatcagtgtcaaccttcctaatgcactttttctttgtagataataagcgggaagtgggccgggtagttttgccaaaaaacttacttaggggagataagtttttcttgtatatttgaaattaattcatttagattgctttatcttactgactagttgacctgctattcctcccttattatagctgttctttctgcaggttttgtctttagttagtatcactacttagatacagtttatttcctagaacactggggaatattgagaaccagctattatgggggaaaataactttgacctatcagggctaatagtacaagtagtgaatgacttgccagtttttgtggataacttcactgcagaagatttggattccattttcctcactgacttggttattacatagagatgtttaggtgccagcttctgacactgaggattataattttgcatgtatgaaatttaaatcttggataataacttgcttctaaaggaaaattcaatgtaacttttaaaaagtaacagattactaaagctatactttatatgtgacctgatatct

SEQ ID NO: 57398 - DNA, 1090 bp, Homo sapiens
attccttctagagtgtctaggaggaaaatcctttttcttgccttttccagcttttcagactgcccacattccttagctcatggcccccttccatcttcaaagccagtagtcacattactctatattctacttcccccaccactctttctctgactctcctgcctctctttcacttagaaagatccttgtaatcacattggacacacccagataattcaatacactctccctttctcaaaatccttaactaatcacacctgaaaaatccctgttgtagataaaattcaaggttctgggattaggatgtggacatctctaaggagccattattctgctttccacaatagctatacagcctggaacagtgcctcaaatcacatcatagaactcagcctgtgaagacactttgcagaaccttgattgtgtcagttactttgcatccctgatcctaacaccactcatgctggccctattggaaattggatgtgcttgctgctgctatccagaatggattagccacagtccccactttctctcattagttcacacttaaatgtggggttgatgtgtttgttgatggagcctgaattatgtgtctgtacactagctgcaaatgaagctggtaaatatataatgggaagcaggttctgctttataaattgtggggatttctcaaaaataggaagagaaattcagatgctgggcttgaataccaaccagagagaacatataagtacagttgagagtcattggtataaggattccattcgtttgacaaactgtaccagagatacacagatggatgagatacatttctgtttctgttggtgctagccagagcaagagtggaaagccgtgttcatatgtcagtagcctaacataaatcagtactatttctctgagactctgataggaagccagctctgttatgtgaaggcttttcacttagtgtgtttttcatctgttcaccaaaaattgctattggctgtacttttgcctttcaaatggtgacatgagaatagttgatagaggaaggtgggtaggttttgaggtttttctctttcactccagaaggttatcagttaaagtg

SEQ ID NO: 57399 - DNA, 1028 bp, Homo sapiens
cctgtgattatttattatttattttattttatttgtttttagagacacgatctcgctctgttgcctaggtattgtgcagtggtacaatcataattcactgcgacttcaaactcttaggctcaagtgatcctcccacctcagcctcctgagtagctggaactacaggaatgcactgccactgttcctggctaatttttacaaacttttttataaagatagggtcttattgtattgcccaggttggtctcaaactcttggcctcaagcgatcccctggcctcagcctcccaaagtgttgagattacaggtgtgagccactacacccggcaacctatgattatttagaaatgtttgattcatttccaaatatttgaggaattagagaactttattctttaacttagacaactaattctagttgtttatatatatatttttaaatttgtacttctatgactttaattcttttaaatttctgagatttgttttgtggttcagcatatgttctatcttggtgaatgtgccatgtgcacttacaaagaaggtgtattcttttgttgggtaaaatgttctctaaatgccagtgggatctgttgggttataaccttagtgttggtctaacctcactggtttgttttgtttttgttttttattgagacggagtcttgctctgtcacccaggctggagtgcagtggcgcaatctcggctgattgcaacctctgccgcccatgttcaagtgattcttgtgccttaacctcccaagtacctgggactataggcacacgccaccacacctggctaatttttgtattttgagtagagacggggtttcgctgttggccaggctgttctcgaatgcctgacctcaggtgatctgcccgccctggcctcccagagtgctaggattacaggcgtgagtcatagcacccggccactttactggttttctgcctactttttgttagttattgagagagttttggaatctccaaataattatagatttatctatttctctattccctgtt

SEQ ID NO: 57400 - DNA, 1219 bp, Homo sapiens
catttatgaaatgcgtgttttatcttcgactttgtggcttgttgttctctggacagcctgttttctccatattaactccttgtactttgtcttgtaatgtccctttgtcagttttttcatattaccatttccaaataaatttggtgtgccgttacttacattaacactacttttaattctagtatctactcatatttttgctttcattttggtatccttcttgtttggaattctgttaaccttttatctgtatgtgcaagcatctgattactttgttatgtcttctaaggtggtcttatctgaccatttatatattgagatactaattttaatctgtttattatttcaagaaggtacaggggttgttgcaaaaaaaggactatttttaaaaaggcattgggttcattgctttggaaagcattgttttggcataccttgtttaatgtaaaaattgagatgaggggaaatagctttcctgttgtttatggcttaacctactttgcttgtttcattcatttgggttgtgagcttatgttctgtttgaagttatagattttatatttatattatgttctgtttgaagttttagaaatatttaatgttctgtatatattatatagattccactacgatgaaaacaaagtgtgaatttcagagagccaagtaaatgattatgtatttatctgattgactgtataaaatggtaggttttcttaagaaaaaggatgttattcctggttctcagatggaaaacctttcagattgtttttggtgaagacttttaaaactattgtcaggttttagaaaccttgagtttttaggatctttaccttttattgagaaactgtttagtccaaattaacctgaatttatttgagcaacttgtatgctgtgcactatgtgaggcactacatatgcgtaattgaataggacagtttctagtgaaggaaatgtgtacacaaataactttattgtagtcctgtgagtccaataatagatgtgggcattaagatgcactgggagtactcagccaaactaagacctgcttttaggagttactgagtttaaaatacaagaatgggttaaccaaacaaggagggaagtgggagggcattctaggatgagtgaaaaagcatgaataaggatactgaggggcaaaacaacaagaaattaaaagtaattcaggtttattggatcacaaagtgtaaagtgaaaagct

SEQ ID NO: 57401 - DNA, 1895 bp, Homo sapiens
aaaacgtgacattttcaactgatcttagcattattcatactacctataattgtgttttaattgttttacatattttttacataattgttttgttttacatattttttcttcagtaaggagtccatctgcttctgtgttctacagggcattctcatcctggtcttaaaagagccctgcttggtaaccggtatctgtttgtcctgtagtgatcactcagttttcagacagtgaggaacattagaataacattttggtctataactagaatctgttagaaatatatgagacagaatttttaaatgtttgttctaagaaacattaaacaaaaaaagaaaaaggctttgacatttttcctttacctttcacatgaagtcatttcaaataaagataaaataattttcttcataggggttctctgttattgtgggttaactcatattttcctcctctcctctatctagaatgtcttaaaccattctaccttatgagaaattggatgttcttgcagatagtcattgtgggagaaaacgtttcatttaagtcccagatgaggaccgaaaacttgaaatcagaggagcatctgaaatcaagtaatattaggtaggatgaaaattacaagggatttctacatgtttttattccttttggagatgtgtattattcatactctgtgaatactaataaaattagaaacttcctgaaacatttgattttggccaagatcgggatggggcatgctaaagttttattatttatgtgacttcttgagaaccttggcttatgtttatactttgtcttgagcatttttatcttgtggtccaaggaagcttttgaaaattttactgaagtaaatttttaaaaattttgttttatatgaggtctctgaatatttatgataaacgtagggacacatgatttatacctcatcctttagaatgaaagtttctgtggtttttttacatacttagtaaatcatgtgagtgcaggtaacatcagcttgcagttctgtatgtcagcgtggatgcaatcaagcctcccaagtgcctgtagaaataggtgtatgatagtatgctagagaagccctcttgtacatgtgaattagtaactattgctacagcagcttataatgacagaaaatgcaaagatgcttgatctcaaagatgcagcttttaactgagagatgatagttgcctctgcgagagtgatacctctagcctggccatttcagaaggccttaaatatgtttatgagctctggggtttggaactagattgcaagggtggaacccaagctctgccatttcctagttatgtgaccttgggcaagttatttaaccactctgtgcatctattccctcatcatcaaaatgggcataatattgttacttacctgatagaattgttgtgagaatcaaagatttagtaatatatgaaagctaagacctggcaaataataagtgattaaactatattattgtttgactgctggttaattcttaacagatgagtttagtctgttatcagttagtgtggtatttctataatttataattgtcttgatatatcaggtccaattttaaaaatgtatttgttaaataacgtaatcagaactaatgtttggagaaaaataaaaaaaaataacatcctgactcaattattttgtaatttttatgtatctgcctctggttttattttctgtttatactaagaacatagtcttcatgacatctaaactgtttttcttttgtcacttgtggtggtagaggacatagggttttttactacaactttgaaatgtctttttcaacccaatgtgccccttcaaaagggatctcatgaagcagtgaggggagggagggacacctgactagccagtcagtaaccagattagcaaaa

SEQ ID NO: 57402 - DNA, 2204 bp, Homo sapiens
gaatctgggtttttccgttcatctgtattaccacttccttacttcagtcttatatctgtagtaatctttctaaaatgtaaatctaacaatgctatgctcttgctttaaattctgcactggttttctattgaaggacagaatctgaactccaaggcatgtcatgcaagtcatgcaaggcctctcacaatttgttctgtctggattcttcagcttcattatctgtggctttctgccttgcatttgatgctcactcactagcttagctttgctttttattgttctgttatttcttctgcttggaagaataactccttctcatcctttgaaattctcagaccagtgttggtccttaataaaactaggtacacatttttaaagaatataaattatggagcgaatgttgtggtatagagtattgtagtgttgggagatttgaaaatccttcatgagccctaaagtgctgtaaagagaaagcaaattagtatttttattaacgtgtgcaagaaaagctcctttaggagcagcatcttctctagattttcttttccaaatgacattcaacagtagagcaatatgatttatttttctctgattaatattgcgagacttgatgtgtgtgtgggtgtatacgcatgtgcacattaagtgcatgcttactttatgtctggccaattattcagcataaataattatgattagattattgtgtttatggttatgattgagaaatgctgttattatcccaagtattccttagaactctatgaaacaagtgaacaaattaacttgtggcttttggttaaatttcttaaaaaaaaaaaaaacacgaaaaaactcccagcgtgttctcccaaaataaaagagagtgattcacttttccttagcagctgtgagtttagaagatgttgagttatattcctgaattctgctcaaaggggattgggagttcaggcagaaggaatctcccattttatgtgccctgatttggaaatatcttacatttttaaaccatgaatcttagactatatattcttttttttttttttttttttggagacggagtctcactctgtcacctaggctggagtgcagtggtgtgatcttggctcgctgcaacctacgccccccaggttcaagtgattctcctgcctcagcctccagagtagctgggactacgggtacatgccaccacgccaggctaatttttgtatttttagtagagacgaggcttcgctatgttggctaggctggtcttgaactcatgacctcaggtggtctgcccacctcagcctcccaaagtgttgggattacaggcgtgagccagtgcccagctgttaggctatatattcttaaaagagattatcctgtatttgttacctagcattgttacataagtgctatatgtataatcaagatatttgttaaagaagataacccaaattttagtattttcctctagtaacattatttgaaaaattatcataaaatgcttaagtattgaaagccccagttctatgggttgttactatcaaacatttcaatttttttttcttatactcttgtgtaagagaggaactattatataatatcataaaataatggttaggagttatactctggagccatattgattatgctacttctgctacttactatgaccttaactaacgatactacttaacctctgtctccttgggtttcttgcactataaagtgggaacaataacagtacttagtgtgaagtaaataatttatgtaaagctcttagaacaatggcaatagtaaacgctacatatagtgttagctgtacctataggcactataatatctatatgtattctaatgtacctagtacctatactacctcttctgtagtacctgtagtatagtatatagtactgagtgtttagaatgcattaaatgtatttatagatgttgattattccacgagtatttattgtttcagtttattagctttcaacatagttggctgtcactgaatgttccatattttattcagccttttaatgactttttctttttttattgcttaatagaattgcttaatttttcctattatttaataactaagacaatatatttcgatagctatgtttaatagtgttattttgttattgaaatcatggtgattttattcttggttcattcattattttcattaattccttcagcttaaagaatta

SEQ ID NO: 57403 - DNA, 1074 bp, Homo sapiens
gaagaggggaaatttgaaatagttatggtgactagtgaattgagaaacatagtaggtttttttggcagcattgagagaatttttaaaaagttaatatcatttaatattatcttaagtaaatcacatgtgaaggaaaacagcaagaaagtggactctacttagcagaagaggtcacttaacttttaagtggtccttaaacttttaagtattggcattaatttgccaagaccttgtgctaccctgatgttaaagtagggatgctgtttgcagtgccacaaatatagctgctgtatatccttatcgtagtatatgatttcacctaacttttagtgttatttatatgttagttaggcctcgtttgtttctaactgatactcttttttttttttttttttttctatctaggcaggcagaagtcctgaaggctgacatgacaggtattggctggcttatttctttttcacaacatattttatatattaaattaatggaaggatatcctctttcttatattatgcacagcactaaatcccatcttagttgccaaaagggatgatcatttactatctgctttaaatatttattgtttatgtagtttgaattcttgcttaaataactgttgggaattgcatgtaatactaatatatggtatactgaattgaatgttacctaatttagtttatataatcacttaatttttatgaaactttttattaatgatttaagacatacagaaaaaataacataccccatataaaccaaaatatcttacagtgttaggctaatatctttctgggaaatttttttttctattaataattaaccaaactttagtaggtaaaccttcagaaaaaatatttatagaaaaattctattggaagtccttgaaattgagtgagctaccttgctgcctttcttttctcccatatctttgttacttttttttttttttttttttgagatggagtctcactctgtcacctaggctagaatgcagtggcgtgatctcggctcactgtaacctccgcctccctggttcaagcgattctcctgcctcagcctcctgagtaggtg

SEQ ID NO: 57404 - DNA, 6033 bp, Homo sapiens
agcagagatcaaacccctgcactccagcctgggcgacagaaaaagactccgtctcaaaaaaaaaaaaaaaaaaaaagagtaaatgatttaaatacgaaattaggaaatatgttgtaatcaccgtatactggtcagtatgccctccgtaacagcatatgccatcctaaaatgtaataagaaggataggtactagtgaatcttattctaatttctcaataatttagttctgcagtgaaattcacaaaaaaaaaaaaaaaaagaattaaacagcatacctgccaagatttgcaaagaggaaaaggactattaaaatatctttttgtcagctctagagtcacttaggctaatgtcctaagagttcatggataatctcgtgtcatcttgttcaaggaaaagtgtgttggggggtgaatagcttgtatatttactcagtaaaaggtactactcagttctttccattattaacagatttgtcatcatctatattgtgtatatcagtgtctgctctgagttactgtattatgctcttgaattggcattgaaaacataatctattgtgtgatgaaaacagaacatggagcaatatcaggctatctgtaccatttaccttttcttagacattgaacaaccttagtaaatagtcttagggtttgacctttataggggacctttggctgcccagaaactttaactaagataatgtctgctcatttgaatgatggtcttgatagatgagaattagtaatcttttacacttctttttcttgccataagtgaattaaagcagggttgactaaatctattagttagtgattaacaatttaactagggatgaggagctgatagtaaactctattcttaactagcctgtaaactcttaggagcattaactcaaatccaggagattctctttgcaaaataggattgtggtggctatagatgctaatagcaaacctaaagaagagtgatgattattccattgtgtagtagcaaaacgaagtagcccagctagttatgggaaatatataattgaaaagcccattattaagttcacctactgagggagtttactgtcagttattgcaatcataatcccagtgattgcaaaggttaatgtgccttgcatgactctggcagacagcatggccccaattttgtattatgtgtagtcatagcctgactttctgattacattctacacccagtctctcatctgacctctttagcaatttaatcctagtcttctaagtctttgtttacattaaatgactaatgtggattgctcacaaaagtatcttaggaaacagtctaccgctcattaaaataatactgtcatggcttattcggtcaatatattgagagaggagtaactgcagaataccaaagcaactgctagataatcagctgatgtgagaattctgtaaggacatttgtgggagtccttacagagactcccttacagagacaaaaaagaaagaaaaagttgctttggaaaaagagatacagtatgagagtaaacagaccaacttgacagtctgttatttcaaatgggttggcttactgtaaggcatatagtttcctgttatatgaaaaggcagaaatacaaacaaaaagcaaagggcaaaccattcttttttttttttttttttagcccttttcatttcatgatattatttcaaaactaaaaacagaagcattgtaaaccagacttagtcattagtcaaaagttgaaagtcatttgaaatatagtagtataaaacttctgcagcattctatggaatatatttagagcaggttttgccttggggatagagcaggaaggagtcactggtgtggtataatggttttaactgctggggtttatctatctaccgttatgtttttgtttttgttactcagattctaagctgggtccagctgaagtctggacatccaggcaggctctgcaggacctgtaccagaaaatgctagttaccgatttggaatacgctttagacaagaaagtagaacaggatctgtaagtattacctatcatttgagaagtccctgtaagatcaagaatttcaccgagactttaaaacagtttggttcgttatttatttttcaacctgttgcagaataaactttttcaatggaaagtaattctagtatttgtgatatttggccattggtattatttcaaatacagtctttggaggaggtaagaagagaaatgtttagagttgaattctattaaggtcattacggcagctcttttagggcctgtcaaaaaaaacaaatatatctatttcaaatactaagagtgtttggattgtctgtggtcagtcttataattaagccgcgatttaaaaaaaaaatacaagaataggctttagaaaaatctttctttgttaaacgtgattctataatttccctgtcaggaaaatgtatttgcattgtaaggaaagttccttcttttaattaaataagttggtagtatttcctcccctacccccaataaaatgaaaaattttgtgtatttagacttttccgcttcttctttctataaggggcaaaatggcagataaccagattcccaagtgagtaattgtcttttgtggaaggctttgccttacaaattggaacagggacattagcctgatagaaatttaaaaatcaattaagagtactttgtctactaatgtccgttaccctaagttttggtgaagattagttttttctatcatttacatctgccttagatactttatatttttaggaagtcgagtaatacagctaaattacgaccatcaaaatccttatcctgtgatgttagagtcaaggataagatgtcatcagaaatgctgagggaagtgattgtcctcctaagtcattaaaaagcctagtgctctagagcctcagaagctgatgttgatatagaattaggtacttccatgctttccaggtaagttgtaaacctcttatctgtgtttgcttcctttaatcaggccagtaatatcttccctttgttctagttttttattccccactgtggtttccaggtgagagagtgactgtattcatcataactggacttaaactgattccatatataactagattaaagaaaagcattttataacaggattttggtatgccatatttcagcattatattgtttcttattgtaaatagccaaatttgaaatgtggcttatgtttcaatcacaagagaaataaacaaaactattaaatagcagtgaaactgaatgctctgggaaataacttttggggaagtaagagatatggcttactatttacaaaatccctgcccccatatacatgtcacttgttagggtatagtccatcacatttggcactatatgtagaaatttgttaataccttatttttactttgatcttgccaccattgttctgaatttctaccgggattcctaaataaactctagtagttctaaaagattaatagctgaagccacaatctgattattcgaacatttggtaagtgtttactaaggtcagttggattctactgcatgtctagtcttgttcaaagggaagcataaagttatttaaataaatgaataactttaatgcaggtttactgtctcgtgtggtataattataacagacagttctttcttgttctcagggggaccagtgtctgcccagtgagtcactgctataccaaatagaattacattttgttttcagctggaatcacgcctttaagaatcagatcacaacactgcaaggccaggcaaagaatcgagcaaatccgaatcggagtgaagttcaggcaaacctttctctgttcctagaggcagctagtggcttctatactcaggtgagttctgcattgtataccagttttcttactattagtggtaaatattctgctctttgtacacgtcttaatgcatgtaaacaattcttgtaaccactatgtgggccatccagggattgatcacctataatcttttcttttttggcgacagagtctgactttgtcaccccaggctggagtgtagtggtgccgtcatggcttcctgcagcctcagcctccctgactgaagtgatcctctcacctcagccttccccagtagctgggactaaggtgcatgccaacacgcctgactaatttttgtattttttgtagagatggagtctcgctatgttgcccatgctagtcttgaattcctgggctcaagtgatccgcccacctcagcctaccaaagtgctgggattgcatacctgagccactgtgcccagcctataatctcaatgcaaatgtccataagacctttaaaaaaaaaaacgctgtgcttttaaaagggttgatgtttagcttaaaggttggaagtttaactgtatgaatataaaagggataattgagcacaaagccttagtgaaacagtggaagtagtcagttacaagtggtattagaggaaatgtgaatttatggatatagctatagtcattaaaataatagctatgttgcgccagataagaaatagtcaaaatttgtaatatcaagtgagttttcatagtattatttatacaatggaatttatctggattttgagatgttattaaactaagaagtagagtagcttttcctctgtttgaataataagctattattcattgtccccagagattttctttttccttagtcacgtcctgatagaacttctaaatcaggcaaggtaagagaataaataaatcttatttttgaccatgggattttctttaagcagaatctgttagaaaattaccatgtcatccatttgtaatagcatttgtaattaacaaaatttttgtatataaattagtatcttataatgaatgttaagacagggttttgagaatcttgcactgaaagaaatctttggccagttcttactatatagtactgcctgactattgctgcctatattttggcttcattctgattttatcatttctttgaatgaagagaaaagaatctctgctgggtgcagtggctcaggcctgtaatcacaacactttgggaagccaaggtgggaggatcacttgagcccaggaattcaagcaggttgtggtgctacctgcctgtaatcccagctactctggaggctgaggcaggaggatcacttgagcccaggagtttgaggctgcagtgaaccgtgattgtgccactgtactccagccagagcaacagagcaagacctgtctcaaaaaaaagaatccctgtgttggaacaattcagataactgtcatttctgagattatttatgttttacttagactaaaacattcatcacagttcatttttgaaagaactcaagtatggttcttagtctcaaaatttattttaaaatttatgccaacttttagcagcaaccaaaaagttgatactttttggggaatgcttctcgagagagggattggtccttaaagcagatgttaaagattaattcattttacaagtagctgtcaaaaggctactatttgtaaggcacgatactagatgctgaggatatggaggtaaattagacagaatctttaccttcaaagaaatatctagactaaatgaaaagatggatacattagtaagtatatttgttttcttttctgattgtaaaaataatgcataccaatttcaagaaatttgtgaattatacaaagtcccaaaaagttcattaatcctcccattctggataaattgccactttaatatatactcttcttgtgtttctatacttttttgcatatttaagaccacactatatatccatttttgtatctgttttataaacataatgtaagcttttccttgttaacagtttagcatttttgtgtataaagcattttctctaatactgtattatttcctgaggaccagttgttcaaattgaaatcattagaaagtttaaagtgaaagtttaaatactgttgacaccattttgtcgttttcccaaaagttcatcatttataacatttttcactagtttcttctgttgtcctttcattttatttagagttgtttgaa

SEQ ID NO: 57405 - DNA, 1006 bp, Homo sapiens
acaattatcagtgtgagcagctagtcgagtggttgtaccatttactgagatgggaaacactagggggaaagtagctttttccctattaaagtagatgcctgtttgacatctaagtagagatttgaaataagcaattgaataaacaaggttggagcccagtggaaacatcataaaatcataaaaattttatgattatagtaaagaaccctgacttagtcagatggtaacagatttagcacaggaggagccaccattgcaatcaagaaaatgagagagagaaggtgccttggaagccaagagaaaaacatctgaataaggaagggagtcatcagccctgttgagtgctgctgagaattaaagtaagatttaaagtgaccaattaggtttgacaacatgaaagtcattggtgaacttaatgaataccatatttcttcatttctgaaactttttttttcatattttaacatatctgaaatagagataagtttataacagatgacaagtgaccatataacttgtggttttttctcaatattatataagatgatggttcatcttataatttatggtgtctttgtattgatgaaatgtaacttcagcagtgttggggatagaaacctgattagagtggattgagaagagactagtacttggttatccacagtaacattttctgtgaagatagttttttagttttttgttttttttttttaaagacaggcgctcactctatcattttggctgagtacggtgcttaatcatagctcactgaagcctcagactccttggctcaagtgatccttccccacctcagcctcccaaatacctaggactacaggctcataccagctacctttttttattttttgtagaatggagtctcactatgttacccaggctggtttagttttaacttcttagctaccattttgttaaccagttaaagcatggggcttaaagcagaaccaaattcctggtcaaagtaaagacataccattctgctgta

SEQ ID NO: 57406 - DNA, 1118 bp, Homo sapiens
agttatcctgtgaaagattaacgtataatatatatatatatatatatttttttttttggagacagtcttgctctctcacccaggctggagtgcagtggcgtgatctcggctcactgcaacctccgcctcctgggttcaagcgattcttgtgcctcagcctcccttgtagctgagactacaggtgctcaccaccactcccggctgattttttttttgtatttttagtagagacggggtttcatcatgttggccaggctggtctcaaactcctgagctcaagtgatccgcccgccttggcctcctaaagtgctgggattataggcgtgagcccctgtgccaggcccgaaagattaccatataattttcatgcagtttttgttcagatttcagcagtatgtggtactaggtacacatcttacagtttataaactttacttttagagcacttgtgacttactactaaattttgtttgtttttcttttagttattacaagaactgtgtacagtatttaatgtagatttaccatgccgtgtgaagtcttcccaattgggaattatcagcaataaacagacgcataccagcgccatagtgaagccacagtctagctcctgttcctatatctgccagcactgcctcgtccaccttggagacattggtgagcctttgctgtgaaggaattgataatatgttcctccttttctttggaatagtcatagaaagaaactgttttcctttaagcggagcatacacacacaatttagattgtcataagaagaaactataaaatgtattctaaggaacttaaaatttctcaatatttttgggattggcagagcatcgtgaagaaagtaactttcatattaagatttaaattttattccaactttatgtaatttatataggcaaataataaacagcaaaaacataatcaaagcttaatttttcaaagtggtgccataatttctaaattaaatgtactcttctggaataaatgaggtttataaattactcctgaagcgaaattgccttctttctttcttaccaatggactaaaagttgatttttaattttgcttcctttttaaagtttaatttgtatttctattatttgcatttt

SEQ ID NO: 57407 - DNA, 2550 bp, Homo sapiens
gatacaggaaatacattaccatattgtgcttgtaagaaactgctttttgagaaatacaactacatattctcattttatgccagtattatttgaataaacgccagctgatttagaaggttagttgtagaaactgaaggagaaattttgtgggaaaattctagagaagagacaggatttcaggaaattttgaggaaagattaatgcttgatgtctttggaaaagggctaatcattctagacatatacaatgaaatagattgcaagaagactgacagtgtgatagaaagagttcatgtagaatggaattatattctctaatgataatgtaaaagacttccctcttagaatcgtagagcttactatggctatttcaggttctttatgtaaataaaaacaaaaatctcagagtagtctgggcagagacagctgtaagtttctgacatggtaggatctcctgtcactgctggtagaactgtaagtaaggattatctgttttccgccataatgctagtgataatgaatccctgctctctgcaaaaatttcccctgggcatagaggaagactggctatggctaaagtgtaggatgaaactaggaacttctgttagaaaagtatttttgcctgcaggtaatctaaaataattgcagatattaaagtagaagggtaattccattgagacaccaactgagagcatctgggtgattttttatagtgctggttaacagatcactgtgaacacagttattagaaggtaaatgaaatttgatgatcacgcatgtacttctctaagaggggaaaataccagttgataatttgtagaagtacctataatacatcctaatgttgttttagtatgccatttaccctgtgttccagaatatgtacttgctatgccttgtttataaaataagttttaatgtatcaagcctctgaaagagtaaattttatgacaaatctgggaagtcatgctttatgtactgggagttcaaaaaattattttttgagtctgttgctttctagtcatttgtcccaacttaatattttaatatgtatacatcttgtataaaacaatttctaaaggattaagttgtataaatttatggatgaacactcaaagacttttgtcaggtcatatttaaaaatatatagtttcctaggagaaaaaagtttgttgataaacaattcaaacaactctgtggtgtctagattaattcctttcaagacaaaaagtcagtttgggaaataattagacccagtcaaaatactgggattgagggcagaaccatttactcatctgtaattctattacacatggtggttctaaatgcagactaccagtttaatttcttgtgtcaaagatggttcctgttcttgataatatatgcagtacgtctgtcttcttttacagaggctgctattccaaaaagctttcaactctcagcagttagttcatgtcactgtcattaacctgtttcaacttcatcaccttcgtgactttagcaatgaaaccgagcagcacacttatagccaagatgagcagctatgttggacacagttgctggccctctttagtgagtattgaattacttaacatgtgccatcttttttgaaaaacatcatcttaggcatttcatcgatgtagcaaagcacagtgacataaaaaagcatagtgtatttcttacactgaatcaggagttcataataactttcaaccccaagttctatccttttatctgctgataccccctcatcaagttgtaactataacatttttaatatgggaaagaaagcgtctttttagaaagaagctgtaagatactcaagtgttaaacagaatatagtagaaggcacataatattttaatttgaactggcacagtttcatatttcttatgctttttgaatacatttttttttcaagtgtcttttcttggcatcctgtgcaagtgtcctctacagaatgagtctcaggaggagtcctacaatgcctatcctcttccagcagtcaaggtctccatggactggctaagactcagacccagggtctttcaggaggcagtggtggatgaaagacagtagtaagtatttttagaatttcatgttaacttgtgtgctttgtttgtttgatatccataaatatgtaaaaactgccttctaaaatacaacatttgaacaatagaatactgtattttctgccgactctcgggaattgaactgaagacctctttgtacgcttttcatttgtttatttgaattcttcatgtgaggcttagtcttaaggatttgtgactccttgtacactcccttgttcccagttgctgtcctggggaaaaggcatttttcacatttcaaagtgaacttgaagtaaaaccagtttgtttcttatctattacagtattccttaattttttgtttgagttgaagggaagagatttttattccatttttttctgtacatgaactgtttgatgttgccttacagtaacactcaatttgaataatatttgtttatttgaagcataaagattgaaagttattttgattctcacca

SEQ ID NO: 57408 - DNA, 1053 bp, Homo sapiens
cacaacttagaaaatgccttttttaagccacatttaagaccctgtgggccaagcactgtggctcatgcctgtaatcccagcacttggggaggctgaggcaggcggatcacttgaggtcaggagtttgagaccagcctggccaacatggtgaaaccccatctcttttactaaaaatacaaaagatattagccaggcattgtggcatatgcctgtaatcccaccacttcgggaggctgagacaggaaaatcgcttgaacccaggaagcagaggttgcggtgagctgagatcgcgccattgtactccagcctgtctcaaaaaaaaaaaaagaaagaccttatggtctgtctgcttcataattgtcttttctctcatgtagttataagctctttccatgatatattgacattatcatgaatagagtttaggaacatagcacagcatactatatacatctccttttaatgttagcattggttttagtaatacggattttcagacattgcttccttgcataaaatttttatttcttaactcaggctatacagtttttctactcttgtgtactctagaactcaaatttatgtttaattcaatatattatatcagtaatgttacaaaagaagaactgcatgttttaccatttgcttatagagtttttatatttatgggtaggaattgttattttcattgtgttttgttttttcttattgttgttcttgtacagtgatccttttggcccattctgtgtgttcccatttcttctcatggcaaaagatgttgaaccagaaggaacagctttattggcaaacattttttccctccatttttttctgtcatttactctttccacttcctcctatcagatttaccaaaatctttagaattatgcccttgtaggtgtttgattctgtgttaaattatgttagtactcattttaaagactagcatgggatatcactttaaaactgaagatttttccttgtgtgtctaatacactaaagttataatgttcatttatatcttttaagtaatggaaaaacaatgactgtttc

SEQ ID NO: 57409 - DNA, 1046 bp, Homo sapiens
aacagggaatgtgatttgtgtggtataaccataccctgtcacagattaaagaactaacagcggcttccacaactcataatgtatgtgaaagctctataaaaacatagtatgttatttctttgctcagaattttctcagcctatttcagttttccatgtttaaaactgacaaattattttcaccatttgttgaattaggagcatgggaaatgatctacagtggtagtaggtctctgtcatggaaatttgtcccttttgttgtatctttatcattatctagtgtatctttgaaagtacatttttaaaaattatacagcctttgaaatgctgaaataagggaaaaatacataaagtccaggacctatagataccattttcatggcttattagtgttctggtttctcttacataaaaataaagtctgaactctttctttaatttacagcatttggccctggttgatttctcttctgaatagtttccatccccatgaagaggacctctcaagtattagtggtaagggctaccctaaccttgtgttgttgatgtggttctccatcattaatggtggcttaatgccagagaaaaagaggtttttggtgatgaatgattgattttaaattcagtatctcagaagtgactgtgaactctacataagtgggtgggtggaagtagataatgttctcccagttcttctggcagcttattctcatttagcatcattcaaataggagttcagagagtgtaataccttcagattctttcattccttcctcctcattcttactattttaaaaaaagcaattaacatgaacattgctctgtcaaagtaatacttactcatcgtagaaaatttggtacaaagaaaaagaacacaaatctcccatacagagataccttttactagtcacgatagtatatcttcttcgggcctttttcttacgtgtgtacacacacacaggaaatgattcatatcaaataaagttttgtgcctgattttgaaatttagtattatattgttagcattttcttttgtcattaagcatt

SEQ ID NO: 57410 - DNA, 1060 bp, Homo sapiens
tagtgcccaagattctgcatttcttacaagctctcagatgatgtcaatgttattcaatactttcagtaaaaagagacaggtaatctaaacattgggcttactggatccaagactatgaatttttaagactgctgattttttaaaaagccattctcctcagcattgagtattaggtgagtgttaggggaatgtctgtgtcccaaagataacatgcagagttttgacaggtgagttattttcatcaggatcatgataaagaagagcagagaacaataagcattataatttctttctgtatgttaatttttaaaaaaatttagtgaacagtattccaccaaacaacattttaattaaaatgtttgcaaattttgattttgaccctttagcgacaccacttccagaggagtttgaattacaaggatttttggcattgagaccttctttcaggtaggtgatagctgaagtacctttatcattgccagtgattgcagtattaaaattagcagagaattgggcttggatgtagaggaacctttgatctgtcccagctgtgtgttatttttgtaacgtcaactaatactgaaagttgttgtgaattggatttgtgtatgtcacgccttcaattcctgtgtaataaaaattaaaatgtaacctttccatctgtgcccttgatcccatcccttctcacctccctaagaaccttgctccatctgttatcctctctgcattgtatttccagtgtcttgtctttctttcctttcttttttaaacaactaattatctttagcctagtaacatttaagtgtgccccattcttttaaaaaggtaaaatgaatttacatccctctattttcctacgttgccttatcttttcatcatcaaacttcttaaaaagagtagtatgcactttgggaggcggaggcaggtgaatcatgaggtcaggagatcgagaccatcctggctaacccggtgaaaccccgtctctactaaaaatacaaaaaaaaaaattagccgggcatggtggcgggtgcctatagtcccagctacccaggaagctgag

SEQ ID NO: 57411 - DNA, 3093 bp, Homo sapiens
aggttggtttacccttctgatatcaatgagttattctatatgctttacgatatttatacatttttctgatttagaatggtccaccacaaagtggatagattaatattatttattaaaataggcacctcagagactcttagcattgccatggtcatttcaagcaaattacttggcatgcaagataaatgtttataaaactttattcttaaaatgataaaagaatctttcctaataaaaagttgtggtttatttgagctccctgactagaaagtgaaatgtgagtaaaaatattacattaatgtaatgaatttgtatattttcttttctgctttgtttcatagtttgtaaaaatctctggtagtataaattctaataaatgcagttgattacatcaagtagctaacctatgtgggaagtaatctgaagccattacagttaatcaggtgaacttggttgcctggaaaatatctttagcaatttaatattctcataacttgcttgtgtcaattttaggaacttggatttttccaaaggtcaccagggtattacaggggacaaagaaggccagcaacgacgaatacgacagcaacgcttgatctctataggcaaatggattgctgataatcagccaaggtaagtctggaacttctggtctacccctttttaaccacctttttagataaacacatgcgcgcacacgcgcgcgcacacacacacatctcatatgttacgtattttaggctttggtataaatattgtcaatcatgaactcttaaatcgacatgttggtagcacaacatctaattataaccctagtgagtaagtatactctttatttagaatctctgttctccctattgtgtattacagaggtctttcttgtttatcgtgagtttctgctctaatttataaatatctctgtaaatctaactgaactgtactttcacagtcatggtaatttgtattggcctgggcatggtagtcagtttcaggcaggacagaccaagatcgtgctagtagccagttaagtacaaagcagatgtggtcgttagtgtagggaaaagaacgcaggttttgtaattccattggtttgagttccgtttcgagttccgcagcttctcaagtgggtgtccttgggatctccccagtagattataacctttccaaagtcactaactacttcctcatttttgtattcaggtttctgtcatacagtaggtagttaaatgcttccatgtttgaatgaacttaccacctccaagcttcaattttcacatctatagaataggaattatatatagctaccttataggacatatcaagggccctagaccagtgtcttgcacttgaagcatgctcagaaaatgtaaattctagcaaacgttgaaagagccagagggataggttgtgacgatgttaagtgtgataatgagaacctcagtttctacataactactttttgtgttacctgaatccacattgttatatcctgctgttttcatggttattagtgctaggaatatattgacttggatccacacacaattcagttgttattttttaagttaatgttttttatatatggatttatttttgcttttttaggctgattcagtgtgaaaatgaggtagggaaattgttgtttatcacagaaatcccagaattaatactggaagaccccagtgaagccaaagagaacctcattctgcaagaaacatctgtgatagagtcgctggctgcagatgggagcccagggctaaaatcagtgctatctacaagccgaaatttaagcaacaactgtgacacaggagagaagccagtggttaccttcaaagaaaacattaagacacgagaagtgaacagagaccaaggaagaagttttcctcccaaagaggtgagaagggactatagcaaaggaataactgtaactaagaatgatggaaagaaggacaacaacaagaggaaaactgaaaccaagaaatgcaccttagaaaagttacaggaaacaggaaagcagaatgtggcagtgcaggtaagctgtatttgaactataaagcaggtagaggaaggctcacacaaaaggcaagatttttcattttgttctaaagccatgagaattggccgtcctggaagtttaaatgcattatttaattgcatagtaaggttatataaagagctgtgatagatggttactttttcaattcttgggaattgtgagtgaaaaaaaaatctcagcctgatttgacactttcgtcagtcttcaccaatttaagcagtttgaaaggattagttgcagagttgtcagtttcacacaggattatattttatttagaagatataactaccatttgtcaatgctatagtggagatttggggtcttctgtagatccagtagaaccaagagtatattaaggcttatgcagtttttttttttagattcactataatatatatatatgtgtgtgtgtgtgtgtgtgtgtgtgtgtgtgtgtgtgtgtgtattttttttcttggaaaaatatgagacttttttattgacaattatacttgtcccggctattggtattaatatcactttaatcttatcctggatcctgggaatttataaaggaagaacccaggtttcttgctgggaaaagataagcactgctcagttatttgtgactttctttttattaatatattttcccaaatagaaaagatggtttcatgtaaacagaaaagggcctttattctgtgatggttttattaatactattaatgtttgaataaatacttaagcagccatgtgagttgttaacacattttagcaaatgtatgtgtttgcatgagaaactttacattgttgaaggctgcttacaaataaatagtacctttgaagtatttctctaatttttttgagaaagagaaataagaaaataatagttccattttaacattatagcaaggagagaaacagaaagacaaggtagaaattaagacataggggagagagagagatgctagggaaaggcaagaaaaaaaaaaatgaactagaaagccaaaggatccgagttttagagataatgagtccagcattttctgtttaccttt

SEQ ID NO: 57412 - DNA, 1063 bp, Homo sapiens
gatcatgggaaagcaaaataattagtaaaactaagatagtaaaattatcttttattggctattaaataatttgctttgattttccatttttaacttaggtgaatttaaatatcttcagcatgtactttttgatctaatgaggttttaaatactttcttaggagtagggtcttctttctagcacatttgagtttcaatttattatagatagttttgcttctattggttacaggtaaaatcccagacagaactaagaaagactccagtgtctgaagccagaaaaacacctgtaactcaaaccccaactcaagcaagtaactcccagttcatccccattcatcaccctggagccttccctcctcttcccagcaggccaggtaaatatgttttgtaatttcttctacttaatcttttctgtgcaagaatttctattcagtcactgagaaatgtgttttctgttggagtaatgttactaagccataaaaagttctattttccctaatacttataaaattatttttgaactgtttgtgtgtagtgtacatacaagtgcatgtttgttattatgaaggaaatcctatcactaaatacagaagctactcacagaacactgattacttcagtggatagaggaaaaatatcaagtctatttttagttcttcaaatcaagttaaagattgacaacatgactaatctcttttgtgatgtgttagaagactccctctacctacctgttaaaaaaaaaatgactttttttgcaattttttgctgtttccttaaaactaaagctgtgttcttctgttttgaagggtttccgcccccaacatatgttatccccccgcctgtggcattttctatgggctcaggttacaccttcccagctggtgtttctgtcccaggaacctttcttcagcctacagctcactctccagcaggaaaccaggtgcaagctgggaaacagtcccacattccttacagccagcaacggccctctggaccagggccaatgaaccagggacctcaacaatcacagccaccttcccagcaaccccttacatctttac

SEQ ID NO: 57413 - DNA, 1591 bp, Homo sapiens
taaaggaaactgctgccttgcctagagttttgttggttggaaaacaccccaagttcattctgtgattctttagcattcattataagtaatattgcattttatcctcacctttatgacaggcgtctcttttttagtatcaacaggcagatgcctccaaacagctgtggaatccccctcaggttcaaggcccattagggaaaattatgcctgtgaaacagccctactaccttcagacccaagaccccataaaactgtttgagccgtcattgcaacctcctgtaatgcagcagcagcctctagaaaaaaaaatgaagccttttcccatggagccatataaccataatccctcagaagtcaaggtcccagaattctactgggattcttcctacagcatggctgataacagatctgtaatggcacagcaagcaaacatagaccgcaggggcaaacggtcaccaggagtcttccgtccagagcaggatcctgtacccagaatgccgtttgaggtgtgtgttctttcctatcaccaggcaatttggagataggtctgaggttgactgtcttttgaatatctcaaatagatcttataaaaaggccactcttattcgttagtactatagaatgccactgagtattggtgtagctcttggtttcctcctcagagttgcacagtatgttttagtttggaagctgaagaattccgtaactgattttgaactctgatggtctggcaaagaaaccatgtacagaaatctctaaaacagcatgttagagaattctgagacaaagcactcctctcagttgggctgaatcatctaagtttaaaaataggtttactgatatttaaataaattgctctctgagaggaacaaggttagccagttatcttggacagtggaggtccctttctttgccctttttattcatgagaaacaggtgaatgttagtaactttttaaaagatctgtttctctgttagcacaagatatgctaatcattttgctccatagcattgttttactcactagccacattaaccttttgtgttctgctctgtcagtatttttgcttttctattgtcttgaactttctccattattgtccttgtgtcgctttgcctttgcatttcagagcgttttttctctttgcctaataccatctatctcactatccccttgactttagttgtcttcttccacctaattatgctactattcctttatgcttttgttatcccttattgcttctcactgtgatgctttctgtcactaggaccccaagagctcccctctgcttcctccggacctgttaaagagtctggctgccttggaggaagaggaagagctgattttttctaaccctcctgatctttacccggctctgctggggcctctcgcctctcttcctggacgaagcctttttgtatgtatttgacataattctgcttcttggtctaacccccagctgcttctctgagatactgtagtacacagattaggtgatttcttctcttcctggggctgtccttttcagaactgtaaaacatattttctaattgcctaaaccaaccttaagttggtagtaggatatag

SEQ ID NO: 57414 - DNA, 4283 bp, Homo sapiens
ttttagcaactgttttactatatactgcaaatagagctgcttaaaaagcatattaacaaagccatttgtcaaatggatttgaaaggctttttaaaagtcaccaatgttaatgttttaaaaattgtggggtggagagaaacagtgttggaacagttcagcattttgttttgagattaagtgcaactattgacaaggggattcctgaggtccatgcctcataaacactcagagtgctgtttaccagggtctctggtccctgccagaatataatctctgactaggtttgatctaaaaggaggattctatgcacctgtggcaactggcacttaggcggtgtcttggtgttaacagatttgaattcacatcttctgagcctcaaattgtactcagtgggcgaatacaggcatgcttttgctttggttccatagtatggtaagattaatattaagaaaatagaaggtataacttaattacctttttttctgggactgtgaagaaatccttattggagaagccctcagagctcatgtcacattcatcctctttcctgtccctcaccggattctctctcaatcaggtaggtgaacaatgaagaatcctgctgtgtgcttttagtgtagactgatcattgtctttctcatactgtttcagtatgtctgttttttctttattttccatgtattagtgtattccagatatttgattttatcccccttgtctctgattggggcatactagtgacttgtacatcatgaattaaaaccctttaacttctcattaatattgaaacccttagggctctctttttgagccaaataaattattcacattttcaacctggatagtttacacagagcaaatttaagggtgagagaaagcaaagaggaaaattaatttgactggaaaattgaaacaaaaagaaataaaagccttcaaaatttctcttcctaagaaaagcttaaggtgtaccaagcatccatgaacaagacattggattttctcaaatctctttccttggggtgagtttataacttcactgtcatgtctttcaggaaagatacccaaataatagtatgttcaatgaggtatatgggaaaaacctgacatccagctccaaagcagaactcagtccctcaatggccccccaggaaacatctctgtattccctttttgaagggactccgtggtctccatcacttcctgccagttcaggtattaactactctttaaattatagaccttacatttcctgtacactcagattgattaagggatagtgagattctgtaattacaaatatatcatttgttgggttatttttattttttgtttgtttgtttttgtaacttctgaaaggaaatagaaaaaaaaaaagaagaagccggtttatgtaataaatgctactgacaaaactttttacatcctcagtagccagcagagatgtaagggagaaaatagaggttctatcttatggttctcagctgctttttagttttatttgtaggtgttcattctttgcagaaaaattgcacttttttttttgagacagtgtcttgtggtgttgcccactctagactcaaactcctgggctcaagcagtccttccatctcagcctcccaagtagctgggactacaggtgcacaccactgtgcccagctctgcactttttaaaattgagatttttaacttagagtctgacttaatagtaattcttaaggttagcaaattctttctgatacataagaccaataaacatgtatctgaaatagccgtgtgagaatagggcattcattcagttgacaaaaattgcctactattttattttgcttttttaaggcgaagaatatgccttagatatgtgtggcagggcaaattagtgcatctagcagatctctttggagcctttagtttccctttccttcaaagccctgtggttattgttagtagaattttagtgatcagatctacaggaacctgtagttctttgtatgtttgtgaaacaatgatttactatatcctgtgttgctattatttaatagatcattcaacaccagccagccagtctcctcattcctctaacccaagcagcctacccagctctcctccaacacacaaccataattctgttccattctccaattttggacccattgggactccagataacagggatagaaggactgcagatcggtggaaaactgataagccaggtgagatctacatttcattgccaggcaaaattgaaagaatttactctatccttccctggggtctggcaattggcagtgatagaacatcttcttgaatttttcttatctcttttcatcccttagccatgggtgggtttggcattgattatctctcagcaacgtcatcctctgagagcagttggcatcaggccagcactccgagtggcacctggacaggccatggcccttccatggaggattcctctgctgtcctcatggaaagcctaaaggtgagtagatttcaggaacaagaaccacaagattattacagcaaaggtgtctctgctttcattcacataaatagctagacttctcaggccctcggagttgactgatacatagcacatatataacaaagtcctagaaacatggtctgccttacaagattcttgagtgataatttttaatttctgaattcactagtggtaaagcagtatcttcaggaggacaaaaacaaaggttttagtttcattctaaggttaagaaaattctgattcattttggaatgtttgatttaagccttttctgacaaaataagagtatctaattttagaaatgttttatttgcctgaaaactttatagtaaatgccctgtgtggtaccacatacagctgagtttcagtaaaaagacttgacataaaatgtgatttcacttcttctggtttaaaatagtcttaatggaaactaactagctttaagagtcttataatgactttttctaatagctggatttttatggggagtggggttgggttttggggccatatatatgcctttatatttggctgggattgaaaaatccctttcagacaacttggcatttgacctctgctgacaagatctggactgtttttcagtctatctggtccagttccatgatgcatcctggaccttctgctctggagcagctgttaatgcagcagaagcagaaacagcaacggggacaaggcaccatgaaccctccacactgaggccaaagtggcaacctgggaatgaaggctccataaaccatggcatgttgggtttgcaggactggcccacacagtcccctgcaggtggcagccctcttttctgtttctcgctgtcaagagggtgtaagtattccaccagcccgctgagtgtgcacgaaatgttcgcagtgcaacaaaaagaaaaatccatcaggaactctccgtccccccggggccctccggagggagagagagaggaactgctgtttatctcactcagttacttggtatcaccgcctctcaccttctccatcgtgcatgtccccagccacatgggaagtgaaagctgagaagggaaggcagatgggagaagccaatgggaacttctcagtccttttttcctctttggggaataaaataggaatccattaatgattgctttgctgactgagaatgtagttgaaattattcttaaacatcttttattattattactctcagtagtaaaatatcacactgaattcttccatacacaggtgtgcttctagtcagtgtgtagcaaggaaagccccgttcactgctcctgtgagaggttggtggtgacaggatggggaaccgacctcttcagccagtggaaatgttccataagggagagttcaaggcctgtcagaaggctctggtaggccttcctctggccaggagactccagcagggaatgcccttcactctgtaggtgctcgagccccaatcgaggatacagtgtgggtggtggtgctgggctggactagcaggtagactgctgtaggatttcaaattacgtttttgattcctgtacattttacagtcgcacagcaagcagtctcacagaaggcaggctagtccattcacagcctgacacgttctaataggtagaagctttcagtgtggttattttttctttggttggtttttgtgcccccattctacttcccaccctcctgccccatctccatcccttcttttacccaatgctgtatgctagtaattgtttttattcctaatgtgtgcaacatcacatctccccaagaagcaacagcatggggtc

SEQ ID NO: 57415 - DNA, 1284 bp, Homo sapiens
tgtatgtttgtgtacacacacgtgcccatctgctgtcccagaggggaggggttgtgtgtgcgagtgtatggagttagtgtggaacttaagagctggaagacagctgtagagcaaagcacatccaggagccccagttgtcactgcagtctgggcaaccccagcaatgaaaaggggtgagataacgctcattgctcttcagagagagtggttggagccccccccgccccgtatgcttacattattgctcttttagtttgacatggtgtttgggttttgtttttttgaaaggtctgaaaaggtgaagccccctacccaatggcaatatgaaaccttttgtgcttctcttcagccccttccctgtgtccacctttctctcctcttcccaagcctttttcctactacctttacccagtttgtgtgtttgagctctgcattcaggcagctgcaacattccagtgtttgaactgtcactgattcttgcgccctagacaagctaaccaggtttaccatctcactcccagtaatacccagctcctatctaaagccccattctgcatgagaatttggtgtttggaatgttttctgactcttggggcgggattcctcgccttatcatcctcactgtggagtaatgagggggaggagaatctttatcagaaactggttttgtgtagtaaactttcttttgtggttttttgttttgttttctgggttttgttttttgtttttgtctgtgcaagacctgcagctgctgaaaatcagctttgcctttaattaaaccatgttctctccaaccagatctgtgtatcgattctttcttttctatcctaaaagatataaaagaagtattgaagaaaatccaacttaaaaggcaagaatttcaactactcacaggtcatccagggaaaggcataaatggtcagaacttgaatatttttcagggttaattttgcttttagtagcattccaaaccaatgaattacggaaattataattaattgtaatggaaaggcatgagtagtaagaaatcgattatcaaaattcttttatttaataaaagaatgccttatgttaaggaattaagagcccatcatttttatttttattcctattgtagctgttactgaggcagttcagagagtttatccttttggcctgtaaaaattcactgaatctgattagcagcaacattaattaattcttcttcttagctttggggtttcttttctttgagttgtgtccaaagtttccagtgattggtagcttgctgggtcttccaactgt

SEQ ID NO: 57416 - DNA, 1037 bp, Homo sapiens
ctgattatctgtactgtgggtttaagtatgctactttctctcagcatccaataatcatggcccctcaatttatttgtggtcacccagggttcagagcaagaagtcttgctttatacaaatgtatccataaaatatcagagcttgttgggcatgaacatcaaacttttgttccactaatatggctctgtttggaaaaaactgcaaatcagaaagaatgatttgcagaaagaaagaaaaactatggtgtaatttaaactctgggcagcctctgaatgaaatgctactttctttagaaatataatagctgccttagacattatgaggtatacaactagtatttaagataccatttaatatgccccgtaaatgtcttcagtgttcttcagggtagttgggatctcaaaagatttggttcagatccaaacaaatacacattctgtgttttagctcagtgttttctaaaaaaagaaactgccacacagcaaaaaattgtttactttgttggacaaaccaaatcagttctcaaaaaatgaccggtgcttataaaaagttataaatatcgagtagctctaaaacaaaccacctgaccaagagggaagtgagcttgtgcttagtatttacattggatgccagttttgtaatcactgacttatgtgcaaactggtgcagaaattctataaactctttgctgtttttgatacctgctttttgtttcattttgttttgttttgtaaaaatgataaaacttcagaaaataaaatgtcagtgttgaataatttatttttctctgactttaacaattatgaatgtatggttaattaagaggaaaggttttctgcttctaccaccaagtactgtactcttaacaagaacagtttggtagggtttttataagactatatagatataagatgatagagaagagagtcatgaatgatgtcagagcactactgaagcctttggagtgattccatagccttctggatggcagctgaatacctatatgtagtatcactgcccaaagacctagactagaa

SEQ ID NO: 57417 - DNA, 1005 bp, Homo sapiens
ataatgctttcctgggggccatcctttgctgttacacccttaacttccatcacaggaaacatgacagctgccctacaggcagctctgaagaacccccctatcaacaccaagagtcaggcagtgaaggtgagtcgcagactacaacacagtgatctctgctgatatcttattcttagtaaaatcctctgcagttgcaaaaaaaaatcaatattttaactgtttgctatctttgacatagaagagtttataatgtagtttgataggtaaaaatttcacgtgaaaaaatagccctataatgtagttatgataatgctgcatggtaagatacagtaagttcaaacgatagtgaaatcatttgtgtgtgtttttagaggagaccactcaggctgaatttgagcaaaggtttgaaaaataagttaaacctttacaaaaataaacagattgtaattgctttttaaagattttttaaaaccatacaaatactaaatacttattatagaaagctcagacatatgagaaggttaaaaagatagtggtttgtggtcccagcacccagagataacagttactactttggggccttgctgtattgttacagagttcccttttgtttttttaagaatgaaattttataacgtgctttttcagctatatgcaatgtacatgagctttccttcgcaataagtttatagcatttttaacacttgtatatggataagctgcagtgtatacataactaatcttttgttatatatttagactgactttttttttcctattgtaaaccactgaaatcaatattttttggtaaatttttaattgttctctttgagtaaattgctagcagtgaattactggatcaaagaatgcacttttttttaaggcttttggtatgcagtattgccaaattgcccttcagaacagttgtgcaacttacattctctgcagtcttttactaattcttaacctatttacgtatttatttaaaatgatgcccatagcatc

SEQ ID NO: 57418 - DNA, 1034 bp, Homo sapiens
caatctgagaccccctagactggaccgcagaaaagcgtttctatgggaacccccccaccgagaatcacgtgacgcaatcggacgaccaatcgcttcttacctctgcccgcggtccagcttttggccctccctctcgcccccgcctccttcgcccagccccgccccttgcctgcggagagcccgcgcctgcgcgctgtgtcctgcgcgctccttccctcgcgcgcgctctccgtggaagagcaggggcagcgtgggaggcgccaagggagcgcgaacctgaggaggaagaaacggggctagcgcgcaggcccagaacggtccgagccgcggcagtcggcgacgcctcagagcggaagagggaagtgaatcaggcgccgggtagtgggttgctgggctgggcttgctgaggtagaggcagcgccaagaagaggcctttgccgctggtcgggattgggatgtcgaagaacacagtgtcgtcggcccgcttccggaaggtggacgtggatgaatatgacgagaacaagttcgtggacgaagaagatgggggcgacggccaggccgggcccgacgagggcgaggtggactcctgcctgcggcaatatccttgcattcaccgccctccccaccccagcccagcccagcccgcccttctcctgggacccgggagcctgcaggatccgcggggcaccggcgcggagctgccctctcaacctgcggcttaacctgtctctttgggatcgcccgctctgagagggcaagggggaagcccccgtttcctacccagtcggcaggagacgcgagggtcccactcttggaagcctgccctcccccgcgcgccttccacgcccccagattcctcaggttgcacccgagtgcctgcctgcctcgggaactggtcccgccggccgcgccctcgcggcgctggggaaggcggccccggctggtggggaaggctggtgccgagcgccttagtttttcttcctagaactctgatttcctggggtcacattagctccagaaatttctgattgtgg

SEQ ID NO: 57419 - DNA, 1080 bp, Homo sapiens
cactcagagttgtcatctctcaggccccaaattttagtcatccctgaacttctggtctttctctcacatctttcatccaatcctttggcaaatcctactgtacctatgtttcaaatacatccagaatctgaccaattcttgccacctttacttctaccaccctgacctaagccacatcattctctagagcttgaactattctagttgcctcctaattggcctccctgctttcattgttggacctctacagtctatttcaaacacagcagccaaattgatccagtcctttgctcaaaattctccagtagctcccaattacaatatgtatggtaaaagctggaaaccttacaatggcctacgtgatctgtagtgcctctttcctgactgctgcagtctttttgctgttcttacaatacattgagcaacttccacccagggcactttcccctgctcccgccccaaacccccatggcttactgctcatttctttcaagtctttgcttagatgataccttatcagtgaggcctttccctcccaaccttttaaaaattgtaacggccctaatcactcactatccccattccattgcttatttctccctattgtgtttattattttctaatattttacatggtttgcttatttatttttattgtcttccttttctactagtgtgcagtttcctcaagggcagagattttgtccatcttgtccactactatatgccaagtgtttggaacagtttgcacggaggaatggttcctgaatgaattgaatgcatggtgagcgtttaatttgaaatttgaaatgtgattaatggaattttaatcattttaaattctccttgtattgcacaaaatgcttcttaaatgcacgttgtaacatcatgagatagtcaatccagatacctcagtgcccactcctgctaaatatttactcaaaggttaaaaactgtcattggttttgtatgctgaggccaaatttgaatttttagttgcgtgctggtacttcatctgcagatgtaggtatcatgcatttcaaccctacattgctaggttaatctaattgagtatattgaa

SEQ ID NO: 57420 - DNA, 1036 bp, Homo sapiens
gggcgcctgtagtcccagctactggggaggctgaggcaggagaatggcgtgaacccgggaagcggagcttgcagtgagccgagattgtgccactgcagtccgcagtccggcctgggcgacagagcaagactccgtctcaaaaaaaaaaaaaaaaaaaaaaaaaaaaaaaaaatttcactctgatatctataatcccaatgcctttgtacattatattgttctctcacaacacctagctcttactcatccttcagactctggaaattttccctgatctctctgcagaccacattatgtgcccttatcatttttttccttcctccctcccttctttccttctttctctcctttattttttcctttctttctgcatttcctttatgtacacttatcacattatatggcagttatttgttttatattcttttctagtagactatgagcttctaacacaaggaactgcacctatcctgttcaatttataccactgcaatgttgagatgtttgttgaatgaatggattaattaatgaacaaataaaggaatggacatataaccatctttgcctgtttgtgtttcgccctgagatgagcatgtgagtgacaggatttctgggaattagtggtgttttctctgatgtaatagaagagcagacccaaggctcagaatggcacgttttattctgtgacttgtacttgccaacaataggaaccattataattttactggatttctgagaatcagcaacatatgtgtgtagtaaaaataatgacaacaaaagcaaatagcctgatgaaaagagtccttagcatgcaggagtcttcccactctgatttacccttgtggtcaggtcacgcttccaaactaactcattgttgcctcaaaacattcatcttaagtagtatggatacaatgcaagaacaaatctgaatttcttcaaagtaaaaatgttgatcaaggaataaaaaaatggcaaacaaagagacttgaaacattgtgatggaagaatcatactgtatcaaggtgggaggggaagt

SEQ ID NO: 57421 - DNA, 1090 bp, Homo sapiens
gagataaagataaaatttcttactgtgctacacgttgattagcttatacagtgcctgagccccactgcctcagccaggaatgagctgagttgcttgtgaggttgtgactttctgaatcttccatttcctcacctgtgaaatggcgttaatatctgtttttactctgcctatgatttttgtgaggatcagatgagttaatgtgtataaaagtattttttaatatgtaagtttttatacaaatataaggatattcttactgtcatttaacctagaggcctttttttctctctgctcactacctaaatgcttgataggcatgtggctctgtttattagtcttgcctttcttccttcattccagaggcaatcttttctactttgttttcttcccacttgctgccacttgctgattaactaatgagaggtgatgttcagctaggaggagtgcttcctctgctaccaccgttgtccccactgggattccaggtgcatcgagaatgcagacagcaaggcttctgtttgtagattggttgtgggaaaaaaaaaccccatactcacaggattcttaagacaaatgcagtggatattttgtgtttgaaaatgttctatttcttctttgattcttccttttctttctggtacttttaatttgttgtgagaagggtgataaagctaataatgcaccaaggaatggaaagtgcttccatctttgcagaggtcctggaaagttaacttttggtctgaagccaaatcccgatgtaggacttgaactcatgacctaatcccagaggcaagaatgttaccagctgaccaacactgaccctcataaaatgtagacatttaaaatactcctttgagtagtcctgttgctgctttctatgttttcttctctctttcagtcgtttccagcagtgttcctggcctccctgttaggagcacagttttaaagatctatttttctcactgtctttccatttgctgattatagctgcttccttcttgctttccatttctcttgtgtgagttcctttttttgttcctgttccttcctgtccttcttctgacttaaaaatagattccagggtctttgg

SEQ ID NO: 57422 - DNA, 1013 bp, Homo sapiens
aggtgttattatatctcttccccagagaggggggtcagtggagttaactgacctatccaggcttccttagttccccggtgggacagccaggatgaaagatagagttttctttctccaggtctccaagcgtcctgtcttggtctgtgtacagaaccaagtggcttctgtagtctaacagacataccagacctgtaaatttgtgacttcaaaccagaatttcccttcagctgtaagattctttacatccccccactctgttctggttaatatataagttagatcttaggactggagccaggctgggtaagaccgaaaagccattggccagtaatcctgtttttcttttcatcattattttgcgatgttgctttcttttttgaaatcttaaaagtttcgcatttgtatctgcttctaaatctatcaagaacggaaagtttcttcccaggactggcacacacaaagctactgtgagccttgggcatgtgtccaggcctttccagaaagcttccctgcctggtgtgctgagaaacgctctgccgatgaggagggcagggctctgcctcgtgttctattgtgctgtttgtgtatgtctttccctttctctgtttcttcgtcctcctcccccttcattcctcttttgtgtgaaaatgcttttttctggctgattgagtatctgagtttgtggtgaactttcaaagccttcttaggctaagctacaggaaggtcactgtcacaaagagtaaaaaaatgtatagatcgccagagttcattaaaaacatcagattgaggaacacaaaatgtccacctaagggcaagtctaatgtggacgaaggctcctctttagaactctcctagttcttctgaggctgcagctctccatagaggtaagtgctgtgtgcccatcagaaatacccacacgagcatgcagagatggaggcaaggatgcacatattttgtagttgtgacaacctgaaaataacttaaatacctgccttccagtagaagaatactta

SEQ ID NO: 57423 - DNA, 1192 bp, Homo sapiens
tcagttacatttattattggtttatgtcacagtctgggaacatattaaccaactgcccagattgacacccacttacacctcacatgtaggttttacatatagggtttacaccatctaaaagtaggcagccgagagagctgcctactgactataactacgcaatgacattgagagcaaaggaagagtttgagatggtgaccccttgaattactaagagaatgctccctgaccacacgtttaaatagtgaagaagcataacagccgattggaacaaggaagccgggtttgcacctactgtctggctccttaaatcagagtagtgaggatggaggttgtctgggtttcctatgtagcagatggcagtaaacaaggaaaaggttttcagcagacagattggaaggtaactggaggttggaattactctggagtgagttggaaagaaaaaggaggttgtgcatagtaatctctctctggataatttatctttcccagttaagttgtcagacaactatgttggagaatggccctgaaatgaaagctttactggtcccaattccagctttcattaaatcggctcccaaagcaaaccacggggctggcacctgcgagctagcattcactttacagctgtgaacagtgtcttaacgtgcttgactctaggtagggaaatgtactaaggagaaagaggaaatgtggattttattctgacaaggctttgaattgtttcttgaaaaagctgaaatagcccttggatctccattagcctctttggtagattgctgccactggtaattatatgtcaagtaatggcctcctccccattcagagtccctcactgagccacagcatgatgccactgagaattaaaaacaggccttcctccccactggcctgttgtatttgcttcctctggctggagggcactattggcttcctactctatggctgtcatccatctcccaggagccgatgatcctttatttcagcagcccaaaatctggacaggagattccattgatgccgttgtgaaaggtggccagtacttttggagcaaaggctgactgagttcaaagaaaccttgaagttctttcccccagatgttgatcaaaagcagggtatttggtggccctcagtttggatctgtagttactctgtcatatttcctttctgtcctcacagtagccactgttct

SEQ ID NO: 57424 - DNA, 1052 bp, Homo sapiens
ctcacattggggatcaagtttccaacacatgaactttggaggacacattcaagccagaggagtcactaaaaagaaattaatactttcttcaggctccttagttaatttattgatggattgatctatttatttattcacgtaattagttttagtcattgtagtagaaattcaactgtcttatctgaaataattgggagaaggtgttcttcctttcaccttgtacagaatgattatgacttaaaaaatccagacagataactcttgtcttcagcaactttacaaatatatttgccttccttagtttttgagccctaagacgataagggttacacatggctacagcctgccccaagtttactctggctgccagaataatacagtatcctttccagacccctgaacaatcaactgttaacaagtgagatcatttttggtagaagaattgcatatgtcattgtctcaaaagagacatgggctgcaaatcctgtctggggacttgcttccaaatacttgttcaaactcctcccagctttgtctgcacttggcattaatcccactttgacattcaaagagcttgagtgctgcacattctcaactaaatagatagtaaaacaaaaccagtaacttgttattaaatacatagtgaagggggcagtagtcattttattattcttttcatttattctgtcactgtcttagtctgttttgtgctgctataatagaataccacagactgggtaataatttataatgaacagaattcactggctcatggttctggaggctgggagtccaaaattgaggggctggcatctggcgacggcctttttgctacatcattctatggtggtagggcaagaaagggtgagagagaacaagagaggccaaacttgtccttttataaggaactcgctctcatgataacaaaccccctcattcaataacaatagtagtccactcatgagggcagagctcaagtcccacttacctcttgaatgtcccacctcccaacgttaccacattggggatcaagtttccaacacatgaacttt

SEQ ID NO: 57425 - DNA, 1012 bp, Homo sapiens
atattaaataattttttcttctcaatttgacaattatattttaattttcagtatctagaaatgatggaattagatataggagatgccacccaagtttatgtagcgttcttggtttacctggacctcatggaaagtaagttgtttgtttatattgttttgttattgggactgtggtagagatttggggggttggattgggatatagcattcttaacataataagcaatcttttatgcatttgctgttaattttgcaatttatttatttacattgggaattactgagtaacagaagctactagaaaagcaaagacaggaggtagtgttacgagtgatatttgctcagctgagtattaggtagaagtttggagtttttattttttgtatttaataaacattattgtccattcaatgatgctctttcaggcaaaagctggcatgaagtaaactgtgtaggattaccagaactccagctcatctgccttgttggtactgagatagaaggggaggggttacagactgtggtgcctacccccatcactgcttccctcagccataacaggtgagcaggtgattttggtctaagttcctttcccgagtaaagcagtaggaaacattaaacatagtgatgtaatacttttaatgaaatttgggatacagggttcatagctttactcttggctatttgaggaataagttaaatatgagtgttgtattcggccattcttgcattgctataaagaaatacctgagactgagtaatttcttaaaaaaaaaagaagaggtttaagtggctcatagttctgaaggctttacagtaagcatggtgctggcatctactcggcttctagggaggcctcaggaagcttataatcatggaggaagttcgtgaagcaagagcaggcacatcatatggcaaaagcaggagtgagagagagtgttgagggggaggttccacacacttttaaatgaccagatctcacgagaactcattgtcctgaagacagcactca

SEQ ID NO: 57426 - DNA, 3659 bp, Homo sapiens
tcactttgttctttaacactttgttggatattctgactcttttgcctttccatatcaattttacaatcagcttgtcaatatctacaaaacaacgtgctgggattttgaatgggattgcacttgtagatcacattgagaagaattggtatccaggaacatggactatctctccatttgtttagatctcctatgatttctttcatcagagttttacagttttcctcacatagatcctataaatattttgttagatttatacctaaatatttatcttttatgatgctgatgtaaatggtgttttgtttttaatttcaaattccaattgtttattgctgatatataggaatacagtggacttttgtatattatccttgtatcctgtaaccttgctataatctcttagtttttattcttccattttctcatacccccaaattaatttatcagtaaaccctgtcaattccttaaaattacatccagaatctgtccatttcttaccacttacactacaactgttaccactctggcttaagctgctattatctcacctcctggacctactaagtggtcctcctttaaaacacttgatatattaatgctactcaacatatttcatatttggttttctttgattatctactgtctgttttcctccactagaaagtaagttccctgaaagtgagaacttggttttgtttattggtatatccctggggtctaacctggtacctggtacatggtgctaagtaagtatttgttgaaagattgggtaagctatcttaggctactgtgttcctgcagcagagacttcctaattaataccttaaagaacataagaatatactataagcaaccttttaagaatttccaaaaaattagaatgtctgcaaaatctgccaggcacagtggctcacgcctgtaatcccagcactttgggaggctgaggtgggcggatcacctgaggtcaggagtttgataccagcctggccaacatggcaaaaccccgtctctactaaaaatacaaaaaattagctggatgtggtggtgtgtgcctgtagtcccagctacttgggaggcctagtgaggcaagagaattgcttgaacccaggaggtggaggttgcagtgagccaaggtcacaccactgtgctccagtctgggtgacagagcgagactctctctctcaaaaaaaaaaaaaaaaaatatatatatatatatatatatatatatatgtacatatgtatgtatctgcaaaatccatccacttgcaggatttatcaccattttccacgctttgcattgtaacctgccaatgttatgaatagcctctttactttttagttgaattttttttcatttatattctctctgccctttcacccctctttttccctagtgccttgggaaaaggacttatattaattctggagtagagggttactagaactagttctttctttggaacatctctgaagatattcttagttatgagatttgatcctcaaatgctacatactttcttgaaggaccgtccattattatttccctgtaattgaaaaatatttccactttctgaaagcataatccttattacaaattcatttaatgaccactattttatttgagtcctaaagtctcataattgcaaaatgacttctgtcatttggcttctctgcatattaggatgtgtgtcctcaccttccctctgctagaaatctgctgctggtgaaacccccaattctggcagcttcttttaactgatacagcatttttttttctcttacccttaaacaaaagcttgcagttcattacagaatgacttcccactggggtggatagcttcattgttcagtaaacccccttggaattttagctgccttgattttttactaggaaggcattggcatgaatttcaaggaggtggtctgttatccctgaaacttttctttgggactgagcctgtggatgaataaggcttctttggtgcctctgacaccaacttaattttgcattatgtttcagagttgcattatggcatgtcattccattatatcataatgaggcaaatcaaggaattattcccttttactaataaggctatagcatatattatttggccacattgaagaggataggagatactttctatgggttgaaattaatactacttttaacccatgatacattctatttcaatagcatttgaagttaaaagtaatgcggtcttcaacttcttgtcctctgtgtaaatctccagagattacttagtatctgtttcagaatcattacagaaaaatcaatgctaagatttatggaaagcatttaaatagcttggactaaaggtattagccaaatagtgttaactgtgtatttgcttcaggcttgttttcaagttagctatatgaagctctggaatcactttttttcagtacacagagctcctctatgaacagttatgagaaataaaaacctgttgtgagcatcaaattttgttgctgttattaaatagctattattattgatacatatttttctttaggtgggatttttccctttagatataactgagtttaaaacttgaaactgttagtattaatacataggttatatttttcataggttgatttctatccaatatgaactataaagaattttatcgtttattgttgtagatttgtgtgatgaaacatacaatatttccagtatcttcacaatatttttccaaagaactgagctattaaaatttatacatataaggaaacattctgtcatttctaaagtgagatttcaaaccataagcttgttagaaattaagtgagattatagtattctggtgatacttaaatgttcttgggatctttacaatcatatgtggttttttaagaacttaagaatcttttgttactgctattattaatagattgggaaaatataatctgttgactaaaaggcaaaataaacatttttaagattttatgcagtatcctataatggaaacaaacaagaaaggtcttgttcttgtttgttgaggaaaagatgatggctttgctttaaacatacttgaaaaatcgactagaagagatcctgaacaagaaactgtaagacttctggaatgtaccttgagtaacagaggcagataaactattttattctgttactagtgagaagattcactggtaattcacaatcaccgccccctccaaccaaataccataaacaaggcctcagaaatgggaacttccatttcatttttgacagtgatttctctcaactctgaaaacaaaaccccttttacaactctgagttagttttcaaatgttagggtttcctgcatgggtatttggggtaagtatgaaaatgttttgctgcttaaatcaaagaactctggaaacagatataaattgagaatggaaaaagagtagtgaataagatggaaatttctattctaaatttcactatatgggctacaattcccatatagttttccttagtgaacaccaccccccaacacacacatacaaacacaccttctgatttaaataacattatatcttcagaaatggaaaatgtgttaaagttgtgttaacaggcttccttcttgtctgtgtcccattctcatcacagtctaccagttagggatgtttagagaaatttatcttgt

SEQ ID NO: 57427 - DNA, 1146 bp, Homo sapiens
attccttttcttggatggatctgtattttatttgagtgtcatggatactgcagcagtttcagttcattgttaaaccacatgttagaatatattttactttgcctggtgacttatggtttttcccacctgaactgggtgaggaaaggcgattgagaagttgattgttttcactgaagtgtgggaacctttttcatacccatcatcatagatacaagtgctaagggatgtactctcaacaaaccatgacatgcatgcatatcatagccattcctaaaagcttcttcctgaattccacagttgacaaggaggtctagtagagcccctgtattagcactatgtccttttacatgagacaattgaaaggccaggtgtaaagtaaggagatgctgcgggctgccaggctgtgatttgcaggaaacttctcaaagacacagatagtcagggtgacttcagtggttctatctcaaagttctgccaaaagcagtttttctaagataattttgttaacagttcttgcaattaataggttataaggaataagcaacatatatctcattatatgtttcaggtggataatattttgatgaaggaagtgagaatccaggaacatctcttgagttgcttagtagttgctgaaaattcagatattctggtttgtgccaggaatccatgacagtctagatgcgactcccaaaacaaattttatgcctcccttccatggcctccccaacacccacccctgcctcaccctgggatatccttcttcccctctactgtgtctcttgagatccaagatatttctcaaatctcacttcaaatcccacctcctccaaggagccctttttctgctataagagtggtttctcccttaccttccatgaactgctgtaatacttattttaggcttaatttattttattattagttttgatttttattatatatatttttgtccccagccaaatgtaaacccttctattgtgcccactgggccttaaaagtagattggtctaaataagtagttattgattgattgacagcttgtcattgatcctgaggctcacagtttctgtctatgaagaccttgctcccgtttgaagccttctttaatataatgaggaagtatagtctggaatgagaaaagat

SEQ ID NO: 57428 - DNA, 1080 bp, Homo sapiens
gaagctaatagccattagagggaaagataattaactcagtttgcaagaggttgagtttctggtgtgtatgctctcttagaaggagatatctaacacataactgaaattctggtctataattcagaagagagggttgggatagaattatgagtttgctgtcagctcagtcatcattttctcggaatcattcactacatttccatgatgaggtcaaatccctctattctaccctcttaccacaccacgtacctcctctccttgtctgtatgcactttccaatattgtaattgctcattcatttttgagtttatttgattaatgctaataacatccccccaccgcctgcaactgtagggttcatgaaggcaagactgtatttgtttttgatccttttgtatccaaagaacacctgccgcacactaggggcccagcacatatttgttgaatggatgaataaatcagtgattgaaagagtttttataaatgtgatagttgaagctgttgtggttcagcatcagtttgcacagggaaagtatgtagaagaaaactaaacagtgagttctagggaacccccgtgtttcagaggtgtgatagaaaaggatggtgaaggagactcaaaccaggcaagtgtggtgtctgtcaaagaaaagggaggatcaggcagtggcatgtggtcagaattgttgtatgaagaagtaaaacaaatctaaagacattttcataatgtctgttattaaatagatgtgggaacgtttatttgatgggaatatatcaacatgttttctcaccgttaaaaaactgtatggctggctaggcacagtggctcacgcctgtaatcccagcactttaggaggccaaggagggcaggtcacaaggtcaggagatcaagaccatcctggctaacacggtgaaaccccgtctctactaaaaacacaaaaaattagccaggtgtggtggcgggcgcctgtagtcccagctacttgggaggctgaggcaggagaatgtcgtgaacccaggaggcagagcttgcagtgagccaagatcgcgctactgcactccagcctgggtgacagagtgaga

SEQ ID NO: 57429 - DNA, 2045 bp, Homo sapiens
taatctgtaccttttctcagtggagtccttagtccattttgtgctgctataacagaacaactgagactgggtaatttataaagaacaaaaatttatttctcaaggttctggggtctgggaagtccaaggtcaaggtgctggcaggtttggtgtctcatgagggcccagtcttggcttccaagatggctccttgaatgctgcatcctccagaggggaggaacgggaaagcagaagagccgagagaaagtgagaaagagggctggagttgcccttcttttctggcaccaattctacccatgagagtagagccttaatggtgtaatcacctctttaaactcttgcctcttaatacagttaccatagcaattcaatttcaacataagttttagaaggaacaaacattcaaaccatagcaaggcccatcccagaaggtatttctgaagtccagagaaggaaatccttgaatagattgtggcagttcttcacaatagctaagtgaatgttaacatcaattttaagcttgcttttctttagtgccattaaacagtcactctctaccccctcgtgatgcgtcctttcatagatttgctggccctaaagaatttgattgactgggcagagagagacctgcttggatttctatttgtttgttttctgatctgaagccttccacagatttccatcctcaagattaccctggacattaaaacctttcttggctaagcctgtgcaaaacccttgcatcccatttctccttgcattaaaattttatgtgtctgtttctccagcctgtcaaaattttaaaacctttttcttaattcttcagagattaccttatgttatgcaaattgtgatatcagcaaatgaaacgttccctggtcttttatctgaatcattatttggcatgtttttattagacccagtgctaataattcttttttttttctttttgagtcagggtcttgctctgttgcccatgctggagtgcagtggcacgatcacagcttattgcagcctcaatctccctggctctatcaatcctcccactgtagcctcctgagtagcttggacttcaggagtgtgccaccatgcctggcaaatttttgtattttttggagagacagggtttcactatgttgcccaggctggtcttgaactcccagtcccaagccatctacctgcctcggcctccaaagtgctggggttacaggtgtgagccaccacacctggccctaaaaattcctattatgctttaaagttacatcatgtttatctttgcagttcccccattcttgctacccctactttccactgatattttcgcagagaatgcagctgatgaaggggacagggtgggagggagcattcaaatgagcatttggttgctagggaacctagtttactcagtaattgtgacttcccaaagttgtttagaaattacagcagagctgtttggaatctctgtctattcctctttagattggtgctcctctagctttggagatgactgaagttcctaaagttattcagtctctttccctgggagctgttagacttgctttttccagggactgaagtgacaaaaaatttattctaatcaaaatgaggtcagtgtaagagtgaagttggtgaatccctatcttatcttctgatctgtagggatatgtgtgcctctccaagccccagcaggagagtttttatagtgatactaaaaccctctttatatcttccttctattttcattatatttgagtgtctaccaagtttcctttcggttgaaatgtcaagaaaaatactttctcttagtattatctcaaatgagaattttatgatcctctgtgtgaagataaaatctcttacatgtgttttgatttttcacttttttggggataattacatctcaaattaaccaagttaaaaatgaactcaatagaataaaataaactcctgtgattagcaagggagtaaaatgagtatatctagaaatgaaatgcatgtaaaattcatcttggttttctactcctatgttaaattatataacaaca

SEQ ID NO: 57430 - DNA, 1437 bp, Homo sapiens
ttttttttttttttttgagacggagtctcactctgtcgcccaggctggagtgcagtggtgcaatctcggctcactgcaagctccgcctcccgggttcacgccattctcctgcctcagcctcccgagtagctgggactacaggcgcccgccatcacgcctggctattttttttgtatttttaatagagacagggtttcactgtgttagccaggatggtctggatctcctgacctcgtgatccgcccgccttggcctcccaaagtgctgggattgcaggcgtgagccaccgcgcccagccggttatgggtatttcttaagaagccatatataagagcttctatatgttctgtcataaacttgaatttgtcttcagtccaccaagtttgtctcagaggaatctggacccagatgtgagatacaaaacttatttgatgctctcctggtgctaatatggttggactacctaaaattatgcagagatgattgtatatttagacattatttgatatggctgtttattgcctaataaaatcttgaagagaaactgggatgaaaaggctttacaatctacctctgtctccctttattgcagaagtccggacagcttttcaatgtgatggattctgtggcaaggattacatcattggggggttttatatttctataattttagattagttattttagttcccttacccccatttttaaatattcctgtcagctaaaacaaggattttcttaggaaatgatgaagccaggtttaatttctacttagtgagaagactgcattaccaccccactgttaaggtgcaggtattgtcagtagggcaaggatgggttttcttttgtaaggaatgcatttgaagggatagattacagactcagggtaatgtgaacctgtttccatgcttgggaatgtcctcccaggtgatggacatcccttaggggaagcctcaggtaggataagcaaagcctaggttcttatttgcttgtttcttaaagaaacacaataataaagacaaaaatggtgtatggatcaaacagatgaaaccagaagagtgttaatatccagaaatgtattctctaaggctctgcctaattatattaaaagtaatttgcaaatctggccctgagttttctgtaaccatatgaaaacaagaaacactatcagtcacaagattctgttatagcctgggcaacatagtgagaccccatctctgcaaaaaagaaaaaaaatagttgggcatggtggcacacacctgtcatcctagctgttggggagactgaggccagaggtttgcttgagcccaggagttcaaggttgcagtgagctatgattgtgccaccacactccagcctgggccacagagcgagaccctgcctcaaaaacaaaaacaaaaaattcagttataagaaaagaaaaatatatatcattgc

SEQ ID NO: 57431 - DNA, 1005 bp, Homo sapiens
aaaaacagaaaaaaaaaacagagcttaaaggacataaaattttaaatgaatctaactgggagggtaacatttattcaaagctttgaaggtgcttgagttagccatgcagctatttgagggaggaaccttccaggccagggaacagccagtgcagagagagtcactgggcatcgaggccagtgtggctggagggatgagcaaaggggagaaaaagaggaggcaagggcacagcgccagattgtgtgaggccctggaggccactgagggctttggtttttactcagagggaaggtgaagggtttctaacagggaaatgacatattctgccttagtttttataggatcactggctgtgactcagagtaagcagatggagacgtagatggcagaggacaccattaattccttcatgagttaggatagaatgtggagtcagaggtcaaatcctgggtctgctgccataccactgtgagtgtcagacatccaaaatggaaggaagttttcagggaaatcttgaaatatctgattactctctaagagccaggatttaggttgtgcaagaagaaaaaaaaatgctggtctcatttttttttaactaacagtgtgtctttggggtatgaaaactgaggcatttttgtagcctaaaattacttttgtgggggggtgggctggtttttccacatggctgtgtgtttttagatggattattcacgtaagacatgggatttcattacgttggctctgacattttattagacttaaattttctagttctggttagctataaagttcactgtcaagaagttatgggaccaaaatacaaaatacttcagtggtgctaaaagttaggcctgtggtaataaatcattgttacctaaagaaagacatcattgctaaggtgtctaattttagattattaggaggaaaaaataaatagtttggtaggcttgccttactatgaggccttttcatttttaactcccagtctctctactttacctctgc

SEQ ID NO: 57432 - DNA, 1062 bp, Homo sapiens
gcagcattcttagcaccttgcataggtctggtcatttaatcataacaacatccctaatgaggtaggagctattattattctcattttacaggtggagaactgaggtgtagaaagggtaagtaactcgcttcaggacacacagctagaaagtagaagtacaaagagtagaacactggttctttgagttcagaaactatgctcttaaccactccactagaaccttgctaggcggcagtttatttgtaaagccttgtgaaaaaattttcagcacactattcagcatgcggtagataattggaagtcttttctattgttaatatttcctgtctcctcagtttgattgataggattttcttcccgtacatatctctctgagagcattgttgcactttgccataactgttgaattgtctatttcacatgttagacagaaagcttcttgaggtcactctacgtacagaacttgtcccccaatggcttggtaagtgttgatggactgaacgaataaaatgttttgtctggcacagattgacttgctgcagggaaagcagtcctgtggagtggttcatacgcaagacgttaaggcatgtactactaggttttaatccagcccctaccatccattggcattatgtcttgtgtaaactatttatcctcccttaagcctccacttccttgtttacttaatggggacaatgagttgttataaagagccaaggagacaatgtgtatcgggatttaacagaatgcctggtttatgataagcaataaacaattacttttattattgctgaataactgctgaaagtcaggtactctgctacttgttggaggtgcagaaataaagattccttcctcattcaggaacttcaccagtctcatagaagagaagaatggtcaccaagtaaattataatctatgcaataatgtacaaaacagataactttgtgaggatgaaaggtgaagagaagtcttcatgatggaggatatatccaagatgggttttgaaaaatgaataaaagtccttaaggcagagcaggaatgaagccttcaaatactggg

SEQ ID NO: 57433 - DNA, 1035 bp, Homo sapiens
atattttgatcttcctctttacaaaaaggggtggcagggcgaagacctggtttgtccagaaatcgggtatcagatctgcccccaaatcttgattcacagtcatgacacaattcaaatttattcactagtttgttagtccttgtattcttactcaacctaaaggaacatttttgcttttaaatccaattccaaaataggagggcagtaggaatgttgagtgattattataatgtgtgattattacgtgcagctaagcacatacatgacttcatttaagtctcgtaccacagtgccttgagataagttgtgtcatctccattttatagatgagtaggcagaactagtaatcctaaccactgtgtttacactgccagctagtactgtatagtaaatttacaattctaaattgattgaaaatttatttgtgtatttaaagctgttataaacctaagataatcttaaattttttaatctggtttagaagcatgtcagaaaatttgacaataattaaagaaatgtgtaggcccattttgcaagtgtttcctgttcagctggtattgatgttcgtagggcttgattgatattcactggtaaaattatgagcaatattagtgaatgtcacagcaaactcttggattccatttagttatgttgtagtcagtgaatggaacagactggtaataaagtgtatcatggattttcaagtcaaaagaaactcgattcaaatcctgacttttcctctatgcttggatgagcttgcaggccactcatcccttctaatatcagtatattcatctgtaaaatggaaataataatatctcatatggtaatggttaaattaaatgggacaatgtatgtaaattgcttagaccttgtacataatataataacatccaataaaattgtagttgttcataacaatcatcatgatcatagaatccaggttgggaaggatcagacagacttaaagatcaggcagacttagtgcaagttctgattctactagtaaaatggcctttgttaagtcactttgcc

SEQ ID NO: 57434 - DNA, 1001 bp, Homo sapiens
catgttaactttcctcccttctctctcagaaggagacttcatctcctctagcattcatcaagaacatatgccctgttgtgggctcctgaaaccctgaaaagaaaatttccttttaaacatagtacctgtaaaagttaaaataggtttgtctacttggtgttatttaaggggcactgggaaagttcttcattccaggttatttcctccagtcattacactgttggtgatttatttctctaggattcacatctatcctccctcaagcctgcagggacagtactgaacttccccctaaccacagggaagggaaggatagagctacagaaatgatagcaggccaagatcccattggtgtggagtccctgaaatggggtcatgaggcactggataccaagcatatcctgaagtgcactggattgcactgtttagagcctcctgtccctgctggggaggaggtaagaaggcccaatcccatgacagggggtatatgagggcagtgttttccatagcgaccagaagcagatcatggcctttgagaatgagctggtcattgaaaattatttcaattataagactcttgcctagggggaatacagcctcctaaaatgcctttcatttcaatttgtgtaacctgtgtctccatggaagattctgcctcccaatgaagacattctggaaagagatcccagggcctaattgtcagcctctgcaaaggaagattttaaatgttttcttcctttgcctcttatccccagctttgtacagtaactaccttggttcatggatcttctcacccagtgattctcaaaatgaactggtgatatggtttagctgtgtccccacccaaatctcattttgaattgtactcccataattcccatgtgttgtggaagggacccggtgggagataatttgaatcatggggtcagtttccaccgtactgttcttgtggtagtgaatacgtctcatgaggtctgatggttttatcaggggtttccact

SEQ ID NO: 57435 - DNA, 1046 bp, Homo sapiens
gcttggtgcttcagagtagagtatacagtcactttttatatttttctgtctctctcctcactgtctactatattttatttctattccttttcctattcttcagcctcaccttttttactggcttctttcccaagcggcaagtatgatttgtcagctctatcttttaagaaatcctacttttgtgtcgtctgatcgagctcaacactccctataaattattcttgccaaaatattgaacctgaatttgatcaaatcactatatccaagtgccaatctgcaggatatagaagaattaaatgaacatgttaaatgatacttcaatgatacaatcagcaaagttccaaaacaaacagaactttacaggacaaataaccaaggggaaaagaaagacagacagacgtgtaatggatacctatagatcagaagagactaaagacacttgtcagccagtttcagtgtatggagcttacttgggtcctgagtgaaaaaaaaaacaaaacaatatgaaaaaatatgaggccactgggggaagttgaacactaatcagatatttgatgattttaaggacttattgttaattttttaaggtgtgatagtggtagtatggttatgattttttcgtggttttttttttttttttttggagacaggtactgatatttcgggatgaaacgatgacttgataattgaagtttcatcgtgggtataagagactgcattatactgttttctctactttgagtatgttgaaattttccataagaaaatattaaaaagcaacaacaacaaattaattatctgttttgagactcagtcctgtctatctgtactgcccattacttcacaaacatttctagatagagtggcttctaatcactgtagaggctctaatttttctgggctgttcttacagtttcttcttctgtgtgctctgcttcttagctgtctccttcctcagtcctctcctagtcttgctttatactaggcattcttggcctgtgggttcagagatgagcttcgaaggatctgtcattcctctgaaatat

SEQ ID NO: 57436 - DNA, 1111 bp, Homo sapiens
ataaaattttagtttgaagtactgacgaatatacaatttagtgacacatttttgctagtgctgcctttctcaggaaacgaatgtttcattttcctaaaggaagctactcaatgtaaacattgatctgcgttttaatgttttgtctttttattagtttgctgaatatactgatgttaatatcctctcttctgttctgaagccttgactttgcttgatactgccacctattttagtttgtaatctctgaagatatctagaccaaaactttttttttattaggttatttgtttatagctgctgtgtttgacttgttcttcaagaaatagctgttagcttttatgtgtgaaacctcagaggtgaagggacagtgagggacagatatttcacagcctttgtctacttgagttagcatataagattgaatgaagctactgtccctactttgcccagaatgtgcttttgaattatagtttcaaaaacgaactctgaaagagaagagagattatatttactctttctttccagctgttggagagattgattgaaatttatttctaaaattgaaagcaagaaacaaagcattatatgggcagaaggttaatgggaattgtgtagggaccctgagtgctttgtgctgaagacatcactggcatcagatccatgaggaaaacactaacaaatacttagagtcaatggatttcttttgtttacttttggagaagcaactttgtatgtttaaaacttaatccttatccagttactgaaactgagaatcaaaggaaaggatagcaatatttcaagttttgctatattttatatttttcagtatgatatggttgagtagaataggaacttgttattttgtatggataatcgcttatcaaggtatatgtaaatagaatcagtaattataattaaagataccttgaaaccaaagaaaatgactgaggtgagtcttaatgaatttagaggtttattttgccaaagttgaggagatgcctgggctaaagggacataagccacagtaggacctgtggcctgtactttttccaaagaggattttgaggtcttcaatattgatatggtttggttctgtgtccccaccaaatct

SEQ ID NO: 57437 - DNA, 1093 bp, Homo sapiens
gttctcaaagcctgagtctcttaaaagtcagaaggagccttacaggtctgattctgccacaaatgtaaggtgacctgtgtttaaacttgtaaataaaacctatcagagcaacatttctgaaacttcagtgtgcatacaaataactagggatcacttgggatcttcttagaattgcagattctgtggtctgggctagggctgagattctgcattcctaaaaagatcctaggtgtatcccagtcctgttggtccctaggttacactttgagaaacaaagtcttagaaagtagctgagagacatccaatctcctcccatccccaaatcagggactctccttttctaattctcccttacaggtgttttttccctttggggacagcgtgaaaatactgccatcaatgattacctttctaggattgctaatattaagatatttcaaataacctttcagataaccactgaaaacttcattccttgttcccatcatagctccagcatctagaatggctcctggcactaccagggcctgaataaatatctgctgaatgggatcatgaatgggtgaatatataacattcagactttgggatattatgaatactattcatgtttggttttcactgttaaatttttgatagcaaccctagaaacacatcaagaaactgtataattctctatgtataggtgtagagtgttaaagcctttggaacgttaaattattttgagccctgagaggaatgtgtctatgtagcttgagtcatgtgagtatacagttgtaacttctggtttttcctgtaaatgagtaggaatgactgagtggtgccagaggtaagaccctctcagaacattactcctcctcacagaatgttaaagcagccttccttgggatgtagcaagctatattaatcaaatcactgcaatgtacatattggccttgtagggaaaatgttgccatcctcccaaaactgtttctgcctatataagtgaaaccttagcttctctattttgaaccactgaccccatccctttggagtctgtgttttctgtgtgcctgtcctcaagctttgtgcttgaatcaactctatgcttagt

SEQ ID NO: 57438 - DNA, 1050 bp, Homo sapiens
gtgcctcagtgacaagagaggaagtcaaaggtttctttacctattgcacttccccttggagttattttctcctgagtgacactacagattcagacattcaaaacaatggcttcttcctggactcctggctggtgtgactgaagggacctgccttgctatgagcacctctccaggcagcccctacctggcccctgggcctcattaggccctggctgtcctccgtagagactagtacagctcctgccttctgcacttggaactttacatgtgactggttattttgcccctgaaccgttacaacttggatttgtgctttacggtgtatgaggctttttcaaacgtaattattatcatgattatccctacttgatagaaggggaaactgaagttaaaaactaccccagttcacttaagaagtgggacggtggctacaatggcagatgctgactcgactaagggagattcctccttgggaataacacattgatattaagtccaaaccaacatttgctcagaagtctttgagaagtcattgttaactggccacttgaggtcagactcagtttttaaatgaggatgtctggagattctaatatggtcattagggctattttccgtggaactgaaatacaatgttatggtaagcacacagactgaaaatctggcagattgttttcagatcctggctcggctactcactaacatgtagtcttggcaaatttttgaggctctttttgcctgggttttcccatctgtgtagtgtggggaataaaactagtacttgcctgccttcatagggctgttgtgagactaaaatgtattaatatttgtaaatcttagcatagtacttggcacatgataagcactgagttagtatgctcatcatcatattagcagcctgcagttgcgcagacctctgacctatgcagtttgcatttctgaaaatggttgcttggtttcctctgattacgctggaggagaatgcgtcatcagtttatttgtagatgtataattctctaaacttaaaagatgatcaattgtccatgtaat

SEQ ID NO: 57439 - DNA, 1019 bp, Homo sapiens
tgaaaatacgttccgtatcactagaacagtggataccctcttaaccagctctgcaaatctctctctgaaagatactggctgcagccaaagcatgcttgcctggatggctggtaggctattcactagaacacctctatgcatttgctcccacagttaattgtgtgttttccaagagctggtttgctggttcccaaactggttcatactggttgaatgccattgtaattatgtaatttagttagataatatgtaagccaatgaaacacaagtatggaaagagctgtttcagtgaaaattaagccaaatgctttggaaagtcttgatgaaggcaaattactaaaagcttggtgttaaattctgtgctcagattatttcacaaggtctttacgttccctcttcacataagaaaccaaaacagagaatcttagatgagatgatgtgatcagtgcagaaggtgaatgtgcagccctagtcagtggttccttgcttaaaggagaagccttgttcctacatcaaaaaatgggagtgggctacgtgcggtggctcatgcctataattccagcactttaggaggccaaagtgggaggatcacttgaggccaggactttgaggccagcctgggcaacatagcgagactctgtctctacaaaaataaaagtaaaaatagaattagctgtgccttgtggtgcatgccaatagtcccagtgactcagcaggctgaggcaggaggatcgcttgagcccaggaattcaaggctgcagtgaggtctgatcatgccagtgctctctagcctgagtgacagagcaagaccctgtctctaaaaagaggaaatacacattcatataatttaaaagaaaatcatatatttaatgtatatatacctttaactcactagattgtttaattaccagtttggatggtgttgcctaataggacttttattgtaatcagagaaatgcagattatgacatgatcccatttttcacccattagattggcaaaatgttgaagtttgataa

SEQ ID NO: 57440 - DNA, 1073 bp, Homo sapiens
agtgctgcatcagtgatagctttgatgatgacaatgatgatgatgacagtgatgatgaaggcaatgatgatgatgatgatgacagctacatctttggaccaaataactttactctattttaataatataagtaattctgtgccttttgagttctttttatgctttcccttggtcatacttcattaatttctcccgagagtcttaaaagtctcttttttcttttttcttttttttttttttttttgagctggggttcacttctatttctcttttgtctattttgtttcaatattttcatcagctattagattcatcaagcccaacacttatgacttttttttccttatagctatttttattcagcaactatcctaccttgaatttatgatcttgcttacttatttccaagtggaaaactgacttcatgatcacccataccctactgaacgtcagtatcctccctttaagagattgccccttttcttctggtatttggggcaacagtcttgatatttgtagaaatggcattgtggtaatattgatgcaggcagaaacattttgggatacctacggccatttaaatattatgtaggttttaccctcttcccaagtccccagtccctatactcccactctcctgttttctcattagaattggtttttacagcgggaaaaactaaagctatacaaatttccacctgtttcaaagtgatctggttttagacttaaaaaagcttttttctttgcctaaaacagatagggcttcatgtgtttttctgcttacaaatataagagaacacagagcatttcccatctttacaccacagatattttgtatctggctttggtgttaacttctggaaaatcgactgtctttcatttgttcctttcttcttagagactcccattgcttgcaggttacatctctacactctattttctatgtctgccatcttctctctccttctttcaaccctccatatgtatttcttgtatctatttctgattcactagcccagtttcctgcagtgttgattttaatgtttactatatgcagtgatgatcttattttg

SEQ ID NO: 57441 - DNA, 1048 bp, Homo sapiens
tgacagggagaaaatatgtgattcttaaatatttacgaagagatctcatcatggtcctctgaggatgttaagaacccaaagaatcttaattgtttacagtgctctcccattaaaactttaaaagcagtggcctgggtttcttctttcagagtggacctggcactccagagggaaagctcatttgcttgattggctttttgggaaaggtgtgccaacgaatgtgttttcatttaataatctggaaaccagggggatcacggactggcgtgcagagttgctcagctagaagcgtctgaacttgagtgggaaggtgacaggattcagtgtggcttcgggccggtgtggtttgtgagcttagccagctatcctatgacagttttacaagtatagaactcttgaatatgctgaagttgaatattctgggaaaggaagggcgaaggtgattgaactgtgctcttgtttttgctttcaggcaaattcctcttctataccgggtgcagtcatctttagcttgtcagttattgtcacaacttgttgggaagatcatcagcttagccacatagagttgcctaaatatttgagcagaaaccccagcccttctgcagggtctcacgtgaacatcctaccagatgtggggatatcaaggtaaaagacagggcaattcatataataataccaacagcatacactatgtgccaggcacagttctaagcactttacatgtcttaggaaaaggtttttcgtatccttattttagagatgaggaaaacttaaacacttaggtaacttgcctggggtcacacaaccagtaaagaatggagctagattcaaacccaagcaggctggctgcagtagccagaatgacccaatcgtagttcacagtagtattcactcaagggattcagtaggatccataatgattcataggacagaatgcatatctcaacaaaacatatgtttgttttgtgttgtctgaaggttgtagatgaagtacctggcaagcatgtcagaattctgagctgccactggatgagaaacttccatgtca

SEQ ID NO: 57442 - DNA, 1023 bp, Homo sapiens
tgtggttcagggtctctcatgaagttgctgccaaactgtgggcagcagctgcattcatctcaaagctcaagtggggcaggggaattcacttcccaagcacactcatgtttgctgttgggaggcctcagttcctcaccacctggaccttccgtgggtggcctgagtgcctttatgatatacatgctggcttctttcaaagcatataaaccaagagagacagagggagccagtcagagagcacccaagggggaagctgcaatcatttataaccaaatcttggaagtggcctaccattatttctgctgtagattattgatcacatagaccaaccctggtacaggtacagtgtgggaagggattacacaagggtgtgaatcttagaagctggggtccttgcaggccatcttggagtcttcctaccccatgaggctactctaaaaacacaaaagcctgagctgtgtcaccaagctaaatgaccctctttatgctaaagaatgatccatcatactgtggaatgtgtcgcacctgttaaaaagaataaaaaatctgtatgtgcagatatgaaaagatctttaagttatactattaagtaaagaaagaatctgtaatagtgctatatggcttgatatattttagataaatttaaaatatatacatgtaatctggtgtagcatatatttttttttctagaatgaaaaagtgttttgcatttttccctccctccctttccatagggagaaatttttagaaatttagaattgaggcacctaagtctgtaccgatgctcgtgttccctgcctgtcttcagggaactatacagatctttattttccaagtctcagggctgttcgggccataactactcctatgctcgcctcagatcttcacttgaagctggttttcctgttgtgcagtgcactaagtgacacacagaggctttctgcctcagtgtcttcagccaactgagcaagaattcttgttgcaacaagttttgcaagttccagggttcttggtctgcctgga

SEQ ID NO: 57443 - DNA, 1192 bp, Homo sapiens
tcatacttttccctatgatataacatcttttgagttttttttttctttttgtttgattgtttttgtgatgtgtaaaaattcaggagtggagcagcagggaaggaagggactgccaaccaggcagttctggaacattccaggtgttttttctctagtctatcacttttccttttaatgaaaaattcatcactacagtcccaatatgagtaatcttcctatttatttttatgtatacaaataatatacataaatactagatttagataatgtataaatgtttttatatttcactgaaaatatccaatcatacacagactgtctggcatacaatggtttgatttatgatttttcaactttacagtggtgtggaatcattctgtttttcacattcagcacaatattcaataaattacctgagatatcagcacttaattttaaaataggctttgcgttacctgatttggcccaactgtaggctgttgtcagtgttctcagcatgtttaaggtaagctggtttaagtcatgatgtgacaaaatgtagtagttggttggggttgttatagatatttttccttaaagtcccagtgactattgaatcttgttttgtaaaaacaaatagtataagtgtttaagaataaaaaagatttaatatcaaggaacgcatgtagtgctagatgagattgtaaaggttgttattgtctatttttgaaaaccttttaggaaagtaaattaatttgttttaatttcatggactgctcagttttcttcacccaatacaagaaaaaaagaggcaaattataatactatttagaacacatttgctaaatttctctttgctgccttcttaattttatctggcagggctgcaagacaggagttacagcagtagacctggctgtcgtgaagtgatttcatctcttcaagttgtggagattttatgttttgtttgtttctttgtttgtttgtttgtttgttttttgagacaggatctcattctgtcacccaggctggagtgcagtggtgcaatcctggctcactgcagccttgacctcctgggctcaaacgatcctccaacctcagcctcctgagtagctgggacttcaggtgcatgccacctagcctggctaatttttccatattttttgtggagatggggcttcactgtgtttcccaggctggtctcaaactcctg

SEQ ID NO: 57444 - DNA, 1530 bp, Homo sapiens
ccatcgcctcatctgggcagaaatgaattggacagaaaggggctttgggggtccagggtgcagtggctcatgcctataatcccagcacttttggaggctgaggtgggagcatcactcgaggctaggagtttgagaccagcctggacaatgtggtaagaccacatctctacaaaaaataaaattagccgggtgtggtggcatgtgcctgtagacctggctatggctacaccactgtaattgagcctgggtgacagaaagagaccctgtcttaaaaaaaaaaaaaaaggaaccttgaggtgatagaattaacgtttttttaaaacaaaaagaaaacaagagggctttgggcaggctatggatgattcatttgcatacacaaatttgaaactttttacatgaaatagtacagtaaacatttaaaagataaatactgcccaggaatactgttgcaataccatagtaactgcaacaaatattacaggaaaaaaaattaatacttttaacatagaaagtgtttttgtcagacaagaaggatatccctaacacagatttttaaatgggcaaaggataggaatagataatttgcagaacaaagaaaatagcctgtatggaaggaaggtagaagaataaccttatagtatatagtttaaaaatgcagatttaagaaaacaatcagatactttttttcctaagaaattggcaacttttttgtaaacttttttgtgtgtttttaaaatcacactgtcatttctgacaaaagtagaggagtcaggcactcatattcatatactgctgctgagagtgtaaatagccacaacctttctggatgaagatattgcaagcccaaaagatggtcatgttcaaattaataattattttcctaggaagagggaaatcaaagagatgtacaaagatggttactacagctttatttgtcatggtgaaaaaaagggaataaccaaatttcccagtattacccggatgagtaattaatggcttatccatataatgagatagtataaaccaccaaaaaagcatttgctcaaagaatgattacataattccaattttgtagataaacagcagagagagaaaaaaatgacataggaaacattccaaattttaatggcactcaattggtaggataacagatgatttattttctacaatgaaatattgctttggttataagaaaaacaacagcaacaacatatttggtatttataccaagcaaaatgtacatttttgtcatttggcctagagaagagacatgtctgctcaacaatgaagttatttccatgaattctggcatattggttaagaaggactcagagaatccatctaaagctcttggtctactcctggtggtcataataggtgctcaataaatgtctgctgtgcatgtctacagggccctcaagtctaatgaggatggtttttcaattcttaatacaatctgggtacgacttgtcacagacacgaggatgagggatggtgtattttttttgattttagaataggaaaaaaacc

SEQ ID NO: 57445 - DNA, 1032 bp, Homo sapiens
tattatgttttattttggaactattccacatgttgaggaagaatgaaggaaggggaaacagaatcagacttctaaagagtggaaaggtgatatctgtatcatatgaccaagcctagggaaaaacacatgagccacactcactttttgaaaatctgatccttattgttaaggagggtgactataattttagaagggaaaagatgaatggaagactgtcttggcttagaaaacccttttctattttttgtccaactgaatcactctgataaaagcggcctgagcatcacaagacttaactaacctttatgtcatttcccctcccactctgttcccaaaatggctggtatttttttatattcatttttatcttgctccaaacaatatgtagtttctcctcattgacaaacattctgtcaactcgtgaattattgctgattcgtttgcatgtgtgtgagctgctctctgctcccacctttgcactatcagatggaattttccacgtatatgtcttagcctcctgacgctcattaatgtcaatgtgggggtcatgaactgtgccattattgttcttgtagtgtttagttagcctgagaagctcaatttgtgtgtatgtgtgtttttttcttttttttaattcaataggttttgtgggaacaggtggtgttaacttacatggataagttctttagtggtgatttctgagattttggtgcacccatcacccgagcagtgtacactgtacccattgtgtagtcttttattcctcgccccactcccaccctttcctctgaatccccaaagtccattgtatcattcccatgcctttgcatcctcatagcttagctcccacttatgagtgagaacgtacaatgtttggttttgtattcttgagttacttcacttagaataatggtctccagttccatccaggttgatgtgaatgccattatttcattcctttttatggctgaatagtattccatggtatatacataccacattttctttatccacttgttgattgatgggcat

SEQ ID NO: 57446 - DNA, 1068 bp, Homo sapiens
gatctatcagcctggctctttagggagcaagaagaaaaggagagttcagtttctaatgcaacatagtcatgagtccaaataaaaaccacgccatttctgtgcatcaggtgtggccaacaacactctgaactcaatagcagtgtgaggcacaatcagtgaatggtatcattttgccatggatgcaagtatttggacaaggaaagaaacccaaggtacaactgagagtaacaggaatgttggtgtgtctcattcccttgactagttctcattcagcttctccttgccctctcttcagctatccttttctcttccttcccattacctttccattcattaggtttggcagtcatggatgttgcttcagccctgcagagaacacgcagggagagaagggtcccactcttggtaactactgcattgttatttacgaacatctaaaaggactcactttagactgacagctccctaaggataagaattgggtctcatttgtctttgtttcctcagaacctagcacagggcttgggacaaaacagatgcttaagaaacttgttgaatgagtgaatggtgcagataagaacactgggcttcaaatggagacagaagcatacaaaggcaggaaatgttacctggaagactcctagagtagacatctctacttggagcagcgtagcaggtatagagcaagcacagtgccagataattggattgatagaggccaagggaaggaggcagcatggtgcaagagaaagagcccatgcttcaaacctgggccaaagccaaggattggctctggcagcagctgtgtgaccccaggttaagttaaactctctgattctcagttttctcaccaataaaatttgagaaataatactaactggtctgggatattgaagaaaatacacagagtctccagtagtgtttgctgtgttgtatgtgctctgtaattggtagccttcattttggttgaagtcgcctgtgtttgtaccatcaaggccatttatacaggaaggatttgggatgggcttgttgggggtggtgctaaaccgaacctgaaaatgcagaact

SEQ ID NO: 57447 - DNA, 1277 bp, Homo sapiens
acccccctttgtggagaggaaagaaaggaaccaacttaaagtatgtccctcacctctccctctccagaggcccagcccatggaacagtgaaggggcaaacccaacctcttctttctccacatgtgactggatgagtcagtcaccatccagagggtctcagcaggtgtgaggcaagggactaatggggacctaccaagttctctaatccagcaagaaaactgatcctcatctaactctttctgtatttcctggttaaaaactgtaatgaaaggagatgtgtgattagtctccccaaacctccatccaagttcaacataaattctagggtgtatgtggaacagagagctctttcagagcaaagagctctaaagagtttgtctggaaggcacatcaagaggcaaatgaattaaaatgccagatttgctaaagccattgtccaaaaggaagtgaatcctgggggaggtgtgtgaggctccagtctaccaagtgggttttcccaggtttcctggcttgagggcaaggtggtagcatttgcatcttaactgttacacttgagaagacactaagacatcccttttaattaagtccaacaaatagcatggaaatcttccacaaaaaaattccacaaaaaattatgatatgtctgattagaagaaatcagtcacaacagggaagaattttacaagataacgttaagtgaaaaaaagcaaactaaaacactgtgtctataataggattaaaatggtataaaaatgtcatgcatatggacaaagattgaaatgaaatttgaagactgattgggaagagatgctgttggagatgaatttttccatttaattttgattttcaatgttttcatgtttgtaaaataagaacagtttttgcagaagagctctggagagatgtctctcaaggtggaaattatccctgctgtttgagctctaaagagggcaaaacccttgaacagtgttagcctctgatgctactggtggttaattctgttctctggggcagggcaggcaaactatggcccataggccacatccagcctgcgagacaaaaatggtttttacacatttaaatggttgggagaaaatgaaagaagactattttgtgacatgtgaaaaacagcatgaaattcaaatttcagtgtccataaataaagttttattggaactcagccatactcattcatttacttttatctatggccgctttcaagcttacaatggcagagttgaagcgcagtgagaccatatggaatggaaggcctaaaa

SEQ ID NO: 57448 - DNA, 1039 bp, Homo sapiens
ttaaggattcttgtttgttgttttttgtaatccgttttagagtgaattaaactcagacatccctggattgtatgctgtctgtagaatgttgattttcaggcacggggatgtagctgtagaatgtggcttgttcattcttcctgataagaaattgatctcctgaatggattggccatttggtaatttcttagtgaaaggctgactcttgaatatggctgttataatataaattcttaccaacataaagtaagggcttatttggggcttggtaaaactgtcatgccttgaagtatatatagcttataaattggctaacatgtatttatgacgtagctacccctgtgccagctatcactgacaaagcctggattctgttgcaaggagacatatattgagagaaaattgattacaagtaactatttcaggctctgctttgaatttctcattcacatgctcttttttctttttccctccaagggtcgggattactgttcggaagaagaggatatcacatagcaccaattttaccactcaaaccaggagctactactgtgtaaataggttacaccccagttgaaatctttgcaaaggtcggttctattcagcgaacagcactatagcaaaagaagatcgttccatattgtacgccccattaaattacagtgtttcttaatgaacttgcaaaggaatattgctaaaaacaaacaaaaaaaactgttatcgaactttctttgttgctgctagttaaaacttgttgcaacttttcacttctcttgtgtccaggtatgcagcaaaattctgcaatttcaccttaaagatactgttggttttacagatgctctccaacctattttctataagatgaggtagtggtgaactcagataacaaacttctcttctaaactggttctgcttctaagacaagcatctcctgccctctctccttcctccccatctctcgcacgcagtctagagatggactgagccttgcttctcactggcagtgttgagctttggagatgggatggttgctatgcca

SEQ ID NO: 57449 - DNA, 1813 bp, Homo sapiens
agcttgcaacattggctttgctcagatgcagatggaagtgtgatcacaatcattttgaatccctcttcctcacttttttttctaagaaaataaacattttactgtttttatggatccttgtcttctcccattcatccagctcagtgttttaagatgatcctgggtgcagaagttgagccctcctttgcattgacactgataattagcctatagggctccctacccttccattaagaatctaccaagcattagcaaggctgaaagtggtctaagaggtgaggggacatcctatgactttttaggaaggcctgaaaccaccttgttacctttcattttgttagcaaataaaccatcctattttgtaactctcccccttcaaaatgctacatgagccttgccacttcctttttctcttacttccagcacactagacatagcaaaagtgtttgcctactcaaaaacataatacttttatgctgatgatggtatttggagatgtgaaagccaaaagcccctggcagtggtggggaatgttgactgagtgttcagcagagtttatttttccatactatatgaagagaatgatctcttctcaaagacagaagtgatatttttaacaaatattgtcacaagtaaatagcaatcaaaaggagaaaataacttttgtatttttttaatgtgtttgatagctttgacgagggttctctttgttactttcaggggagggcatcctattaaatgccacgccagcagtccgggtctgggtttgtcccacaaaatcacaggagcactgtatgttcctctcttttggagttgtgactttgaagggcctcaatattagccacactgccgcctgcagaaggtggagagttaagatgttctatgtcaatttgctcttgccgaaaagatgagcctcgattttaaaatctatccacatccaactgatggcaccattgatgtgcaaataatgagattccctatctccttttagacctgggacggcaaaagggaagggaaggaaacttagcagagtgctattgactatagattcacatattagcaacaaaatcccgtaattcttttggccaacagcagctattttggggagcagctgtggctgttacataaatagagatgcagccaaaattttaggccttttatcctgcttctagcagaaaaatgcagggagagtcaagtagtctagggtttcaggttgcctcccctcatatggtttttggccaagtgactaaaacagttttccacaactgtaaacaaactgctaagccccacctcaaacttgttcactggggactttgcttaccgttctgtgggtgaccttttccgggatttcttgttcttatcaagcaagaattaagcacatgctaaacgtcttccatttgacttctctactcggtgtctcagacagtgtcttcccagaaaaccaccaccctctacccaaagatgaaacatgctcatgtcatttttctcatggtcacatttaacagttttgacatgttatacttgcgcatagatccaagcgtttcttgggaacctgacttttgagtgtttaataaagccggaagtggtgttgccctgaaccagcagattttcacctgggttctggctccggtgtttaacactggatacatctttgatgtgcgaaagtgagttcatcttcagacacatttggtacatccagaaatagatccaagaaatggggtggttgagtgggtccgcacgaaatgcttgattatgtcagcaacacccaacactgtctgttttccatttgttggttttaatcataaaattgtca

SEQ ID NO: 57450 - DNA, 3033 bp, Homo sapiens
ctggagcccctggtacactccaggcactgcgctaattgccagcaaagcacaactgaactaaatccaccttcaaggaacctagccataacgagggaggcagcatggaagtaccctacaggggaaagtcctgagtgctgtgggagcatctcaccgtggcagccagcccagttttggcaatcaggggcttcctgaaagaggtgacatcaaagcccggatgtgtcagaggactgagggagagtgttactaaaggactttcaggctgagaggatagcacaggactcagcccaaaggagggccagtgtggactgtccagggccagcctgcagtacagaggctggagcttggacttgtagagggagagagaagagcaagggacgtggacggggcagtgagccaggctagccacagagggttcccggggctttgctggggattcagggagcataaataagagctttaggtggtgctgtgtcctctgcagcccactgctgaggtcctccagacaggtaaggtgtggtcacaatcagggccggggtttccctgctcactgcggcagtgcaggggtgcttgctgagatgattcatcccagggtgtcctctgtcccttacccagccccaactcctcttcctctgccaaaagctatttgaattcaaggactttaacctgggccggatctggtttggagacaaaggggacagctctgggtcagcatgaccttctttagagccactaaggcgaaaaataccgtttgggaccaggctggcctagacccagggatgagaatgcaccctaaaataaatatacgggaagcagcagagggcttccctgtctagtgtgtgatcctaactaaaggcagctctcttggacagccttcccctggattaggtcacatacacctggtggccaagcctctgctgggtcccaaatacacacccgagtcctgccaaagaaaggagatttttaaaaagcacagacaaattgtatgcaagtggaaaatacccataggcctagacagctgtggagggaagacctcgtgggtacctggaggctgccagagctgggagctctgcaggtatgagtcagggaaggctcagagacaagcagaatctctctatggagacaacttgcagtgccttttaggttttccaaataacctcggagttcagagcattgggtttttttctcccctccccacccccagaaaaataattagaaaaatgtttaggagaaaggaaaagaattagatgcatcagaataccagctataagccaacactgtttccagaaactcaagaaaaagctcaaacagaagacagttcccctgagaggctggaggcgttggtgctgaaggcaattttcctagctaaggggcactgggccttgctgcaccttggggctgaccttttttgcaaaacacccacccctgccctcctggcatactcaacagcaacgccagctttctggacccttggaaagatgttagctcaaacacccactttttccagatcttcctcttgctcttcactgaggaatttgtaattctgaggctagcgatgcccactcggatattccgcaggcccaggtgtttagattagaatttgtccagcggtaatcctgatgctggaaaccaacaaacatttggcctcatattcacccatttaaaaactagagcccctggcaggtccccttagggccatgtgttcatggaatataagccaagtttgccttaggcttgttcatggaatataagccaagtttacctctccccattttctgccctggcccacttcccactcacctccacctcattgccaggaagggatcaaaatgcctccatgccagttgttaatggctacatatttgcccttcccaagggtatttgcattttatttaggaacatggccttatattcaaggaaaatctagcatcaagattacgaggcatcacctctcaatcaggtctgggaggtatcttggggcattgctcttctgaacacctgcagaggcttcctcaggtgagtgtgggagcccggaagggtggcctccctaaccactctgcctgcacatgaattctccaaagcagtgggcccccatctgtttcaattacacatgcctgtcagcaaaaacttcgtgagatgcactctctctgtgtgtttattaatttatttaaagcatatatccctttacttttgtactactatattaggcacattataaaaagtatacagcatagaaactttaaatgaataagacacaaaatattataaacagaggttctggcattttctctctgaactcctgagggggaccttgggcacctcctggtatgtgcacaccccactttgaacacccttgctttagtgcaaatcagcacgcctaaatagcatcccaaaccactgtgcgacatttggcctgcagaataagaaagtcctaaggcagaatccccaggaacttcaaatctgggagatgaggaaagaaaactcactcacaaacaacataaatgtaaataattcaaaaccctaaaggagagctgtccctagacagtagtggctacaggtgctaagcaaaagtcaggtacactggacagagccatgcgattgattgttcatcttccctctctgggtctccagaaaaggacactggcaatatccccagctctctcctgattggaattctttgaaccctcgaagtgctccagcagtactaccccccacgtagcagtgggcccatgtcgcttgaatattatttttgatttgaccaccaagatgtaatgatgattctattccattttgaaaagggtctgagaaagtgtacaggtctaattatatatacatatttatacatgtgtatttttgtttattgttacattttgacattggactttctattaaataatttttaagagttggcctggctttgttctcttttatgtctttcttctttcctttctcatggaggaggccattgtaaatatctgcaaaagaccctgttagtgtccttgtccctcctctctttttgccttccctatttcgtgt

SEQ ID NO: 57451 - DNA, 1882 bp, Homo sapiens
ccctgtccttggcttgacctccctccctccctccttctcaccacaccagttggaaatcatgaagacaatctgttcccaagagcaaggctggagggcggaaggctggctgggctgatgggaccaacgcttgtcagaaatgaacaggctcatgcgacagtgaagacagagcagagggaaacagcttttggcttcatgctttgacaaagtgccctgagaccgtttgtccatgtgtgtgcgtatttctgttcggtaaatcctggaaggccagtgcagtgggagaatccatatgttttcagcctctaaaacatgccaggtagttatagttgacagtggggtatgtgagaaactatatggtactggcctcattcttcatgctgccactctggcctttgaccttggagtggggaattccttaaattcacacatccctgagcccctttgtgggtgacccaggccctggcatacactgtacaattaacaaatgtcagctgaatgagtagaatgaataaacaaaaaagagtcattgtgtaacagaaggttgttcattaagcacttcctgtgggatctcctcaagtcaaactcatgagaaaatgattgtttttagtaggctccggaaggttaaatgacttgtccaaggtctcatagacaggactgtgtgtgtgcacatggtgtgtgtgtgcgcgtctgtgtgtggtggggattgagcaggagagaaggctcatggcgttattttatgcattgcccattcttgcaccttcatcaggtctgaatttgtgaatttgctgaggctgataggacagtgtgggctgtccctgaaagttggaggaggtgacaacaaggttgggggccttccatatgggtgcctgctgtaccacatatccagtaaaaacagaacatttacgaatggtaagagaagcccttatgtacacgaaatagggaaggcaaaaagagaggagggacaaggacactaacagggtcttttgcagatatttacaatggcctcctccatgagaaaggaaagaagaaagacataaaagagaacaaagccaggccaactcttaaaaattatttaatagaaagtccaatgtcaaaatgtaacaataaacaaaaatacacatgtataaatatgtatatataattagacctgtacactttctcagacccttttcaaaatggaatagaatcatcattacatcttggtggtcaaatcaaaaataatattcaagcgacatgggcccactgctacgtggggggtagtactgctggagcacttcgagggttcaaagaattccaatcaggagagagctggggatattgccagtgtccttttctggagacccagagagggaagatgaacaatcaatcgcatggctctgtccagtgtacctgacttttgcttagcacctgtagccactactgtctagggacagctctcctttagggttttgaattatttacatttatgttgtttgtgagtgagttttctttcctcatctcccagatttgaagttcctggggattctgccttaggactttcttattctgcaggccaaatgtcgcacagtggtttgggatgctatttaggcgtgctgatttgcactaaagcaagggtgttcaaagtggggtgtgcacataccaggaggtgcccaaggtccccctcaggagttcagagagaaaatgccagaacctctgtttataatattttgtgtcttattcatttaaagtttctatgctgtatactttttataatgtgcctaatatagtagtacaaaagtaaagggatatatgctttaaataaattaataaacacacagagagagtgcatctcacgaagtttttgctgacaggcatgtgtaattgaaacagatgggggcccactgct

SEQ ID NO: 57452 - DNA, 2652 bp, Homo sapiens
ctgaatttgttctaaaggaatatttaagagacataattttcttctctttaccataacattacacaaaactttttcctaaaacacggttgtgaggtactgatgaggtgtaagtggagctgttaaaaacagcagtgctgtattgcagttatgtatattcgtgtacagtatgtttagatcccaggtaaacatattcttttctgagaggataaatacctgcattcagatattccaggtaaatataattgagtcagggagtagtaaatctgatggagaattcactttggggaggggaaaaagaatagtatgcaagacccttattggcttttaattatacctgaaaccaaaatggatatttttagtctctctgcatgtgagatttggtgtaacaagatagaactataatatatacagtatatggaaggatagatatagtgctttgttcattttaattgcaaagctgccaaaatagttgaagcttaattacttgacttgccttgatttataggactggggcttggagaaaatgagcagatgttcctctaagacatcgattacagaagccttatatacatggatttgattttgtatttgtagctgaaagtcactgttgtctaaaactaacttttctaagttatcaaaacaacctaatttcttttccaacaaggagaacttaatggcatgaaggattgtgtgacacattggaaaagccagcttactgccactctcttcctttggccattagagggaggtgttgcctttcattgacgcttagaagcaaattgttcacttgttaagaaaagtaaatccttaaaaaaagaaaaggaaaaaatttaaccaatttttcttaatacccagaaggaattatactcaatatttccctagttaagaaaagaggagataatgttcgtctaaaaaactccaacgttgtaattacaactctacattcatttacttacttgacatactgccacaaagtagtttttgagttcattaaaaattccaaaggcattagttgttttttttttttttagtgttttgttttttagttaacttttatagacattttagtaacttgctaaagattcaggggattctatgaaaccccgaatttagaaacatctggtctacctcagttaaatgttgactgcttagaaatatagctgaagtgatcaccacagccataaaattgtttaagaaagatttatataatgtttacaaatctggaatcaaggattttagctgaaatcctttaagagatattagagcaagtatttaattcaggtattttcaagttttaaaacttaacctgtttacctactaaaaataaaatagctagtttttttctgcatataaaagttcattgaaatgatatgcccttatttgcaatacttttcccataaagttttaagtgtgaaagaattgtaatttactagatatgtttggtatgggatattttgttaggcaagttttcttttttcttcttaaattgcaataggcttccaaaaagagtataattgtttcagaacaaattaactcttggcattatacgtctccctttttctttacagtattagtaaaaagaaaaattgtacactttctgattttaacttcactaatgtaattactctctcaagaagcttttaaaatttaaattaccatcacacaaccttttttatagtaaagccaacatttgttctctcaccaaaccccatgccaaattcatcatgaagaaagctcagcataagtaattcaaatactgcttataattttagaggggggtagaatttagtaaatattccagccggtcgttttatgcacaaggcttcagtcagaacatagaaaaaaaaaacattctgtgaatgaaatattgtatgttcagattttataaaagacatttttaaaagcccaatttacagccgtatattttcttatgatgtaatttatgaaaaagatgtctgtactaacaggtgctgtaacactactgttgttggattttattgtttggtgataaatgtatacaatatttctaagggaaactatgtactgtgatgtaaaagtctgggcaaaatgtatataatcctgtatataattatgtatttgattataattactgattgtaaagatttaataaaatatgtaaatattccagtttagttttaatttgaatttttagaatcactgtgcatatcctcatacttttatgtcttgatgtttatcactctgttttccttttttttttaaactcattttatcctccggggattgaattctggggacattttaggctgtagaaacccaagcttgtgggctaaagtaaggattttgttctaagaaatcactgaaagtttttcaacaagtcagtagcatgcacaaaggtaatgctaagtgaataaaactctagaattgtgtataaattatgatccagcgcttgctcactctctccatacacatatatacatacacattatatatatatacacacacatatatataatgacattgactcatttattcaacaaagattaagggcgtgcatgccttctgtatgccaggcactattataggacctggggttgtagtggacagatggacaaaatgtggtaaagaagatagaaaataaagtagtaagtaaaaaggacaatgagtttatga

SEQ ID NO: 57453 - DNA, 2051 bp, Homo sapiens
tggttagcgtacttcttggcttactaatgtccactgatgtcagtcttagttattgtcattccttccaatttggaagaacgtttattttctaacactgacacattttgcacagtgaatctataggaaaatgtgactgcataaagacagtcttcatttcagtgctgatgctcacctttctgcattaacatgagtctctttcacgttttatttcatcttgttgcaaaaaccaatatgctttggaaagtgtaatagtacatttttttagagaagtagcatgaggtttgtttctttctcatacagatcctgaaatggaaaatgaagaacaaccatcctctgaaaatgattctcagaatcagagtggtgaacagatttcatcaagttctcaggaggttgatttggttgatcaagagtcttctgaggaaaattctctaaattctcacccagaatcattatctctagcagatatggacaatgctgcaagcatttccccttctgaacagacttctaatcccacagaaaaccatgagactacaaatcttaatggtgaatgtacagatttagataaccagcttcaagaacaatcagaaactgaggaagattccaatcctaatgttagctggggtaaaaaggtccagcctatagactccatattagcagactggaatgaagatatagaagcatttgaaatgatggagaaggatgagctatgacttgctaaacaatctgttggtaggtatttaaaaagaaaaggtaaactgtgtgtggttaatagacatcctaatactaagcaggctttctaatgggaggctttaagtatggtgatgaacaaccacgttctgactggcgtagttatcgtaggaatctggagcatgctgtgttagaattgaccttgtttaaaactgtcccatcaaaaatggaaatccacagttcccccttcaaatgcagcactgcaccaccctgcaacacctcaggccagggaaagattactgagcattcctgcgaaccagatttctgttgtctctggatagacaagaaacaaaattcatttagtagtggagtggggaataggagtttggatagccttctaattaaaggaagctcgcctttcttggttttgggggttagaggctcttttgggaagatgcatccgagtattgtggcattctgattatgctgccttcacaaaacactctaagtgacctaagtggttatgaagcaaatgcatttatggtgaaaacagtctttgctcattgctttctcttgtttcatttagtgacaaatgatcaagatgacttgattttttttccttcttaacaatgtcttttttatttaaaccaaaggtgaagccagtgtactttctcagtgagttctctgcataaagactaatcagtgggaccaggtaaaaaggtcatataatacattgtggagattgcttacttaatacttctgaaaaatggagtaagggagaaactgtaatgttgcaatatgaacctcccattgggccttccatagggaaagctgtgactactctgaaatggaacctagcattatatccttgtagggtagattataaatcatttccagttcatttctcttagaggtgattacctctagccatcagccttactccatcccatgtttggtatgcaatttgagccacaaggctcgtatcgccaacagctatatacattttgttccatttttctgtcttacagagccatgatagaactgtggttagtgagttaaaattcctggagtaactactgtttttctcctttgaaacttaggtttctaaagttgcacctaaggaatctgtcacattttctgttgaatcatggtttttgtttttgtttttaacagatattccttctgatacggacttgaaaattagtgtatggtgacctgtgtttaaaaaaaaaagtacaatacaactacatatagctatatagcttaatgagacttccaccccccccctttttttttttggtttgttgttgttgtagtagtctggtgctggccacatttaagtcttaaaaatttttaaattttgt

SEQ ID NO: 57454 - DNA, 1066 bp, Homo sapiens
aaattcattcatagttctatcactgtaatccgagtcattgattttttcctttctaggcttttccataagcatatgaaatttttatagtcataatcatagaattctgtattctactttttaaatgtattattattctgtgtgtcctatcaagtaggtcattataatttacttataatggtgtacagttgtttacaattataaatagtctagtaaaattatttgggcatagggcttttcgctacttttgaattatttcctttggatacgtttctatgagaattaatgggtccaaaaattatgttggtttttatggttcttgatgcataaaattaattctgtcattgtaaaaaatcagtaacaattagtagatagatctttttaatggctggatattttgatgtttgctgtatttattttctggctagatgacaatgaggggagcagcagtgatactgcccctctgttccagatggcaggtgatggaaaggatacagatgacatcaagatccccatgctgttcttattcagcaaagaaggaagtatcatactggatgccatccgggaatatgaggaggtagaagtgctcctctctgataaagcaaaagatcgaggtaagagtaaaataccatttgtttttttatgcagcgtaatattaattttgctagtttgataacaagaatgagtcacaaaaaattgttttggggggttcactgtgaaaacaagtaaaacttttagaagatgatttcaaaatatatttttcttttggaaataagaataataaaacatttattttgctttgttttctgagttaggatgtttttagacatatgtttttatgtgtgatttgtaatttttgccctgagtctgttcaggtgataaaaatacaagagactgcttcaggaaagccattttaacatccggaaatgttcacaatttgatttcactgatactacatcttacatgtcttttataaggaatgagaagacatatatagaatgttgtatacaatatcatagtagttagtctcaacaggccacctataatcaaatgactgctgtcttggtga

SEQ ID NO: 57455 - DNA, 2105 bp, Homo sapiens
tataaactgcaaagcacactagaaatattggttgagtactgtgatatgcaaaatgtttaaaacaatattttatggtgactatatgttagatacgttatcattagaaaagaaatgagttctagttcttttaaaactctagatattgaggtttaatgacttgattgccatttgagaagattaaagtatttaagttgcttttatttctgacagacaagaggatttgttgcaagcagtaaaccatccaatggttgttcagagcttactaacccagaggcagtgatgggaaaaatcgcactgatacaaagaggacagtgcatgtttgcagaaaaggcacgcaacatccagaatgctggagccattggtggcattgttattggtaagtaatcatccatgtcattgtgttgactgaaggggagataatttttaggattttttcccttttattttctaaaattttatcaaagagtttgtcatagttttttttacctcacctagacaacaaggataggtaatccaatgacttttaatttctagatatctaacatcttttttaaaagtctagatttgaatttctgtatattaatgtcagtgaaaatacttgggtttaggtgtgagggtgaggtagggctgagtagtaaaaaaattcagtaccatggataagaaaaggtgcccatgagatccataacccccgaagggcaagaattacactgtgccacgtccagtggggagccattgaaaatttccattactccacaaagatgcaggctttggaggcagacacatgagagtacagttcctggctctaccacaaaattgcagtgtaaccttggcctagcttcagttttttaatctgtagattaaatagtataatttttttttatttgatagtagaatatttttgagctccagtggaagtgataataaatatattttaggtgattgtaaggtttaaagatatataaaatttcttggcataatagcagacataggataagtgctactataacagggtttacagtattgctagcagatctttatccccttggatctttttctaccgaaatgacaagttaccacctttaaatcatcttacctatatgtatcaactagtgggttttgcttttttatctttcatagacaatcacttatatcatgataaacaggccatgactattaggggaaatataaatttttctgttttaaagtaaataggagtttacattcagaaagaactgtaagacctgggctcacaatatgctgattgtgagttcttttgtacagcttctctcacagggaaatccattttggattcccccctcccctgccgcccaatagttaaggtaaataaaaaaaaatagttcaggtaaaacagaatattaacacttattatgttgatttaatggatgcataaattttattaataaacattaggagaagtcctgtttaatgacttaaatcagcagttggcaaactacaagactataggccaaatccagctcattgcccatttttgtaaataaaagttttattgggacacagtcatgccaatttgtttgtgtatggtctatgactgctttgaactgcagtgatggagttgagtacttacaggagagaactacaaagcctgaaatatttattcatcatctagccagttacagaagagatttgccgacccctgacttaaatcatgctctttatccttgggtatttcccacacttagattagttttattgcagaatttattatattaaccatcactatcattttgaacagttcttaccaagacttcaaaatgaaaatgtaaagtataaagtgtagaatttatgcattaatgtttaaaaatatttctttgtgtagtattttggttttttatatttttcagtgaagtctaattctcatgatcttctatagtatgcaataattgtcaatttttgttttgtttgttttgagatggtgtcttgctctgtcacccaggttggaatgcagtggcgtgatcttggctcactgcaacctccatctctcaggttcaagcaattctccctgcctcagtctcccgagtagctgggattacaggtgcctgccaccacgcctggctaatttttat

SEQ ID NO: 57456 - DNA, 1799 bp, Homo sapiens
taaagccttctttttaaatcacttaaatagctacataataaattccgtcaaatttgtatgactttttccagctctctaatttaatggaagattcttatatgattctcactagtaaaatttatcagttacctccctgctgttgattctctatagaagaaatggagaactttccctcattgaaaggcctatagaaaaatcttgtctgcattattcacaagattcagtgtatcagtgtggtagacaactcctctggtctttttcattaacatagaatatacttggagtcaaggttattctgcccctggtagattgatacattctatagttctttgaacatctaagttggtatagacaggattattaaccttgactctatggctttcatatagttggcatttaaattatttttatctacttatatttatttgtgactttttattttagaatggattctttcttcttggctgaaatgtttaaatatctttacctgttatttgctgataaagaagacattatttttgacatagaagattacatctttacaacagaagctcatctgttacctctttggctctctactacaaatcaaagcatctctaaaaagaacacagtgagtttttaaatgaaatgtcttattctcttttttatttctacatgttttatttttccaagtgaaaagtaatccatgagtagaattcaataaatatatgtatggtaagaataaatatatacattttcctattttttttcttttattgcatcctgtatacacttatatatttcattaactgtttccttttaaaaattatgttgagtaggccaggtgcggtggctcatgcctgtagtcccagcactctgggaggcccaggtaggtggatcacaaggtcaggagattgagaccatcctggctaacatggtgaaaccccgtctctactaaatatacaaaaaattagctgggcgtggtagtgggcgcctgtagtcccagctactcggaaggctgaggcaggagaatggcatgaacccaggagatggagcttacagtgagcagagattacgccactgcactgcagcctgggcaacagagtgagactccatttcaaaaaaaaaaaaattatgttaagtaaaataattatttctgtttacataaaatgtttttctcttgtagacctcggaatatacagaactggatgacagtaacttcgattggacttgtccaaatactcagatcctctttcctaatgacccattgtatgctcaaagtattcgtgagcccttgaaaaatgtggtggataagagctgtcctagaggcatcatcagagtgtaagatgtattattttatattttctaatatcaaagttgtttcttagtaaatgacagagaacttagggagcatgtatcaacagccaagaagacattcacataggccgaaaatgttgaggtatgtagctatcactggttaaaataaaaattagtagtaaagttagatagtaaagcttattttgcagtaatatcttttttattattttggaaactttcaatatatcttttattttatgaactaaggtaataatagtgggcagcatgtaacagtttttaacttctataactcatttttcatggaatagtttcatcgaatattttctggccaggcatgatagctcacgcctgtaatctgaggacactgggaggccaaggcaggtggatcacctgaggtcaggagttcgagaccagcctggccaatatagtgaaactctgtctgtactaaaaatacaaaaaattagccaggcatggtggcaggc

SEQ ID NO: 57457 - DNA, 1001 bp, Homo sapiens
caacagctttctgaagtgtactattacagtcttcattttaaaggtgaagaaaccaagggaaagagaagttagggaacttgcctaaggtcacacagttagtaagattaagtcagaattctaatctaggcagattggctcttgacaatgatgttatactggcaattcattaaagaacaataattaaacacctactgtatgccagccactgcacttaagtgtggggtagaaagataaaatagaaccagtccctgcactcccatgacttgtagttagtgaataagataggtgtgtaaagaaataatcacaaccatgtgatatgttctaaaatacaaaagaggtaacaagttgaagaattgcagaggaagacatgatttactgttcagaattctatttttcaaagtgtaacatccttctttttttccccaccaaatactccttttatgacattgtttctggacctcttaccactgacattgccccattctgattgcattccagtatatataataactcttaaaatatcacatccagaattaaccatactcaagatgtgtctggcacacagcaccataactgtctgtattcaggcaaagggtcactaatgttctatgaggctgatgagtttccaccctctatccagttgaggaccactgcttcattgactcactgttcctgaggggattgttgtgcctctcagatgtctttagccaaatgaaaggttaagaactaccattcttcatcatattgtgttattagatgtgctttagattttttaggagctttattatgttcagctcacagtgagcttgtgatcaactagtttcacatacttaactgtatggtctgctgacaaatgagtgttctccaccctgcctttgagcagccaagttttcttttttttagtgtaaacttagaacttttatatttaactcagcaaaatttctttttttgttttgtttctagattttggtctagaggttgaatctcattagctaaactac

SEQ ID NO: 57458 - DNA, 1068 bp, Homo sapiens
tttatttctaaataatgctctgtcttattccacaaaggatttgaggcttttagaaaatataagctaaaatatgaaatatgtatgcttacacattgctaagagagattttaagtattctcaccacaaaaaaagagaactatgtgagataatgcatatgttaattagcttgatttagccatttcatagtgtataaatatatcaaaacatcatgtcatataccataaatatatgtcacttttatttgtcgatttaaaaaatttaaaaataaatatgagaactaggagagtaataatccagaggaaaaagtagagggaaggataaaaagaaaacacaattatgtttaccaccaggacccatgtagtggcattgctgagtttcattatggagtttttctgagttttctaatagccagaatgatcactgaaaaaataatcaatttaattggtaaaaatagcagcctttgcaaaatgaattgttattttaagcaatgaaaattgatgttttattgatgaaaatgtcctgattgctattttaattgcttttacctatttatatatattctatatattctggaactacttgtgtatttaatcacattttttatgccttttgtatgttgttttgttcaggcatttaccacagatttcagagtacactgggctcaacatcctttaaggccagaatttgcagaaagtacctacttcttatataaagtaagaaaatataccccattttacttaaagtttagcctccattctctgttggatctctcattctttcataatagtaattgggttttcagagtccccttttaatattataatgattggatatatcatgattcttattcatctagtccatagaattattgaatgatgcaagaattgacatgcaaggtttttttctttaaaaaatattatgtaaacatttctttaaagagaaattttatgttctagagctgctttctaaagcatgtctcttgcctttcttcaggcagcctttctgagcattagaaatttaaaaactaaggttatatagttaaattttataattgtgtatttaagaaat

SEQ ID NO: 57459 - DNA, 1003 bp, Homo sapiens
tgcattagtttagatagtagtgagcaccaaaatattgttagccgagaagggatcaaacttccaagatacaggaaaaagcaaattctgtaatacagaagctgatagctatattacaaggggacctatgagcatcagtgggccgcaaagtcataccaaccacgggctaacgccacagggcatagagatgttcagttccatttttctcagaaggtcctatattacagatagtctttaatagtctgcatgtgagttagaggacataaaggagtacatatatattttagaaagatctccatctaaaataacttaaatatttatataaattggtagttatttagtgaatttatatataaattctagtttaatttattcacagtgctatttaatgtgtttagagtagtacctcttttttcatctaactttcatgaacacatgttgtgatcttttagcactatgatgccataatgaggtatattagccagccacctcttctacttgatgtgcatatccacaaaccaatgctgaatgctcggacttggatggatgctttgcttgccttcttcccaggcttgcaggtataaagaattctgtcttcttaatatgaatgtaagatgatgatgttaattaggcgcatttttgatctttaaaactgaactacaaaacatagttgcagttcagaattgtatttgtatacatttttctgtttatgtaatgattagagataaaatcagctcatattttattaggtaattttattgttgttgatttctaggtgttaaagggggatattagacctgctattgaaactcatgaaatgttatatcaggtgattaaaaaacacaattttctaccagaggtaagcaaataatttttggaataatcttacacacacacaaacacacacacacacacacgtacacatatacactataagttgctaatataaaggtagaaaatgtcatcttcaaggcttgttggttctttttatttttttcctattaaa

SEQ ID NO: 57460 - DNA, 1031 bp, Homo sapiens
caaatatgcacttcttttttttttttttttttttaaattacaggaatatgccagaaaagctcttgattttctctgggaaaaaagacagcgaagtagtaatttagtgggcgtgactataaatattcatactggagattgggtacgaaaaggtatgtaagttaggctttttaaatcaagcctttgcatcctcaaaatggttgggaaataaagaattttcatttgttaaaataatctttgggatactataaagcataggttctcacaagattgctggaattttaattaatttagccagattttcttttttgatgccaaatgtgacacacttcttctacatgatttagtattctatttcttaatggatatagcattataggtatagggtgtagatgaaacgctataatttatttgaaaactagagaaccagatttctgcagccatctcacgtcaaggtgtggtttagtaagaatatgggtttaataaattctttttttctcctacctccagaaatatagtagctaagagcatagactctggggtcatgttgttggattcaagctatgtgatcttgggaaacttatttaacctctgtgtgcctctctattccatatctgtaaagtgggcatattaatagtaattagttgttctgtatgaggattaaatgagttaaccaaagtaaagtgcttagaacagtgccgggcatgtactacacttactatgaagtaagtgcccagtaacgagatgttagtccttttgattaataattttacttctgggaatctagtctgaggaataatacaaaacatagaaaattatttgttcccaagatgttcccatgcaattatttataaatagcagaaaattgggaaacagtctaaccatcagtaaaaaaagctaagaaaattattttacatcagcgttggaatattgttattaaaataaatcaggagcatgggaaggaacatgtaacaatgttatatgaacaaacaggatattgaattgtacaaagaactgtgattttatctttataa
